United States Patent Application Publication US 2008/0050393 A1 - sequence listing, part 4

SEQ ID NO: 10605 - DNA, 507 bp, Homo sapiens
ttcacatcagcagcagttctggtacagaattgtaatgtgttttcatttctctgtaggattcacctctcaccagcgtctgtcttaaaggtagggccaatttcatggagcatttttctgtgtgtgtccttgttgcttttgccagaaaaagtggatttgacatgcgtgccccgatgccaccatagcccctaggccaacaatgtcatggtctaaacaccaaaaagtgatgccccgcattccttccctggatggtaccgtttcttctccgtctctctttgatgattctttgggaccaaagtcctctccttagtgcgcctacttcctgtgggcatcatgccacttggaacttattggaactggcccgggagactctgcagtctgcgccgtttgaaaaccctgagaaagagatgccacctcaacttgaatcatgacagcccatcgctcagtctcaccctaaactcatggagcttgtttcagctcctcacttcttgactgtatttgtactatgtt

SEQ ID NO: 10606 - DNA, 370 bp, Homo sapiens
tctctatctagcaaaataacctggtaacactattagcctagtttcaattactgtatgaactcaaagtaacagctgcatctaaagaaaaataacctacaacactctcactaggttttcccccaattagcccaaattaatgaggtttaatactacctccatgatgacccacaaaacctatcttcccctgatgacccctacagtataagctaaaatgtagttaaaccacctgtcctagagactaggcagaggaagcaagacaaaatggcaatggctaaggaaggctacggttctagggcagattacggtactaaatctgtgctaccttagttaaatcactcaacttctcttgcttcagctgctcttttacaaa

SEQ ID NO: 10607 - DNA, 758 bp, Homo sapiens
  misc_feature (1)...(758): n = a,t,c or g
atcgggatggcatatttgatttttagtattagatttgatatttaatattttaaaaattaggtggcaaaggagaaactaaaaaagtaggaaaggggttcctgtgccttcagtgtgttaaaaagccagctaaaggggagtaaggggaagcaatggtgagatgccaagttgttcaccctgatatgacttgggcagggtctgaggtatcaaccccagacaacccagggcctgggacttattgcttctgttgggaaattgacagttcacactggcctttctcaggaatgttgggcactgccacttgacttaattcttgtggacccgggggcacctttttatgagcctttcatcagcctgtttccccagctgtaaaatgctgaaagtgaaaatgtagcttaaatggctttcttgaggaatagaaaagaaaccacgtataaactctctggtacatagtaggtgctcagcaaatgccccatnccctttctctgttgtacattccctcttttgaagttcagtgctttaccaaggcatttccctctctgctgtgacttgctttaatccaccatcctgttcaccggatgttcggttgagggagaagaatgcaaggcactgaggaaaattctggcataaaaacctttgtttacaaataacttaggaacctgctagaggaaaacttgtatgacttgagatcacattatttaacgttcaatatggtatttgcaattttttccagttctatttagtagagaaaagtaacttag

SEQ ID NO: 10608 - DNA, 486 bp, Homo sapiens
ctcagcctgctgattcagcatgttcttcccctgcaccatccactggaaaagtagaagcagcactaaatgaaaatacttgcagagcagagcgtgaactacgaagcattccagaagactcagagttaaatacagttacattgccaagaaaagcaagaatgaaagaccagtttggcaattctattatcaacacacctctgaaacgtcgtaaagtgttttctcaagaacctccagatgctttagctttaagctgccaaagttcctttgacagtgtcattttaaactgtcgaagtatacgagtaggaacactcttccggctgttaatagagcctgtaattttttgtttagattttatcaagatacagctagacgaaccagaccatgatcctgtagagattatattaaatacctctgatctaactaaatgtgaatggtgtaatgtccgaaaattacctgtagtgtttcttcaagcaattccagcagtttatc

SEQ ID NO: 10609 - DNA, 684 bp, Homo sapiens
aaggaggaggatccaacaataaaatattaatttataaaaaagaaattttaaaaagtaacaagaaagaactcgtttgaaaccatgtttcatcatcctgtagctacatctggtcttccttgtgtgctgggggactgcagataggtcaggggtatcagcctcagccactcagacaaggaaagggggcaccacatgagctcagggacccccacccccatccctggcctgggtgatggtacagcgtctggccctgccaggtccttggcctgcacaaagtcagtgacagcaggtgaaatgcccagctgggtgcctgcctggagcgggtgtggggcagtgagcccctgtgggtgtgggcttgggagtggctgtgacagggtggtgagcagggcaggggcaatcagacagccctcagaaggcctcatggcccccggtgagctgcaggaagaggtcttcatccagctcctccccacgggcccgctcccgcgtcgacaggaaaatgtagcccccgatatactcgtgtacaattcggcagctggcagacacgcagctgaaggccacattgatgtgttcatcaaactcgatggccacctgccggatgtcccagttgacattccactggcgcatgttgctgaaacgccaggtcttgaccacgtcgcccacggccaagtcgatgcggatcagtcggtt

SEQ ID NO: 10610 - DNA, 277 bp, Homo sapiens
caaccagtgagctggagaaggtgctcccccagaccatcctgtataagtactatgagcgaaaagccgaggaggaggttgcggcagcctacgccgacgagcttgtcaggtgcccgtcctgtagctttccggctctgttggacagtgatgtgaagaggttcagctgtcctaatcctcactgccgaaaggaaacctgtagggaagtgtcagggactctgggaaaggaacataatggcctcacctgtgaagagctggcttgaaaaagacggacatcaagtac

SEQ ID NO: 10611 - DNA, 1408 bp, Homo sapiens
  misc_feature (1)...(1408): n = a,t,c or g
cacggaacgtcatgaaggaccaacgcctggttttccatagtaaagttaggtcatctggttatgcgtcagcacccacatgtaactatgttttcaccaaagaccaacatcaagagtgaggggaaaggatcttcaaggagcaggagcagctgcgcacgggaggcataccccgtggagtgcgctgtgcccaccaagcccggcccccaggtcgctgccgcccccacctgcacacgtgtatgctgcatccagtactcaggagatgggcagtggctggcctgtgggttggccaaccatctgttactcgtttttgatgccagcctgactgggacacctgctgtgttttcaggtcacgacggggcagtgaatgccgtgtgctggagccaggaccggaggtggctgctctctgcggcccgggacgggaccctgcgaatgtggtcggctcgtggggcanaactcgcactgcttctgatataaacagaagagcaagtccaagctgatttgcaggctctccacgacgggtgcagtagacatgaccagtttatcggcagtcaacgacttttattcccacatcgtactcgcagctggccggaacaggaccgtggaagtgtttgacctcaacgccggctgcagtgcacggtgagtagcggaacccactcacggcctgtccatcaaatctgccaaaataaaggttcatcatttacaacccaacagcctcaggcttataaccttttcctgaccacggccattggcgatgggatgagactgtgggacctgagaaccctgaggtgtgagcgccactttgaagggcatccaacccgcggctatccatgtggaatcgctttcagtccttgtggacgattcgcggcttgtggggccgaggacagacacgcttacgtgtatgaaatgggctcaagcacgttttctcaccggctggctgggcacacagacactgtcactggagtggccttcaacccatcagcgccccagcttgccacagctaccttggatggtaaactccagctctttctagctgagtaaccactgacctgtgagctgggtccaggaatgctgtgaggaacaacttaaaagtaagaagtagtggttcatccatcagggggccagaagcagcaactgtttttcatattttgagacttgcctcagatttcccccgtttgcaagctcctcccctctgtgtgtgccatgtcagagttttatgtctttctgctcctcaaaagggatccccttcattgggaaaatggaaatggcgtccagtacttctgcacagaatttggtaaagttaaaacaaaatatctttcaataaaacataatatagtatttgtttgataattagagttggaagaaaaaagagagaatttcttttgggcagtgaaaataaagcagttaacagtca

SEQ ID NO: 10612 - DNA, 464 bp, Homo sapiens
cacaatcaaaagtaataggaatattcaaaaatgtaaaagttctgtacaagggaaatacagatagcacacgggtaaatctcattaagcatacatgccatttgtgttttaaaaatgttttataaaaactgcaatttgaaacaaataagtgagagtccttccctgactgtggaaaatatataaattatcgcccctaccgctgggtaccgaggtgccacctgctggagctagagagagaggtccccgtgtgtttcctgacagggccctaagccgcacaaggggacccgcctcctctgtggcagtggcttttccttgtgggtgattcactagtatttcctttcacttagaaaacttctttgggatcatagaagacaactgctcacaagtgaaagcaagactagagatgatttcagattgctgcgtccaattcattgggtgtattttgtatttttggtgaccaaactctc

SEQ ID NO: 10613 - DNA, 1631 bp, Homo sapiens
cttttctcaagacaactacataagcagacaaaattgcaaagatctgccctgtgtcgagtatgacagccacgactcgtggctctccggtcggagggaatgacaaccagggccaggctcctgatggacagtctctgccccccctccaacagaatcagacttcatcgcctgattcttccaatgaaaattccccggcaactcccccagatgagcaaggtcaaggtgatgccccaccacagcttgaagatgaggaacctgcatttccacatactgacttggccaagttggatgacatgatcaacaggcctcgatgggtggttccagttttgccgaaaggggaattagaagtgcttttagaagctgctattgatcttagtaaaaagggccttgatgttaaaagtgaagcatgtcagcgatttttccgtgatgggctaacaatatcattcactaaaattcttacagatgaagcagtgagtggctggaagtttgaaattcataggtgtctggtggagctatgtgtggccaagttgtcccaagactggtttccacttttagaacttcttgccatggccttaaatcctcattgcaaattccatatctacaatggtacacgtccatgtgaatcagtttcctcaagtgttcagttgcctgaagatgaactctttgctcgttctccagatcctcgatcaccaaagggttggctagtggatcttctcaacaaatttggcactttaaatgggttccagattttgcatgatcgttttattaatggatcagcattaaacgttcaaataattgcagcccttattaaaccatttgggcaatgctatgagtttctcactcttcatacagtgaaaaagtactttcttccaataatagaaatggttccacagtttttagaaaacttaactgatgaagaactgaaaaaagaagcaaagaatgaagccaaaaatgatgctctttcaatgattattaaatctttgaagaatttagcttcaagggttccaggacaagaagaaactgttaaaaacttagaaatatttaggttaaaaatgatacttagattattgcaaatttcttctttcaatggaaagatgaatgcactgaatgaagttaataaggtgatatctagtgtatcatactatactcatcgacatggtaatcctgaggaggaagagtggctcacagctgaacgaatggcagaatggatacagcagaacaatatcttatccatagtgttgcgagatagtcttcatcagccacagtatgtagaaaagttagagaagattcttcgttttgtcatcaaagaaaaagctctgaccttacaggatcttgataatatctgggcagcacaggcagggaaacatgaagccattgtgaagaatgtacatgatctcctggcaaaattggcatgggatttttctcctgaacaacttgatcatctttttgattgttttaaggccagttggacaaatgcgagtaaaaagcaacgtgaaaagctacttgagctgatacgtcgtcttgcagaagatgataaagatggtgtgatggcacacaaagtgttgaaccttctgtggaatctggctcacagtgatgatgtgcctgtagatatcatggacctggctctcagtgcc

SEQ ID NO: 10614 - DNA, 701 bp, Homo sapiens
acacaaagcgaaaaacaaaacaggttttaatggttaaaacagatgaattaataggtttataataaccattaactaagggaagccctagaacaagaaataaggatttttaattgcatgcaaaacctagttaccataaaaaccaatgcaataccaaaatatctcagcttcctagcatagactccaggtcttttcatttccaatacttggcagtcataatatgtacactttcatatgcacctggttgtggagggataagctcattcacataggactacaaatatctctcacaggtaggagggcacaaaagaacaatatcttcctccacttttttgggtccatcttgaaaaacaaaaaaggcactcccaaaggttccttggtaacacctttgttaggtttcttaattactaacataatctttacatgtaaggttaatggtccactcatttcatagatctgggaaccatcaggcattggaactgcctttaactcacatgccaaacaactggctttcttaaacaatgacaaaaactgtatacttgttttaaaaacatttgggctttgtttccttgacaacttatatatgcttaatcactggactttggcatgcagagccaaacatatcatggaactgaaagaaccacaatatgacatggtgacagaagactctttgaatcattattctgttttccactatcagctgc

SEQ ID NO: 10615 - DNA, 300 bp, Homo sapiens
ttcatgcttcctctgtagtaaggcttcctagagttgcatccttaaccctcatctctgggtggccttcctcctgtgggtttggcgactacctcctcagtgcgtcctggccttccgtatctggaccagtcatggctccagagttgtggcctcggcaccttcagagcctgcctggaggtcccctctgttctcctcgccaggctcctgcctgcatgctggaatttgggtgtccttccttgtctttagttccctcttttctctgctatccacctccgttgggtcaacaagtgcggtcagttctgt

SEQ ID NO: 10616 - DNA, 378 bp, Homo sapiens
  misc_feature (1)...(378): n = a,t,c or g
ctcattcactggcttttttcttgcagcataatgttgtggaagttcatccatgatgtatcatctattagtatttgttcttttttattatgaaatagtatttctccgtatagatatagtacattttgtttatccatatactaatatatgggatagaaacctaagaatagtatcattaaattgcatgatatattcatatttatcagttttaagaaaaggccaaactattttccaaagcggtgatactattttatatttccatcagcattgtaaagggccctcatttagccacatcttcatggacatattttatcactggtcatttttattatagttattctagtgtgtgttaancggcttctcattgcggtttaatttgca

SEQ ID NO: 10617 - DNA, 1286 bp, Homo sapiens
cttgagactgccgccaagtcggtgtcgacgttcccgggcccacagctggcacctgggactcggccttgcccagctagcggggtcgggacggctgggcgcggcgtgctgggcttggcgccggaggagagagcccagacgccgggaacgtcccgggccccgcctctcccccgcccccgcccgaacccccgggcctggggagctggaggaggtgccaagcgggcggaccaccgaggaggacctgggaggggaagtgttagggtaaacgttgggatcgggtttgtagttacctataaagtgattttagaaacacctgcgtggtggcagttgttgacgttcttgttcatcttttcagtcaccctccttccgtcccccattttttccttccatttgtttttcgtgttttacagtaaaggcatgacttcctggcaccacagggaaaatcgggtgcaagcccagaaactatttccccaccaccacttgttgaaaaactgatttgaaggcatctccggggttgaacaaacggaaagtgccaggatttgatgcgtctctggtttcgctctggaagcccattccctgctaagtatcaagacgaaaaaaactggaaactaatccgaaccatatttatttagagtcagaatggagcgatttgtagtaacagcaccacctgctcgaaaccgttctaagactgctttgtatgtgactcccctggatcgagtcactgagtttggaggtgagctgcatgaagatggaggaaaactcttctgcacttcttgcaatgtggttctgaatcatgttcgcaagtctgccattagtgaccacctcaagtcaaagactcataccaagaggaaggcagaatttgaagagcagaatgtgagaaagaagcagaggcccctaactgcatctcttcagtgcaacagtactgcgcaaacagagaaagtcagtgttatccaggactttgtgaaaatgtgcctggaagccaacatcccacttgagaaggctgatcacccagcagtccgtgctttcctatctcgccatgtgaagaatggaggctccatacctaagtcagaccagctacggagggcatatcttcctgatggatatgagaatgagaatcaactcctcaactcacaagattgttgactaggaggttaccaccattgtgatcaagataaatgtggagtattaaagttatgtgttgattgtgtggttcatttttgtatttatttcatttaaaatcatgtgacgcagaatagttttgcaatgtgtatatagttgcaggcaaaaaa

SEQ ID NO: 10618 - DNA, 114 bp, Homo sapiens
gtaacttatggcttattcttggtgcttatgtaagcagagggcctgctgcccaaggagaacttggtgcatataatttttccaggggacgggaaatatcgtgatccaagtaaacaa

SEQ ID NO: 10619 - DNA, 3080 bp, Homo sapiens
cggcagccagctgagagcaatgggaaatggggagtcccagctgtcctcggtgcctgctcagaagctgggttggtttatccaggaatacctgaagccctacgaagaatgtcagacactgatcgacgagatggtgaacaccatctgtgacgtctgcaggaaccccgaacagttccccctggtgcagggagtggccataggtggctcctatggacggaaaacagtcttaagaggcaactccgatggtacccttgtccttttcttcagtgacttaaaacaattccaggatcagaagagaagccaacgtgacatcctcgataaaactggggataagctgaagttctgtctgttcacgaagtggttgaaaaacaatttcgagatccagaagtcccttgatgggtccaccatccaggtgttcacaaaaaatcagagaatctctttcgaggtgctggccgccttcaacgctctgagcttaaatgataatcccagcccctggatctatcgagagctcaaaagatccttggataagacaaatgccagtcctggtgagtttgcagtctgcttcactgaactccagcagaagttttttgacaaccgtcctggaaaactaaaggatttgatcctcttgataaagcactggcatcaacagtgccagaaaaaaatcaaggatttaccctcgctgtctccgtatgccctggagctgcttacggtgtatgcctgggaacaggggtgcagaaaagacaactttgacattgctgaaggcgtcagaacggttctggagctgatcaaatgccaggagaagctgtgtatctattggatggtcaactacaactttgaagatgagaccatcaggaacatcctgctgcaccagctccaatcagcgaggccagtaatcttggatccagttgacccaaccaataatgtgagtggagataaaatatgctggcaatggctgaaaaaagaagctcaaacctggttgacttctcccaacctggataatgagttacctgcaccatcttggaatgtcctgcctgcaccactcttcacgaccccaggccaccttctggataagttcatcaaggagtttctccagcccaacaaatgcttcctagagcagattgacagtgctgttaacatcatccgtacattccttaaagaaaactgcttccgacaatcaacagccaagatccagattgtccggggaggatcaaccgccaaaggcacagctctgaagactggctctgatgccgatctcgtcgtgttccataactcacttaaaagctacacctcccaaaaaaacgagcggcacaaaatcgtcaaggaaatccatgaacagctgaaagccttttggagggagaaggaggaggagcttgaagtcagctttgagcctcccaagtggaaggctcccagggtgctgagcttctctctgaaatccaaagtcctcaacgaaagtgtcagctttgatgtgcttcctgcctttaatgcactgggtcagctgagttctggctccacacccagccccgaggtttatgcagggctcattgatctgtataaatcctcggacctcccgggaggagagttttctacctgtttcacagtcctgcagcgaaacttcattcgctcccggcccaccaaactaaaggatttaattcgcctggtgaagcactggtacaaagagtgtgaaaggaaactgaagccaaaggggtctttgcccccaaagtatgccttggagctgctcaccatctatgcctgggagcaggggagtggagtgccggattttgacactgcagaaggtttccggacagtcctggagctggtcacacaatatcagcagctcggcatcttctggaaggtcaattacaactttgaagatgagaccgtgaggaagtttctactgagccagttgcagaaaaccaggcctgtgatcttggacccaggcgaacccacaggtgacgtgggtggaggggaccgttggtgttggcatcttctggacaaagaagcaaaggttaggttatcctctccctgcttcaaggatgggactggaaacccaataccaccttggaaagtgccggtaaaagtcatctaaaggaggcgttgtctggaaatagccctgtaacaggcttgaatcaaagaacttctcctactgtagcaacctgaaattaactcagacacaaataaaggaaacccagctcacaggagcttaaacagctggtcagcccccctaagcccccactacaagtgatcctcaggcaggtaaccccagattcatgcactgtagggctgggcgcagcatccctaggtctctacccagtagatgccactagccctcctctcccagtgacaaccaaaagtcttcacatgttcaaacgttcccctgggttcacagatctttctgcctttggcttttggctccaccctctttagctgttaatttgagtacttatggccctgaaagcggccacggtgcctccagatggcaggtttgcaatccaagcaggaagaaggaaaagatacccaaaggtcaagaacacagtgattttattagaagtttcatccgcaaattttcttccatttcattgctcagaaatgtcatgtggttacctgtaacttgaaggtggctacaaagatgactgtggacgtgggttgcactggccacccaaggatgtctgccacacctctccaaagccctccctacctaccaagatatacctgatatattccaccaggatatcctccctccagatatacttggttctctccaccaggttctttctttaaagcaggatttctcaactttgatacttactcacatttggggctagacagttctttgtttggaggctctcttgtgcatgtaggatgttgagcagcatgtgtggcctgtacccagtacatgccacccagttgtgacaattaaaagtgtcttgagactttatcatgtgtcttctgccctaggtgagaacccttgcactacaggaaccctacacccaacctggggggaatgtagggaagaggtgccaagccaaccgtggggttagctctaattattaagttatgcattataaataaataccaaaaaattg

SEQ ID NO: 10620 - DNA, 396 bp, Homo sapiens
ggggactctaggagggtggcctgggtggagacaagctcagtctaatcaaacaccagaaccctatcaagtcaaaagagctggggccaggcagctgaagtcacaggtttcagagatggtttgaaggcccagtcttctctcccagcctcagttggagccaaagctttgtcctttagccagcaccaagatagctatggatcttaagagcaccagatccagagggggttgggtttgctgaccttcatcatgcattcattcatacagcaaatatttactgagtgctttcatttgccagggactgcgttaggccctggggaaacatcagtgaataaaacacggtccctgccacagtgcttagggcctactgagggaaagaagtaaccaggcaactacaaaaca

SEQ ID NO: 10621 - DNA, 606 bp, Homo sapiens
tttactaatcaaatctattgcttttattgtttttaagtaagtggtggtatatgtcatctttttaaatgtttcttttgggaagatcttatagaaaatggcaccctgaaactttcagctctatgtcccaaaaattatctttcaacaatctgatgaagtttcttaaagaaactcttaaaaatgaagataatatacctggcctaaatcaaaacaatctgaaaaatggatgtgtcccagtggaaagactcaagtcttttcaagtttatcagaaatgccactatacaccactgtactataagtcgaggaggatggatatccaaaggtatcatttgttgacagttcctgatggtctcaggtatatcctataatcactggttactatgcatcatttcttgtagataaatggtattcatgtgataagctgccatccaacttggatgtctctgagcattccaataatatgaatgagaagcggcagcataatattcttgccatgccctgtagtaagctctccagtactcctcataatcctgataggtatcagaaaaactcagacgtgtttccctatgacagtcataccaatcatcttcctgggcttcagtctgcaat

SEQ ID NO: 10622 - DNA, 1541 bp, Homo sapiens
agaaggaagggtcatatgtttattgctaaactgtcaaaaaggaatatattctgattaaattattactcctcactttgagggtgtgagaattttagaagatttaaatgttctatataacacttagatttctgatattttggaagaagttagaagttaatgaaagcaaactcagttaccaattttctggaaaatatccatgtggtaatggtagactttttaggtggcaatttctaggtctgaaatatagcagaggaaagggcgctgagggcagttgcagggcagggcagccctgtacttaccctgtactcacctcatccgacagacgctgtggatgaggaggggcttggcggaggcgtgagcaccgatgtccctttgataacctgcactcaccaagatgaactatttgccgccctgtcttttcctgggttggggggtggcatctgatggtggcagagtgcctgttggttcgcccgtgggtctcatggttcagacagagggaggtggacggcagggatcagggagccaggagcgcgcctcagacttgcagcaaccattgtgatttgggttgttcggaatatttaaattactgatcagaagatgaaagtagcttttctcttgggaagtcttgcagcccgtgggagtgataccaggagcaacacagagctcagcagcggcgccaaggtgttccctgtttcctcagcacgtgagccttcaccgcctgcttcattcaggagccagtgcagcagtaatacagtctatacattgttctgttttcaaatttatcctgaggctttgttgagcataaatgattatacgataaaggtatccgttattttggaactcatttcagttgggatctcctgtatgcagagtgttgcatttagaggtttgagtcccatcttggtttcttgccgtgctgactgtagccttcaccttgacttgaatgaaggtctgtggttggaatgtgtgaggagccgctgaggtgttcaggaggtgctgcctggaggtcggtttcttcctgggtgttacgggcaactgctcacacagttgtttctctgtgaacatttccagtgtttaatccaaaatgaaaacccaccaatgcttttgctaacttcagtgccttttataaatcatttttaaatttcctgaacttgctttttgaggatatacagggatattaagtagacgcaggattgtttttgtttgtaaaaattctgaattgaaactttgttttaaaaaaaggcttctttctttcatatgacaagagataggtcaggaatattggaatcaagatttaaatgttaaaattcgattttgttacacagggtgtgttcatttgttttgtagcagacaagatctagatcccagacagaaacaacacatgctattctaaaaagccgcattttaaaaggcaccttggttctcaaaagaaatcagaatatggatattcgtagtgatgatctgttttctctaaaatcttaccatattgtctgtatatggttgtaaattcaaatggaaagtaaaacgttttggccctgaaa

SEQ ID NO: 10623 - DNA, 261 bp, Homo sapiens
aaagactcaccttgtttgattctagtttttggcagttatgagtaaggctgctaaaaatgtttgtcggaggacttttgtgtgaacatcagtgttcagttcatttgggtcaatattgtaggattgagactactgaatcagtaggaccatgcttattttcttcagacctccgcagactgtcttccgaattggctgtagaattttccattcacatcgatagtgaatgagtgttcattgcattggcattaggaagtgcagtgtttt

SEQ ID NO: 10624 - DNA, 375 bp, Homo sapiens
  misc_feature (1)...(375): n = a,t,c or g
taaaaaataacaatctgaatgttttctctagggatggaagtaatataaccataatgcaagaagtctggtaaatgggtagaaagtcatctgatctaccaccacccaccacagccactgttatagttggtgtacttttttctcttttcgtacctgtactttcttatgatcacaacggatataatattaaaattatctggctttttatcctaaatcagccactttccttttggaactttttttttctttttcttttttttgtgaggcagagtttcactcttgtcacccagggctgggagtgcaatggccccaatcttgggctcactgcaaactccactggcactctaggccgggggcaacaggctgnaggactctgtc

SEQ ID NO: 10625 - DNA, 465 bp, Homo sapiens
gcaatccgcagaaactacgagttgatggaaagtgagaagacaaagcttctcattgccgcccagaaacagaaggtggtggaaaaggaagcagagacagagcggaagaaggcgctcattgaggcagaaaaagtggcccaggtggctgagatcacctacgggcagaaggtgatggagaaggagactgagaagaagatttcagaaattgaagatgctgcatttctggcccgggagaaggcaaaggcagatgctgagtgctacactgctatgaaaatagccgaagccaataagctgaagctaacccctgaatatctgcagctgatgaagtacaaggccattgcttccaacagcaagatttactttggcaaagacattcctaacatgttcatggactctgcgggcagtgtgagcaagcagtttgaggggctagctgacaagctaagctttggcttagaagatgaacccttg

SEQ ID NO: 10626 - DNA, 381 bp, Homo sapiens
accaatctgaagtggggtttttagtgttgagttctgaagagttcttgatatatttgggatataagccttttatcaggtatgtgatttacaaatcttttttccaggttgtggctttgtattttgatcctgttaacaatgtcttctaaaaaattctgatgatcagtagtgcaaaatgctgtgtttttgaagagaagttttaaattttgattaatttactaatttgttactttgtggattgcatttttggtgtcatgtccaagaaatctttgcctgacccaaagtcccaacagttttcccctgtattttcttgtagacattttatagttttgggctttacattgagatctaggattcgtttggggttaatttttgttacgtggt

SEQ ID NO: 10627 - DNA, 412 bp, Homo sapiens
ttttttgtacatcatattttttatagaagtgattatatcacaaagaaaaatcctgccaaacaactacaaatcaagaatctgtgggcaaaaagctcaattcatacaatgtaaacacattgaaaaaacaaatgcaaaataaaaaaagctgttgatacatcaccttgaaaaattaacacaactaaattaagggctatagaaaatgtgttcagcttatatatcatacacgtcatttaacttgaattttacaatttttaaactaatagaattcagatttattacttgaaataatggtatacccagctgttcttcataatggcaagcatattccatatacaatacaatttatttagcatagttttatactcttaagtaaaatatgttagtgattaaaagcataaaggaataaatatgc

SEQ ID NO: 10628 - DNA, 389 bp, Homo sapiens
ttttttttttttttccccctcaggatgctttttctgaaggatgccagcctaggggaaaggaagaatgagaacctagggtctttctggagcacaggctgcattagcaaataccctccagggcacgcctgtccccaggccacagcgataaccaatccgaatggagaggacactggcatttgtgagtttcagagttcttggggactaacgtgtatttactggattctagaacacgtgatgctcccgacactcacctaccaagttagtcacctctccctccacaaggactcccactcctgaggcttcccgttactgtgacacaggagccggtacggagaacacgtccggcttgaacacttatctatgacaattggctgtgcctttgtgttggt

SEQ ID NO: 10629 - DNA, 447 bp, Homo sapiens
ctcgtttgtgctttgcgcttcctcctccgcgccttggagccggatccgcgcccggaaacccgacctgcagacgcggtacctctactgcgtagaggccgtagctggcggaaggagagaggcggccgtcctgtcaacaggccgggggaagccgtgctttcgcggctgcccggtgcgacactttctccggacccagcatgtaggtgccgggcgactgccatgaactccggagccatgaggatccacagtaaaggacatttccagggtggaatccaagtcaaaaatgaaaaaaacagaccatctctgaaatctctgaaaactgataacaggccagaaaaatccaaatgtaagccactttggggaaaagtattttacccttgacttaccttctgtcaccatatctgaaaaacttcaaaaggacattaaggatctgggagggcgagttgaaga

SEQ ID NO: 10630 - DNA, 1435 bp, Homo sapiens
ttttataatgtaaaacaagaccagaaaaagtttattctgtaatttttcttaaacaggtattcaattctatagaaaattgcaaataattatttttaatatttacatttgggtctgtaaacaaagctggtaaaaaaatcctaagaatttccatacatatttataaaaatttcaagaatatgatccttatcacttctgaaaagtatgcattttttaaattctaaaagccagtaaatgtagaagttgaaggggacgagaaaaacgctgttaacagattatctgaattttcctcttcccaaatatctaaaacattgcatataccactcttttctgtgtagcttgtgaaaccccaaaaattctgatttcccttcactagtctgaaacaagtctagtaaagactgtaccggtgaactacaaattctgttttcttcttgtgtaataaattcagttcttttatcaaattcagcatttggttccagattttcttttctatttcgtcctaatattattttcacttttcgatgtattttaccagaaggtaaactatccatattcttgaagtcacattcattgggttcctcaggaggagtatggaatggagcctttgcctgaacagttaggtgctcttgtgaactgtttattgttatcagaccagaatcatgagtaaatattgaatgaaggtccttttccttgagatcctttgctggaaaaagcacagtatctgacttctgttttggttgagatccactattatctgtactgaaatcagaaacatgtacagatgcctgtatgttacatttatagtgatctacccttagttcttctaagtcattttcacttaatgtgtgttcggaaatgtcaagaatgcattcctgtttgtttttatgtagaggtagctgtgtaaaattctgtcttatgtcatcttcagctgtacttaacatggaacatttattactcattttctcattaagccctctcaattcatttgaagggtgggggatgggctctgaaataaacaggagctttttttcagtttcctgggtctctttatacaggaaattctgctccttcactgttgtatcatcttcctggcaatctttctgagaaatatgttgcaattccactttttccttttgttcagtctttttcaggacacttgcagaaacaggagaaagggatccaacactgtattttattcttttctttttaggtgtgtccttttcatattccacaaagtcaaaaactaacttagatacaatatcatcaacaacttgatactggttactctgtgcaaagtttctgtgttgctcacttagaaggtgagtttctagatcttcatatttctgcaagcaacattcacaatatccttttttcttcttctctttcaactggagttgaattgaggttccaccatacttatcgccatctgtttggttct

SEQ ID NO: 10631 - DNA, 209 bp, Homo sapiens
agcttcccttgggccagataaccatggaggggtccataatatccttaaataccattggtgtggctttaagtggcttttgtttgttttactttgcttgaaaaaattttttaggcctggtacgggtggctcaatgccgggattataggcatgggccattgtgcctggctagctttttctttaaagccgtattcgtgtcctcttgccactga

SEQ ID NO: 10632 - DNA, 1440 bp, Homo sapiens
gagctgtgaaatcaaccccaccagatctacgctttgaaatgaggcaacatctaactggaaactcgctcaaagtaaggaagtggatgaaaagactcagggtcccttttctcttccccgtcttctctcagccacatctctcttatcctatcttggtgaagaagcttgcttggctaggagagaggtcagggacgagaagatagtgacgagaaagttccatgagactctcagaagtcccagcctgaacatcaaacctgaataaccaggagagacgtaacctcggcatactttcagtggtttacctcctgcccacgctgcaggtttttcaggtccttgctcgagtgtgtgctcataggcgtaaataaacgtgctatcagcagcctgcgttcagcaggcccagctatttaagcaggctgggcatcagcaaacacagcttccaaacccaggggcttgcgcttgcctttgcctcttccaccgcgcagggaccatgtcgggcggagaccgcgaggcggcccccacagaggaccaggtggaaatcctggagtacaactttcaacaaggttcgacaagcacccggattccaccacgctgtgcctcatcgcggccgaggcaggcctttccgaggaggagacccagaaatggtttaagcagcgcctggcaaagtggcggcgctcagaaggcctgccctcagagtgcagatccgtcacagactaaggagatggcaggcattgacagcttcactccatgaaggccatctctgtttctctcctccgcttaaccaagctgttgtggtttttcagcatagtgttgtatgttccattgctagctgtcctgctgtttaacacagtgttgtattttttttctaaatgtacataattagaaaagaaaataacaatagggaagctatgtgtatcttctgtgtaaagcagtggcttcactggaaaaatggtgtggctagcatttccctttgagtcatgatgacagatggtgtgaaaaccatctaagtttgcttttgaccatcacctcccagtagcaatttgctttcataatccatttagcaatccaggcctctggttgaaaagataatatgagggagaagggaacacatttccttctgaacttacttccctaagtcactttccttatgtatcatctaatacaatgatggttgagtgaaaatacagaaggggtgtttgagtattcagatttcataaaacacttccttggaatatagctgcattaacttggaaagaagcctgttgggccagaagacagaaactccaactggcaaaaaagcaagcaatctaagaaaaaaaaccaccaaagttcttgaatttactatatttaaatgcattggttaagtttattttgctaaataaagtgaactgctttttgtctctaaaatgatattctaaataaaaccttaactttttgttgaaaaaa

SEQ ID NO: 10633 - DNA, 2056 bp, Homo sapiens
catggataaaatgtgcatatttatttcagggcaacaagcgtatacacagcaaagcagtgtggggtagagcccacctcgtggcctgcaagccagccagcccctgccggtcgagaaggaagcctgtgtgagagcacacaactggaggccgggcgggaagagaaacacgtgccaacaggccacgcaggccagggaccccagacccggaggcagcgcccctttgagttcctctctctggtctccgatgttcttctgttgggatcatttcaccttgaacaaggtgacggtggtactgtagaagaggctcaggaggaagaggacgatgaaggtggaggcggtggcccacaggttctcaaagccctcctcgtcggcgctcacctccccctcggtggacttgtccacggtcctctcggtgaccctgttgggcagggcctgcatgggccaccacgcaggtgtagggtctcccccgtgttccattcctcttcggacacggtcaggatgctgtgggcgaagtaccgggcctggggcctgggggctcaggcattggggcgctggtcacatacttctccggggacaaggggttgccccctctgcatccactgcacgaagacgtccgcgggagagaagcccgtcaccaggcacgtgatggtggccgactcccgcaggttcagctgctcccgggctggtggcagcaagtagacatcgggcctgtgcagggcccacccccttgggccgggaggatggtctgcttcagtggcgagggcaggtctgtgtgggtcacggtgcacgtgaaacctctccccggaattccagtcatcctcgcagatgcctggcctcacccacggcgctgaaagtggcattggggtggctctcggagatgttggtgtgggttttcacagcttcgccattctggcgggtccaggagatggtcacgctgtcataggtggtcaggtctgtgaccaggcaggtcaacttggtggaacttggtgaggaagatgctggcaaaggatggggggatggcgaagacccggatggctgtgtcttgatcggggacacacatggaggacgcattctgctggaaggtcaggcccctgtgatccacgcggcaggtgaacatgctctggctgagccagtcgctctctttgatggtcagtgtgctggtcaccttgtaggtcgtgggcccagactctttggcctcagcctgcacctggtgccgtggtgacgccagaccccacctgcttcccctcgcgcagccaggacacctgaatctgccggggactgaaacccgtggccctggcagatgagcttggacttgctgcgggggttgccgaagaagccgtcgcggggtgggacgaaagacgcctcactttgggaggcaagctcagcaatcactggaagaggcacgttcttttctttgttgccgttggggtgctggactttgcacaccacgtgttcgtctgtgccctgcatgacgtccttggaaggcagcagcacctgtgaggtggctgcgtacttgccccctctcaggactgatgggaagccccgggtgctgctgatgtcagagttgttcttgtatttccaggagaaagtgatggagtcgggaaggaagtcctgtgcgaggcagccaacggccacgctgctcgtatccgacggggaattctcacaggagacgagggggaaaagggttggggcggatgcactccctgaggagacggtgaccagggtgccacggccccagagatcgaagtaccagtcatacctgccactgttacggtcttctcttgcacagtaatacacagccgtgtcctcagctctcaggctgttcatttgcagatacagcgtgttcttggaattgtctctggagatggtgaatcggcccttcacggagtctgcatagtatttattacttccatcataccgtataaatgccacccactccagccccttgcctggagcctggcggacccagtgcatgccatagctactgaaggtgaatccagacgctgcacaggagagtctcagggaccccccagctgcacctgacactggacacctctta

SEQ ID NO: 10634 - DNA, 316 bp, Homo sapiens
gggatgcttcttctctactcctatattcccttccatatggtgggtcttccacttgcatcacagcccagggcttcctctccccaccccacccccagctcactagtcctcctctgagaaaagtatcttaatatgatgggaaaatttgaaaggagagacggggtgtaagcagtgcagccacttcctctctccttctgcttgggagccagttgtctataggaagaaccttatgctgtggctgcttccatatggtactatccgggcacattgcccacccactgtccagggggcttttgctatcatccagaactgcctgtga

SEQ ID NO: 10635 - DNA, 389 bp, Homo sapiens
  misc_feature (1)...(389): n = a,t,c or g
ttttttttttttgccagcttaaaaaagtttaattgctgaaaacatccaaggcaggtgcgggccagtccctgcggggctcacaccccccttattggaccatcagctctgtgatgcccccttctcctggctacaaacctgggaagtagggcagctggtcccagggccctgagactggtgctgctctagaaggcctggtggggggggcaggcccccaaggcccttgaccagaactggaacagcaggcaagatggggcagcgtggggtgaccaaagatcctggatgaggccaatccaggctgggaccagcccagggtcagcantgagaccagggggagacagggtncccagggccttgcccaggggacatgctgttgaccccccgncaccctg

SEQ ID NO: 10636 - DNA, 1658 bp, Homo sapiens
ttttttttttttttttttatggctgttatgctttaagggaagcagatacaaaattcatcaatgcaaaagaatgttttacatactcattaacatagtgattaagggaaattatattttgacaaatacagtgtgtttggcctcaagaaactacagagctgcaactcaagataactggaaaggctccttacattgtttttgcccaccacctttatataatactcctaaatgatatctggggagggaattaaaaaataatacaaagctcttttcagctgtggttcaaagaactctggtgaagctgtatggcaatgacattttgggaccatgaaggtttccccagaagtatttccggtaagaggcagttggaaagcttaatagtttcaaagtctggaaagcagcaaagatatcttagagaaaacattataaaccccacttctctcctacacagacattttaaagcatggacgtaactttaaggagactgagaaaacatcagtagttttcacaaagcttcaatgaacaccccaaggcacaagtgttgaaaacggcctgttcactaaaacgtcacttttggaggtacaggtatgctgtgcttgcagtgagaggatgactttatccctacttaaaagcaccaggtgtcaagctcagcttccatttacacaggatgcaccaattatccctatgatagtgactgtttcaagtactatactacatttccaacatgtcttttgcctatttgcttagtcggtactggggttcttttaagccccgtaggtctgtagaatattttaaaaggctagaattacctcaaaaatagtcttgaaataatactgagtccttctaaagagctcactggatattttaataacatttacagaaagacaaaatttgcagtagcctgagtttaagtgaagaataatgtagaactaacgtgggctaaaatgtttcataattaatgtcaaaaattgccaagattattaatatatattttggtaatcactattgaccaggttaatttttttgtgcaaaatacactatgtattaatagaacaggaaaataattatttcagacccactaacaaaagaaaacccacagcaagagaaagcacctgtagggccaattaaaacgttagggaagtttactagctttagaatacatcaatatacttcgataaacaagagtgttttaatgtacttttagtaacgacccaatctaaggagccttggaggcttgtgaaaaagacgtccccacaaagatgctgcatttcctagtgtggggtgaattaaaatacttctgtaagaaggagggaactgaatcaccctcagcatgaataaacagcatttttcttttaaacagtaactcataatctgatgactcactttgctttactagttcaaaattaggcaggagaagaactaagctaattggtcagacccagaaacacaaagatttggcaagctgcagtcactcagctcatgatgtgtgataatcagcagaaaggctgctcaactcttgtccattccttcacatctgtagaggagttcgatataaccacttctctttatcaactttaagctgcatacaggcaaagagatcacaaactgcagggaggccataatggtctggggggaagttatgttcctcctgtagaggtgaa

SEQ ID NO: 10637 - DNA, 327 bp, Homo sapiens
atttatttagaactacaaactacaatttacacttttccaaaagctgtaggactatttgggaagggcactttattcttctaaaaggttactaaattctcttatatacttatactgatcacaatactgaaaaataataggaaaatccattgtcattcatttaccacctaatttgttaggatgccagaaaatcaaatttcacacatttcaataaaaaggcaaaactaagcatgtcaatcataggaaaaaaaatacttaatcaactaattttatttaaagcactcacaaactcttaagtggtacaagacaagtcaacgctgtttatcgaag

SEQ ID NO: 10638 - DNA, 332 bp, Homo sapiens
ttttgcctctgcaggccaactataaagtgtcaaactgcattacacaagaaccctattaatcttttacaaggaaactacaatgtgtttttttaaataggaaaagcattttaaagtctaggaatatagacagacaatttctaccctatatttcaacttggagcttaatgatattactttattaaaactactttgaaggatagtgagaaattctctcacgactttgaatttcctgaacaattttttataggcaataagtgagttattaagtgataattttgtactttctgagatatttttaaaagctaatgagcataacgtttgtaaaaaaattt

SEQ ID NO: 10639 - DNA, 402 bp, Homo sapiens
ttatagtccaaaatgtttacaagaaaacctaagtcttcaaaagcacaacttttgttgcttaggactttgcatcaactgttgttccagacctcacttcaacttcttggtctctgaactggttttagctagcatgcatgagagacagttttcatgtataatgtttctgctctgtaactggaaagtggtttactttgcataaatgctgatgaaaacttcatgactatgagacttttcttctgtgtatcaagaaaaagcttgctcgttggcaagcaattcacaaggtggggacagacttgtactttaacatgtagtccattcaagcaaacaactttggactctactgatagatgaaagagcaaatgatgactaagtttagcctcttgcatatcaacaatataatgc

SEQ ID NO: 10640 - DNA, 185 bp, Homo sapiens
  misc_feature (1)...(185): n = a,t,c or g
ctttttccctacactggttgcagggggagggagcctgccagctgcgaggacctctgtggtggaggagttggtgctgatggtggtggtagtgaccgctatnggtcctacagcatcgagatctgggnctcagccaacaagacgtggaaggaactagccacatgccgcagcacctctttcaacgtcca

SEQ ID NO: 10641 - DNA, 393 bp, Homo sapiens
cgcatggctcaagtggggctgtggccatagcaacgcccctgcaggggaggtgagggggagacccggcagcttcaaggagcgggaccccagcccttggcgatgtgacaggtcactctcatgcccagccttccttcttgtccataatggacatggagaggacttctgtgcttggtactctttaattctgagaagagaactctagctctctctctctaagctcagcagaaaggagtggtaaaagtggaggctcttctaacatacctgccgcaaattacactgcacctgttccttggcaaggtgcagcctgggattcaagttcaaggggctgcgaaacttctattactcatcgctttagatatgaaagcattttaaatgtttttttttaaatccatt

SEQ ID NO: 10642 - DNA, 563 bp, Homo sapiens
gataagcgtagtgccccaagtacatttttctttgaattggtattcacataactagctatagtaataattgttaaatagtgaagtccattgtgaaaagcaagggccatgtttcatttatttttgttttttgagcttttatcgcgtttaatagtaggcaatcaatcattgttgaactaaataactcattctttcattcttaacagactggattatggacagaacttggaaatattgagaataatttcttaaagccacttcatataggacttaatatgtcaaaagcacattatgaagcagaaattaaaaatagccaagaggcccagaaatctaaagatctttgttctataactgtaagtggagaagagatccctaatatgcctcctgaaatgcagcttaaggtcctgcattcagctcttttcacatttgatttgattgaaagtgttctagctcgagtggaagaactcattgaaataaaaacaaagtctacctctgaagaaaatattgggataaagtgaaagttccatttcctaaataaaaactaataaaatatagtactttccatt

SEQ ID NO: 10643 - DNA, 1995 bp, Homo sapiens
tactgactttcagcaccaacttgtggtcccaggtaagtttccacgctggtactttagccctgggctcgaacctgcggacacgctgtggctgcaactccccgcccgccagacctcagtacgcagcgcggctggtgagaaacataatgcactctgacttccacgcgtggaatggggagatggactgcacggcgggcggacctgctcgggctgatggacggcaggtggactgatgtgcgcagggactggcggcagcgcggtcagagccagtcagccaaagccaggccagcacaatagactgtcccggttcccgccaggaggcggccgagcaccaactgtacggtactgcgcctgcgccgcgaccgccaacgcgcccagtctacgcttgcgcggcgcaacagggccgactgcagctggaagatggcggcgtccgtggtctgtcgggccgctaccgccggggcacaagtgctattgcgcgcccgccgctcgccggccctgctgcggacgccagccttgcggagtacggcaaccttcgctcaggcgctccagttcgtgccggagacgcaggttagcctgctggacaacggcctgcgtgtggcctccgagcagtcctctcagcccacttgcacggtgggagtgtggattgatgttggcagccgttttgagactgagaagaataatggggcaggctactttttggagcatctggctttcaagggaacaaagaatcggcctggcagtgccctggagaaggaggtggagagcatggggggcccatcttaatgcctacagcacccgggagcacacagcttactacatcaaggcgctgtccaaggatctgccgaaaggtggtggagctcctgggtgacattgtgcagaactgtagtctggaagactcacagattgagaaggaacgtgatgtgatcctgcgggagatgcaggagaatgatgcatctatgcgagatgtggtctttaactacctgcatgccacagcattccagggcacacctctagcccaggctgtggaggggcccagtgagaatgtcaggaagctgtctcgtgcagacttgaccgagtacctcagcacacattacaaggcccctcgaatggtgctgggcagcagctggaggagtggagcaccagcaactgttagacctcgcccagaagcacctcggtgggcatcccatgggacatatgcagaggacgctgtgcccactcttactccatgccgcttcactggcagtgagatccgccaccgtgatgatgctctaccttttggcccactgggccatggcatagaaggggtccgactgaccagtcccggacaatgtggccttgcaaggtgccactgccaccatcggccactatgactgcactgtatggtggtggcgtgcacctgtccagcccactggcttcagtgcctgtggccaacaagctatgccagagtctccagaccttcagcatctgctatgcagagacgggcttgctgggtgcacactttgtctgtgaccgaatgaaaatcgatgacatgatgttcgtcctgcaagggcagtggatgcgcctgtgtaccagtgccacggagagtgaggtggcccggggcaaaaacatcctcagaaatgccctggtatctcatcttagatggcactactcctgtgtgtgaggacatcggacgcagcctcctgacctatggccgccgcatccccctggctgaatgggaaagccggattgcggaggtggatgccagtgtggtacgtgagatctgctccaagtacatctatgaccagtgcccagcagtggctggatatggccccattgagcagctcccagactacaaccggatccgtagcggcatgttctggctgcgcttctaggcgggaagcctatgtaagcaagagggcagggccggggtttgtggtcccccccccaccacaaacacagcacttcggctcctctaacctgtgccacaggtgaccaccaataaaatcctctgctgagaaa

SEQ ID NO: 10644 - DNA, 321 bp, Homo sapiens
gacttcagaatggacaggaatcagagcaaccctggaaatcctggtgtcaggacctaatgaagaagctctagagggagctgcccttgggataatgggacctagatgattctttgcatctgttccaggattcaagcaaagggagggtgttttcagttgctccagctttgaacagggaaggacaggcaccatgattgactcttgccagacataaatccaatgagaggcagtggtttctcccaaagtaaaatcagagtgctctagctagaatagatactggcaggcaaaaatgatagatatccatgatggccccactgactagag

SEQ ID NO: 10645 - DNA, 533 bp, Homo sapiens
  misc_feature (1)...(533): n = a,t,c or g
acatgtttgttgtttgttatttgcctcccaacatcagaacataagttccatgaaaacaggaacttggcctgtgttgttcaccccactgcctagaagagtatagacaataaatatttgttgaattgacaaagtagtaacttgtaaatagtctcatggataaattattaaaatgctaaccaaggtgatttatttcctgcttttgaataattttccagataaagtttcccatttactttctctggttatgttgaggaccagggcagaaacctcttgcctaagctaggtaaggagcctcaactgaccggcagaaagagtacacactgtatgacctctgaagggtttttctgtaggcaccacattcagcacaaattagcttccacagccaaaagagctctaacaggccggccctcaggcatctttttaaacacctctgtagtcaacactacacctagccaaagcccnagtgagtgtcttccgttgttattcacactagtatcatcacagttgcattcaccatatattctgaaacaaac

SEQ ID NO: 10646 - DNA, 366 bp, Homo sapiens
tgaaccccagctctctcacttcggtcccacccttcccaactccccacgcccaagtctttcagtggaacccaagactgtaagaacgtaggccttgtgagagtgaaggaaggatgctcgaacttgcccaggactcaggcttcagcttcacaatcccgaggaaaggaatgacatttccaaactgtcacctttgtagcgctgggtcaaagtctaaagaggacaaataaatagagacttctgtggcctcgttgtgcctattgaacaggagagctgcatgtcacaatcaatgagacctgcacagcttgtgaatcatcactgagactagttgtgtttttaatacctttaaaatgaagccacagcatctattct

SEQ ID NO: 10647 - DNA, 1167 bp, Homo sapiens
tttttttttttgttttttagtgtgtattaaaatgaatttatttacacagtaacatgatgccacggagtacacagcaaagtaccacagcaaaccaaagggtggcaccactgctggcagagaggacctttcaatgatagatttatacaactttacaatatgtaagtagaggggtgaagctccggaaagagcaaaaacaagattttcaaatacagagtgtgggcagggccagagagaattaaagagagattggaatgaggactgtcatgattcaaatcaccaagtagaatgaaatcttgcttctgtatttgcctcatgccaaaatgccctgcatatcctcaacagaaaatcccaacccagtgtgttcatacatcacactctttagttctaactggtaaaggaagggataaccaagtagtatttggagcaagttcctgaaacagtgtggtttaacctttcaaaaatgaaccctatgtctggttcaacattcaagttatcatgagtgcggacacacacatactatccacacactaacgggcaaagtgggttttctgtactacaacaatattcgtagcaaaatatatgactctgtacttctgctaggttaaaaaatgtccgacctcttttgattccctgaaactttcttgatttaaaaaacaaaaccaaaccaaaccaaaccatgggggtgaatgggacacgtcaagataaaaagctggaataaaccccagagactttctggagtgggaaacatgtaatgggatgttgggaatgcaggcccttgcagcccacctaggtggggaaagcttctagcagtggttgatgcaaaaatctattctaattttaaacagttgcagggagggggtgtttaacggctgtatagcaccttgtaccttctgggcacttacagatattaaatgatggtgatgatgaatggtacacaactctgtaggaaggtttataaaaacaattacaatttgttaagaaatttcccaagagttctttaaacaaacctatttaaactaccatatctctttaaaaaaatcttccgctctcagtattatatgatgttctcaagctgaggtttgggcaatagccacagtcatgtcaaggggacatggaagagatccttctccttaaatactgaggaactttgtatctgccagggctttc

SEQ ID NO: 10648 - DNA, 123 bp, Homo sapiens
ctgtgtggggagatggggtgggggctcttggactgatataaaactttctcaaatgtagttttttgaatggagcttgaaacgccgcatattcttgctcccacaaggatagtgggcatcatgaat

SEQ ID NO: 10649 - DNA, 313 bp, Homo sapiens
tttttttttttttgacaaaagccataaaattacttcttattaagtagtcacaaaaacttcatactagaattggtcacttgttttgaatcaagtaataagacttgatattgaaaagtatatatgcacatgattaattaaatataagcttagtcaaaattctttctgaatgcagacaggttcctagagtgatctcattttaatacatttacatattcactatttccatgttggtacagagcaccagacgaacttaaggttctgccttgtataattcagtatcttcatttgcagccaaacataatagattgcaaag

SEQ ID NO: 10650 - DNA, 1043 bp, Homo sapiens
tttttttttctcatttaattaaacgtttattcaatgaaaggatgtataaaaacttacaaatttgagaactcaactatacatgaaataggatgatgggatattcagtttttaacatatacatatactatagctattagctattctccccttctccttcagtccttacttctggctcctgttttgtcttgtgaggcccttcttttattggcctaacggaagattaatgaacaatttttactgctttcgggccaatggagaaaatttcaggcattaagaaagaagaaaggaaaaaaaacaaccaaaaacctggagaataaacatcaaaatcaagttttttcccaaacagcaattagattttttgtcctgatttctctttgccatttatttttgatgcttcaattaatgttgccagtaaactatcagcattgactttcagtcattgaagttactacatcttctggtcacaaattcccctgtaagatgagtattcctatatccttttccctgcagtacacacactgatttaaaagttagtgtaaaacaaattatcactggcagctgctagaaaatggcatgtcatgttctattcagaaaggcaatttatagaatagtacattcaaatttgatttttaaaacaaatttgtcagaaactcaaatacagcattttgttgttgctcaacttggaaagaagccagcaatgagataaggatgtgcattaaatccaccctgtttaattagccaagtaccccacacattttccccttacaaaacacacaaactcacagcttgtaatgttgtaccccaaaaattaagattgcccatcacattattactttttcctcctttttgttttgttaaagtagatttcttaactgatgatttctcttaagtggacataatctcaaaggatgcattctgtagtaagacacctggaggatgaatactaagaacgttttcttgggtttaaagtttccccacactttctagattttgcatagtacagagcccagccgtatttctaagcagcacgctgttattttctg

SEQ ID NO: 10651 - DNA, 729 bp, Homo sapiens
gtaggtgctccagacttgctctccgtcactaacactaaatgtgctgttttccttgtttttcatcaaacatttaagacaaacttagacctttctgtaaattatcttttaatttctcagcaaaatctaaaaggggaagaaaaaagtccatgaaaactaaaacttttcatgtttttagccagtgagaagataataaaccctgactgtagaaggtgtgttttcatgcaaactatacttctgagcttgttagcttctaattatatcttaataaatatattttattactagagcaagatgggtttttaaggaaaataatgtgaaattctggaaattttctttggggcagagaagagcattagccctgtcttatcattacattgccatcctgttggcactgcagcttgtgtatagcatgctaaaataaatttttgtgtgtgtgtgcagaaattaagggtccaattgagattgggtgatgttagtaacataataacaagttgtctggcctgacacagcatcacatcacacacacagaaattagtatatccatgtatgtcaaatacaggttaaaatatcagggcatttatataaagagttgtagtcttctgataaaagtagactggatcccctggggtatttggggagaaagtaactactttggctctacccctagaaatgtccagttttgagtgactgtagtatggatgggttttcttgttttgttgattatttgag

SEQ ID NO: 10652 - DNA, 700 bp, Homo sapiens
aacccataaggatttttttttaaataagtgcctctgtaaggaattgttgtgaggacctaaggagaaaagattgcaacaaatagagttaagtgttactaaacagcacaaagagatttgtcccaaagtcctgcttgtacctaggcaattaagtctattaacctaatgaccccaaaatactgacagttaatatgatggggcactagggttctcagaaagttaacagacattcctaactacatacctctaaccatataatcaaggaaatttcagtggagaaatcaaagtgaaatgttgcattgtttcatttagaagtgagactctcaaaaacctttggacagacagaagtgatacattctttttggcttctctgaacactgaggcctgagggatatggaaggaaattagaaaagcaatagctttctaaagatgtttaatcaagtgttgcttctaagttaaaaagcccaattcaggtggggtctgggtttgttttttgttttttccttttcaaatatatactcaattcaacctctgtatgtcacaaacccagaaagtttcttgtgagttgtgagacggaagaactttaaaattccaggcaagcaaaatggacatttaaaaaaggggactagagaggggaatctggccctaaggcgacaagtggttacacaaggcaattgaacacacagcagaactttaaaacctg

SEQ ID NO: 10653 - DNA, 1803 bp, Homo sapiens
atggcatccgttgcagttgatccacaaccgagtgtggtgactcgggtggtcaacctgcccttggtgagctccacgtatgacctcatgtcctcagcctatctcagtacaaaggaccagtatccctacctgaagtctgtgtgtgagatggcagagaacggtgtgaagaccatcacctccgtggccatgaccagtgctctgcccatcatccagaagctagagccgcaaattgcagttgccaatacctatgcctgtaaggggctagacaggattgaggagagactgcctattctgaatcagccatcaactcagattgttgccaatgccaaaggcgctgtgactggggcaaaagatgctgtgacgactactgtgactggggccaaggattctgtggccagcacgatcacaggggtgatggacaagaccaaaggggcagtgactggcagtgtggagaagaccaagtctgtggtcagtggcagcattaacacagtcttggggagtcggatgatgcagctcgtgagcagtggcgtagaaaatgcactcaccaaatcagagctgttggtagaacagtacctccctctcactgaggaagaactagaaaaagaagcaaaaaaagttgaaggatttgatctggttcagaagccaagttattatgttagactgggatccctgtctaccaagcttcactcccgtgcctaccagcaggctctcagcagggttaaagaagctaagcaaaaaagccaacagaccatttctcagctccattctactgttcacctgattgaatttgccaggaagaatgtgtatagtgccaatcagaaaattcaggatgctcaggataagctctacctctcatgggtagagtggaaaaggagcattggatatgatgatactgatgagtcccactgtgctgagcaatttgagtcacgtactcttgcaattgcccgcaacctgactcagcagctccagaccacgtgccacaccctcctgtccaacatccaaggtgtaccacagaacatccaagatcaagccaagcacatgggggtgatggcaggcgacatctactcagtgttccgcaatgctgcctcctttaaagaagtgtctgacagcctcctcacttctagcaaggggcagctgcagaaaatgaaggaatctttagatgacgtgatggattatcttgttaacaacacgcccctcaactggctggtaggtcccttttatcctcagctgactgagtctcagaatgctcaggaccaaggtgcagagatggacaagagcagccaggagacccagcgatctgagcataaaactcattaaacctgcccctatcactagtgcatgctgtggccagacagatgacaccttttgttatgttgaaattaacttgctaggcaaccctaaattgggaagcaagtagctagtataaaggccctcaattgtagttgtttccagctgaattaagagctttaaagtttctggcattagcagatgatttctgttcacctggtaagaaaagaatgataggcttgtcagagcctatagccagaactcagaaaaaattcaaatgcacttatgttctcattctatggccattgtgttgcctctgttactgtttgtattgaataaaaacatcttcatgtgggctggggtagaaactggtgtctgctctggtgtgatctgaaaaggcgtcttcactgctttatctcatgatgcttgcttgtaaaacttgattttagtttttcatttctcaaataggaatactacctttgaattcaataaaattcactgcaggatagaccagttaaa

SEQ ID NO: 10654 - DNA, 508 bp, Homo sapiens
atacaaaatcagatctataatttaatgccattttggttaattaaaaatacatgtacacgggacactactacatattacagaggatctatgcaaataaaaggaaacatcaaattcattaaaatgtttacctatgaggtaggggtaagaggttagatatgggagtaaggactggagataaaagggaccaaataaatcaagggagagagagagagctcggaggcaccaatgatgatcatataatgaactgagaagttcttaaccttttgtacctgaggtccagcatgaataacaataataataatgaattagatgtggtcatctgcatggaagttcactgtctaatgctaagagaattcccaaaacatataaaaatataaagcatggtgagtgttatgataaatagaaacctgtaagatctctggaggggcattttttgtgtgagcattgccatggaatgagtccaagtagagacagtaagtagttacaggcacccaccacactgtgttgg

SEQ ID NO: 10655 - DNA, 530 bp, Homo sapiens
tttttttttgtttttatttttttttgaagaaacaatagtttttatttatgtagttgtacatttttaaactaagggcaatacactgacatggttatgtgcataaaaattttgacttaaagaactggaagtttatatacacctggactataagaaacagaagaaaatcagtccacattttacagttagcagagaatcctaaatggcactggcctggccaccttttcattttacaaatgggggaagtgaagtgtgaccccttacttggcataggaagttaacttacacctaataactgacaggtttttgttttgatgacctattaattatgtagcctaggattaatatcccaaaattactctggtttaagtagctttattcagtggcataataacactgttttcttccttaagtcttcaatgaagtgacttaaaacagtcactttacatattaaaaatgaggagagcaattctctggaatctctcctttcagttcctttgtaggatttctggccttgaggatagtcttcatgt

SEQ ID NO: 10656 - DNA, 459 bp, Homo sapiens
  misc_feature (1)...(459): n = a,t,c or g
tttttatctcccaaataaactttattttgaaaagaatatcacaatatagtcatgtaaatttaaatatggcacactgagcagtattgacgcaaattatatagtcatgtaaccatgtttcggtcaatgtacaatatatatatgatggtggccccacagattataatggagttgaaaaattcctgtcacctgctagggatgtcttgatcctgaccctgcataggcctaggctagtgtgtttgtcttggtttttgaccaaaaagtttaaaaattcaaaatttaaactagataaaaagcttatataataaggatataaggaaaanattttttgtacagctatgcaatgtgtgttttaagctacgttattactagaagagtccaaaaattgtttttaaataagtttctaaactagaaaatttacagtaagctaaggttagttttttattatttccataaaaatta

SEQ ID NO: 10657 - DNA, 743 bp, Homo sapiens
ttttttttgaatgcggcatcccacaaatgggccctttatttctgaactgccaccactgcacggataaggccacttgggttgcaggcacactgtggagtgtcaggggacagagaggagaggggctgcacaccaagactgccctgtcctcacggagaggaaaagcggccgcagaagagaatcccgttggtcttgctgtgctggatgaagaaaaggaaggggtggtcggcgcagaagcgggggacgaatctggcacaccgcatcatcatgatggcagctgtggcggctgcagcctccgtgccttcctcattgacctccacaaaagacttgtgcacgaccttggacagagacaggtctgtctgggacattccagagaagtctgccttgcccagctcgaaggcatcagtcatgcccaggttgcgcaggacactctccatgtcgtagctttcctctagtttaaaccgcgggagggacacttccacctcctcttcatccatcatgtccagcctcgtccattctacgaacttctcgtaagtgagttctttctccaccgttctcaagtcagtggtctcgtccggaagcatgatgatcatattcagttccttgccaacatatggaagcaccaagatttgggtaaatatttctcctatatagggtcttcctaaaagtagattggcttaacatcatttggcaaggggtttttctccattctggctgggctttaaaacgattctccccgcggggtt

SEQ ID NO: 10658 - DNA, 201 bp, Homo sapiens
ccagaacttcacacagcactcattagcaaacaacgtcaaagtgtaaatgataagcaggaaaaaaaccaagtaacacgaatgccatttttctttgatgcaatcacgaagaaaagtggaaatgcaggacgaaaagtggaatccaagctttggccacgtactgaaacttcattacttcaatgaaacagagcaaatctccatgga

SEQ ID NO: 10659 - DNA, 567 bp, Homo sapiens
gctcgaccccagaagtcccctaagtgggataccagtgaggactgctccagcagctgctgtctctccaatgcagaggcattcgacttacagcagtgtgcggccaccagcagaggggtgactcaacgcttggaccttcctgaccttcccctctcagatattctaaagggaaggactgagaccctgaagccagacccccacctccgcaagagtccctcactagagtcactgagcagacccccgtctctgggctttggggacacaagactgctgagtgcttccacccgggcatggaaaccacaaagcaaactcagtgtggaaagaaaagaccctctggcggccttggcccgggaatacggtggttccaagcgcaatgctctactgaaatggtgccagaagaagacacaaggttatgcgaacattgacatcaccaatttcagcagcagctggagcgatggcctggccttctgtgctctgctccacacctacctgcctgcccacatcccctaccaggagctgaatagtcaggaagaaaagaggaatctcttgttggcatttgaaacggctgaa

SEQ ID NO: 10660 - DNA, 1043 bp, Homo sapiens
ttttttttttttatgtgtaaaaatacagcttttattctgagacattgaccttcactagagtgggacctgtggccccagcctggctggagaagcagtcccagggcctgagtgacaccatttccctttcctgaaataggaacaagttattccaaaggagaaaggagagcccagagagatctgtacaggacctctcttgcacatggtgactggaggcagagggtggggagctggagaggagtccagtccctccaacaaatattgagggcttcaaagagctcttcctggacgtttctcttaatctggatttaaaagggacaggaggtatcttagggtccaagaacataacaggaatgggcaactctagaagtgtttgtgtgtggaaggccctaacctggccctgtcctccctgtctctacctttggctttcatgaagagagattcacagctcagaggaagggaggaatttctccagtcttcactttaacaaactcttttaagttttctgcctaccttatgttccctttggccaatgacccactccctgggaacaagatcttgttgactttcttgggaatctcctaagagataagtgctttgtgtcggagacaagttcaggtaaaccaaccaaggcagtgcctcccacagtcaaagagagaagctggagggccaaagcctatagagttgggcactacagctgctcatgctgcagaggagacagctagtcaggaaccctggagattcaagacaacttgctggtcccctttgcccagggctgtggtcctaatcacagtccttcacctttcccagggttagcctgtgtttcaaatgcatatgacctgcgctgagaggacaacagggggtcaggaacctggggttctctggggggcagactaagacgactccgggatccagacccttctgcaccttcagatgggagctccaggcagctaaggggccgaggagaatgggcagagatcatgctacaaggggaggttctggggatgaggcagtaatccccaccctcagtacaggtctgggttcgc

SEQ ID NO: 10661 - DNA, 31 bp, Homo sapiens
aagtgctgggattacaggcatgagtgactgt

SEQ ID NO: 10662 - DNA, 586 bp, Homo sapiens
gaaaaaagaaatatccacaatgatctgaaatgcctatctgtatgagactgtcctttgttcacattttttcaagcaaatatcacacaataaattgaatgcaggtacaaatgacatatcaaacatcaaagaaatttgcaaaagatgtaagactgtactaccttgggtttagaaattttcttatcataaaagcatttataacaatattttgtgagcttttaaggaatattttaagtatttctgatttaatttctagtgataaataccaatagatataacccacatacacaaaagctccttgggccctcaatatacttttaagagtgtaaaggaatcctgaccccaaaactttgagaactgctgccttcccctctaactttattccttccctagaatttcttccttggaagaaacattcctttgccattctatgttaacttacatagttccattgaggccagttttgctacctctctcccatctttccacatccctctcttgacacaaaacctgaccaaaggactctaccggcccgccccatttccagtgattagctgtcaggtgggctaagcaagaaaatctgggtttt

SEQ ID NO: 10663 - DNA, 390 bp, Homo sapiens
ttaagagctgtgagcagaagcaccaggtaacctataaaggaaaacctatcagtttaacagcagatttctcagcaaaaaccctacaagctagaagggattagggccttatcttcggcctcctcaaacaaaacaattatcggccaagaattttgtatccagcgaaactaagcatcatatatgaaagaaagatacagcctttttcagacaaacaaatgctgagataattcaccattaccaagccaccactacaagaactgctaaaaggagctctaaatcttgaagcaaatcctggaaacacatcaaaacagaacttctttaaagcataaatcacacaggacctatgaaacaaaaatacaagttaaaaagccaaaaccaaaaaaaaagtcgacg

SEQ ID NO: 10664 - DNA, 471 bp, Homo sapiens
tttgaacctttttttttcaggtataaacattcattcaatccaataaagacattttagaaaaaagtcaacctatacaatttattttatttttcctataccttggctaaacaaaatatatttggtgatactgtaaaatactaagcattttcagtaaaactggcaatcaaatacagcttaaccttcttctgcgtgacaactgaggattttaattggaaaagtattatagtctataaacaggaatacccaaaacatatttaaaccactcgagcactttgatttttccatgttctttgcatctagattgaaacacatcacaggaaatttcaaagaccaacggctgaatatttttcatttcaacatttccagtggcatcctacaagagaactagcactcacaatgagtcatctgaattttctttaaatcgtaactcatttttaatttctaaacaggttttacctccttatcttcaga

SEQ ID NO: 10665 - DNA, 315 bp, Homo sapiens
aaaaagtactattgggtccttaagggctctatcagggagttgaaatttcatacgctttaccaggttacttgtaaaaaatgaacagctgtaagacatttcaaaaccattgcagacacattgttaaaatgcagccatttgataatgaaagcagaaaccttaagttttacctaattattgcactaaatgtaaatgataacataaaattaagtgtgcattttaaacagattctatttcccacttactgcttagcatagaaaaagagctatggttagaggagtgaccagcaagatttatttcagatggaaaaggggtgag

SEQ ID NO: 10666 - DNA, 2099 bp, Homo sapiens
  misc_feature (1)...(2099): n = a,t,c or g
gagcgcggttaccggacgggctgggtctatggtcgctccgggngccgctccgccgcgtggtgcttttttatcagggcaagctgtgttccatggcagggaacttttggcagagctcccactatttgcaatggattttggataaacaagatctgttgaaggagcgccaaaaggatttaaagtttctctcagaggaagaatattggaagttacaaatattttttacaaatgttatccaagcattaggtgaacatcttaaattaagacaacaagttattgccactgctacggtatatttcaagagattctatgccaggtattctctgaaaagtatagatcctgtattaatggctcctacatgtgtgtttttggcatccaaagtagaggaatttggagtagtttcaaatacaagattgattgctgctgctacttctgtattaaaaactagattttcatatgcctttccaaaggaatttccttataggatgaatcatatattagaatgtgaattctatctgttagaactaatggattgttgcttgatagtgtatcatccttatagacctttgctccagtatgtgcaggacatgggccaagaagacatgttgcttccccttgcatggaggatagtgaatgatacctacagaacggatctttgcctactgtatcctcctttcatgatagctttagcttgcctacatgtagcctgtgttgtacagcagaaagatgccaggcaatggtttgctgagctttctgtggatatggaaaagattttggaaataatcagggttattttaaaactatatgagcagtggaagaatttcgatgagagaaaagagatggcaaccattcttagtaagatgccaaaaccaaaaccacctccaaacagtgaaggagagcagggtccaaatggaagtcagaactctagctacagccaatcttaaaacattccgaagaattccatagtggaccacttggaaataaaccattggacagatttcagtaatgtcttcagtggaacacaaatgaaaatgaatagcttgtttctgtcaagcatattggaaagtgattttatttttgcaaatagtttttctttaatatgattctagtacataattgattgattaaatctcttgattataaatgtttggaaaggttctaaggggacctacagacagacatacatagacatttcaaaattaatagcttttgattagtataatatttcttaatttggataataaaaattgtagctttttattaagccaggaaacatgaagcataatttgtttaaaattctctttggtcattgagggaccaaaaaaggacgtaaaatttacagtcaatctatgagggtttttttccctccataagtttaactttaaaactgtatttaaggaatcaaatcttacaaaatcctggaagattttggtaatgatgttgataatttcagggaaattaatcaagtacctatattgatttaaaagtgtattttattcagtagtttgaggatcttgccatggaagatactagcccagccctagcagaaaagtgcaatatgtatagcatactttgacattttaaacatgatagtccataaccattttgaaatgctgggcaaactacatgaagttatttataattaattcacagctaatcaggcattttgaaagcttaattggattcaaaaaccataatgttggaatttggtaaaattttaatgttgatttttactgtgaaaaggtttttataagatatacacaccctagtttaatgttgtgtcttggtgtggatttacagatttactacaggtattctgaaccaggaacacaatcaggtttcaggccagtttgatactggctgtccttaattctaatatgagagtaggacatcatactaaatgttatgtcagtgggactgtactgtctgtggaacttagcaaattaatcattttcttcagacttgaaggagagtgataaataaaatttggagtcataggatattgatgcacaatttaaggattaaacatttttaatcaattgtggatgatggcttattaaatgttgacttcctagtataaaactgcaagaataaaagtaact

SEQ ID NO: 10667 - DNA, 220 bp, Homo sapiens
aagatattggacacaaaatggaggtaactttttaaaatagattggcttggaagttgaaatgtagattaatggatataacccaatagaaagggattttcaaataaaaccaaagtctatttttttatttactttctaattttgaacagatgactcagtcctaaatctttgcctttatttcctataaaatgtaggtgatacttgtaactggacttcctggagt

SEQ ID NO: 10668 - DNA, 522 bp, Homo sapiens
taacagtaggaaaaaccacactattaaagtataaaattttgtcaaggctctattttctaagcctatataaaggccaggtagtaaatattttgagctttgcggcccatgtgatctctactacgagtactcaaccctgctccagtaatatgaaagtagtcacagacaactggaaatgaatggatatggctgtatttcaataaaatattacttacaaaaatagcaggaccaacacttgctgacccctcactttcataggttttataaccttattaacttttaaaaggtagttctacaacctctcaaatgagaatgaaaatgaagacaaagctactttagtgttttaaagatacagagaatgactcaattatttaaaaagcaaaatttagaactttttgttttacttcctcattttataattgagacttggattttaaaatttacccaagcccaattaaggtggcagagccttcatgattgtccggtcaatgtttctcatcactattttttcatcaagatcttggc

SEQ ID NO: 10669 - DNA, 322 bp, Homo sapiens
cctgtttacagcgaggcaagatgaatcattatgtctgtgcattttgttttacttatctgtgtatatagtgtacataaaggacagacgagtcctaattgacaacatctagtctttctggatgttaaagaggttgccagtgtatgacaaaagtagagttagtaaactaatatattttgtacattttgttttacaagtcctaggaaagattgtcttctgaaaatttgatgtcttctgggttgatggagatgggaagggttctaggccagaatgttcacatttggaagactctttcaaattataactgttgttacatgtttgcagt

SEQ ID NO: 10670 - DNA, 153 bp, Homo sapiens
tccttactctgtttttcttcccaggactggcatgaaggatgccactgaccatcattgtcaaacaccaacagaggcactttccctaagggcaagcaccaacactatggtccacatccaacacaggctgaatgcagataagatgtggctggaatg

SEQ ID NO: 10671 - DNA, 341 bp, Homo sapiens
gggtattataaagatttggttgtagggaattaacaaaaaaacccacttagttaagcaagtaaactctttatctaattcattctttaatctatttgattttaggtggtttgatttatggggaccctgagtaaggagcatataccaaattcttggtgttatcccaatagtcataagagtctccctggtgcactgtattctctcaaaggttttaaatgcttgcatgcagccatctctagaatgtcaaatggtatctcttcaactggaatgacaagagctgaaagaaatgtgtgaccataaggacaccgtaacctatgagtgacatgctaaaccagaaacccaaa

SEQ ID NO: 10672 - DNA, 358 bp, Homo sapiens
tgtaaaacaacagtaacaaccccttgttatgctagaaaaggaaataaggagacttgagtcacgtagccgatacacatggataggagggcacttttcctgtcattagtaccaagatgattgaggtcctctcatcccaggcaaagggtgaaatgcacaaacctaacagcactttttgctcagttactctgtgacctattcctgattttagatgcaggtaaactaactcctgaaaatggacatttagtattcatatatatactaaatatttaaggtatgtgaccatcagaggtaatttcattacaacaaagcataaaggaaaacatttttcaaaaatacaggaaaatatacatagtgtgag

SEQ ID NO: 10673 - DNA, 359 bp, Homo sapiens
attggctagcttcctaaggggggagggaaccgagttatcaagatgggaggatttttcttttctctctgtctttaggagtagggtgggatggggagggaggctgggcatcagggatcacatcactcttaacaacacattggtcataggagttactgatgttctatctacattaatgaacagctattggtgtatgcacagaggatacctcttaaggatgtactaaatggactttgtttggttgatgctgaaaattaattaccaaatcttaacttgcacgtgttaccttgtgaagggaactgcattagcaatgagagctacatcatcatgaagtactttaatgccatgaaattgcaaacact

SEQ ID NO: 10674 - DNA, 368 bp, Homo sapiens
agtttttggggtccccgtgctgctgcaaggcgaaacgggagggagtgacccctgcgcccctcagtcccccctacgacgtcgcctccatagtctgcggagaagcggggactgcgcgcctcgcctcacagcgaaacgccgcgcactcggagccggcacggctcggcgggcttgtggttttttgcactgaatgtaacctagactcatcttcacgggcttgtgttgccccaggtactgtcaaaggcagtatttttgtgtttctgcagagttttgcacaaaatctgttcccatgcaaaccaatgagggagaagtatcggaagaaagcagttccaaggtcagtaaattactgaaaggtacagtttgggtagaaa

SEQ ID NO: 10675 - DNA, 589 bp, Homo sapiens
attcccctttgtcctctttcactggctgcagtgcttagtgcacctttaccatttatagttggagttgactcaaggtattttgatcttcatgacccaccacaagatgttgtttgcattgacttggatacgaacatgttatatgtatcagatgaaaagaagaacatgaactggaagcaacttcccaaaaagccgtgcaaaaatctacttagcaccttaaagaaattgtatccccagctgtcttcagttcaccaaaaaactcaagaaggctcagcgattgacatgactccaattgaagcagatttctcctggcaaaagaagatgacacagcttgagatggaaattcaagaggcatttttgcgctttatggcgtctattttaaaaggatatagaacatatctcagaccaatcacagaggctccttcaaataaagccacagctgctgattcattgtttgaccgacaggatgatctttccatttcagtggcaatgcccatatattcccctttgtcctctttcactggctgcagtgcttagtgcacctttaccatttatagttggagttgactcaaggtattttgatcttcgtcga

SEQ ID NO: 10676 - DNA, 477 bp, Homo sapiens
cctacgctaaaaaccactgagtggagtatttagtacacaggaagtcggccagagaaacatttctcatatttgaaggccggaaagagggacatttctgacaccggaagtcagtgagaggactctttcccacacaggaagtcagctagagagccgtctcccctctctggagccgagagaggccggtttcccccaccgtagcccacctgggaggaattttccagagatcactgtctgatgaccctgtcttggaattggagccatgcaagttacactgaccacgtttgggttgggatattgaggaggttatggttaaaagcatacgatgggagatcatattgtacttgcgagtgagacccggctggaggaatgttttaattcttcggaaataccaagtggtctctgtctcacatgagtacttcacaatgggaaactgaactggactctactgacaacgcagtgggaggttcaaacttaata

SEQ ID NO: 10677 - DNA, 658 bp, Homo sapiens
tttttttttccagctgttctagtcttttggctaggatatttttagttcttctaggtttttctgcaatgtttgattttccatctctaagtcttgtagttcactctctaattgctggatttttttattgctgttctctaaagttttttgcagtctttgattttctatatctaaaccctggtagctaacttctaagcgttctgttttcttgaaagatgctttcaggagctccaaacccttcttaagttgctctttttcactttccagttctttgttttctagctgtagctgagccattttcatgcttgcacacttcaaagattctacattccttcgcagttctaagttttcctcatcaagttgggaattctctttttctagggattctaactgaaaggtcagatttttaaagctatccaatgttttttttaattttctattttctctttctagctctgaattttcttgttctaaggcctcaattttttcacaagtaatttttaaattagttatttttttctgtaataattcattttctttttcaagatgatgcaattcattttcaagttcttcagctcgttctcctttttctttataatgttccaattcttttttaatttgtcttttttcaaattcaatcttgcttagcttgctacttgtt

SEQ ID NO: 10678 - DNA, 591 bp, Homo sapiens
tatgttttggtgagactgtaacctgatagaaaaattttggaagataatttggctttatcttgtaaaggtgagtattagcagtttcattcctcttttatatatattctagagaagtaaattcttgtagtcatgctcaaggagatggtgcaagtaagtttgtagctgtattactcatgatagcaaaaatgtggaaacagtatcaatacttattaactggagagtgaatccatgaagtgtgatataatccatatagtggaattagtggaaaatgaatgaacccttagcctacaaactttaaaacatggatcaatttttaaaacaatgttaagtaaaaataagtccttggaaatatacagtatgagtcctattttatggaatccatgttcccttagaaataaataaaataacccttatatatggtttgtaatacacattatataattatgtcaggggtccctaaagactagcccccaggtttgatgatttgctcagagaattcacaagactctgcacatagttgtgctcatggctgtgacttattatggcaaaaaaatactaatacaaagcaaaattgggaaagggaaaaaaaaa

SEQ ID NO: 10679 - DNA, 330 bp, Homo sapiens
ctccagtgccaagcacacactaatatgagaatgagagtagtgaggaccatgaccagcacagggacaagaactgcagccagcgctacatctttggttacatttggagttacggtagtatttctgatatcaggactggcagttgtttgttctgtctgtgcaggaaattcattgctactgcgaggttgtagtggttgcgtaaattttggggcacgacctttggctatttttggaggggctgtagtgtttttgaggtcattgctgttccgaggaggtggaggttgagtaagttttggaggacgacctttaggaataaactgacatccgagcagc

SEQ ID NO: 10680 - DNA, 259 bp, Homo sapiens
taaacaaaacaacaaaacgttaagtttcattgagccattcctctgaattactgagcaagtgccctactcactgtgtagtggaaactttggccagctgagaaggcagctaacccttttcaggccagtaggataaaggttggataaggaaataatcaagtcaaagacttaatctacctccccaaggaacctatattatgagttaagacagttttcttatctggattggatccattgagtctaaatgagaataacatggttc

SEQ ID NO: 10681 - DNA, 310 bp, Homo sapiens
gttttttattttttaatctggtttattaatcattggctaaactattttctcctagaaattcaaaaaatactcagtaacatcatttagacgagtcggaaaagcaggccaacatatgtttatataacatagcacttttccccagggcctaccttgccccataaattgttgtactggtgtgaaaaaatacaagtcaggtctgaaaaaaagttctcctcttaaatcacaaccatatttgtgagaggagaggaagacagcaacttatttatagcgacacgcaagttcgtcacactagtttctttttccgtcgacg

SEQ ID NO: 10682 - DNA, 1308 bp, Homo sapiens
caaattgcctttcaaatttttggggctagttgagatttaaagagtttgatatgccttctatttttatggagaaagtaattttaaaatggcaattggtgtttctaagccattgactaataaaacatagggttggctagtaattattttgttaacttgatgaagtcaagtatgactattatttattgtacatttgataagacaatttttggaattttgaattgcacaaattacatgatatcttttgcatttatgttactatattgtacttctgacaaatctttattcctgggtggtatttttaagatatctttacctataaaaaatgtttaaggttcataggactcgacaagagctatctggtgattttctcattagtaacatgcaacgttgtactgcaaaatttcaatcaacatgacaacttataatgagtggagatttcatattaggtactaaatattatagtattatttctattttctttttccaaataagaagcttggattattttattttgtggtctttatcattaactttaattctttctgtactgtgtataatatttttatattattggccttaccataaaattatttaggaaaggttgtcaaaataaggtatacctctttgggcaataggataggatgtatacatctacctactatgatctacaattttaggttaagtgaagcttgggggggctactgacttggttaccttcttgtctcttgtcccaaagatttaaactatgtacctttgtatagctcttctgccccattttgacttctgagatgaaagtatttactaaaattaaaaaaaaaaaaacaaaaaacaaacctttagctcactaactttatgggtttctgaagtgatggaaatttttaaggatatatttaataagcataaacttactaataattacttccaaaaataaaaacaggaatattacttttacccagtgtggtttatagcatacatttgtactgaagcatatagggatgttaatgtgatcttttcctgacagattatgaaagcattatgacttgtaacaagtttccttgtatatcactaacaggtttagaagacataaatattagtgtgttttgcctacatggtgtatttaaatctattaatattttcctgttgcttttttaaaaaaataaatacacataatgtatattaaaagaggtgggatgaaataattttagtaattatgtgtacagatgaaacatttttgtcatggaatttaaaagctaagtaagtataaaaaataaaatgttatatgcaaaaaataaaaaaaaaaaaaaaaaa

SEQ ID NO: 10683 - DNA, 281 bp, Homo sapiens
tttttttttttttttaactttgcattatgaattttatttttatatctacataagcatgagggaaagaactgtattttcagataattaaatccagaagagttacaaattttcattcgtcccaaagattttgtctgggtatttcttccttagctgtcgtcttgcagacaccatcgaagcatagatgatgcagccccaggagattaaaacgatggcaagcagcaacactgaataaatccagtccagcgtgcgacgacttactggcttcatggtaaggaggcggc

SEQ ID NO: 10684 - DNA, 330 bp, Homo sapiens
tgtcctgcaagttttaagagccgtccggaagagtgtaggttaatggaaagctcagtgagaactgctctgaagaagcccctcaaaataatacattaagctcagcatcattcacgtgggcggaatacaaactgacattcctaacaggacttacctagcatggactcgatcttaaccatggtaccaaactctcaagtgaagcacactgatgcctggtgaaagccaggcgtttggtatgatgctgacctagtgaacctctggcctttttggctgtgctcattacctggtcccagcactcactggcacaatgccaggagcccagggaaaggagcg

SEQ ID NO: 10685 - DNA, 620 bp, Homo sapiens
  misc_feature (1)...(620): n = a,t,c or g
cccttcaacaggtaattgatgggctgtctactatgtaatggacttccaggtggcagggcccagccccgaaccagacaagggacccctcaaggagcttcattctagcaggagaaaattgagaagtaaaccagaaaggtatcaggaaacagttgtacacaaaataaaaattcatcaccttaattaaatcacatatgaaaagcgattggcgattaatgaagttgggtgacaggcatatgtaagcttctataatctttttacttttgtgaatttggaaatttctcacaatttgaaaattaaatttctaaattaaaataaaaaaccatacatatgtatatttgtaaaaataaatacataaaactaagggctccttcggtcatgtccacagccgcctggacgcacacacatgtgggtgtggctgctggggctcaggctgtggccagtgggctgggagcggggcaaggctggctgctggctgctgcagatgggggagctgacttgagatgtgacggataagggctgttctgtaagggtgggggactttgagattcaccagtcctctcttttggggtgaaggctgggggcttccccatagtgatncccttggggccagcacaatgtca

SEQ ID NO: 10686 - DNA, 370 bp, Homo sapiens
agatattgcccttttaattctaaaaatttccctttgttctcttttgaagttcctgtgtgtgtctgctgagaacctctgtctttccattcaccagtgttcaccattatcttgcagaacatgggatagtctttgataattccaacaagtgggtcatctcgtggttgccatctattggttcttttcctgagagaggtggatccagtttttcctggttctttgtacggctgagtaattttagagtgtatcctgggcattgtgaattagttgtgaaaactctgagtcttagtaaattaatatgaatttagtaggcaatcaacctacttaggttcaaattggaagtctcaccttctatgtgcaattgtttcaatgc

SEQ ID NO: 10687 - DNA, 423 bp, Homo sapiens
ggaccaaggaagaatgtttttgagggaaatagaaattaccatcctaaaaatggttccttctgtgtgtctgctgatagaaacccttgacctctttagaaacaaccgcaaaattattcactacgattatctgaatctcataaataaaataatgattacaggcgtgagcactgtgcccggcctcaagatgcattaagttttaaaggcccctggttatttctcgtcttctgagatgtcattccagtgtgacatggttaacatcagtcaggatggcattcctgtcccacacagtaaaatgtcacctctcacacacgtaactctgggcgtaaagtgagtaaaactatgagacttagaagaatatttcatcatggtatgctgattggggatttcacttactgatactagaaaggttttgcatttcagaac

SEQ ID NO: 10688 - DNA, 167 bp, Homo sapiens
caactctgccacttcctgttgagtgagtttgagtaagtcacctcacttctctcaacctcagtttcctcagtggtagaatgcgagttctgataccttacaggttgcagtgaggattcccgtcaatataagggtctcagcacatggcagacacttaaaaaaaaaaaaaa

SEQ ID NO: 10689 - DNA, 326 bp, Homo sapiens
  misc_feature (1)...(326): n = a,t,c or g
attagcccacccaatatttgaagaacgtatttattatttatgtgtgcactgtctagttcccaaattcctccacctttacaattgataaactttaatcatctgtgaaaaaaagaattcaaggtttacaaagaatactggaaggcataaacagtcactgaaaagttaacacatacagaagatgcttcatttttattttattgccaagttattgctgcttcagagagcatgactatgacttgctatgtgactcttggggcaaactccttaaacacacattcctcattncataaaaatgggggataatgttaccaacctcacagggctgg

SEQ ID NO: 10690 - DNA, 174 bp, Homo sapiens
ccatgttgtacatgtaactgtaattatgtaattcaaatattgtgttaacaagtgaaatagtggcagaagagtgacagctatctaaaaagctaaacagaatgaaaaattttgagtaatatgtaatgttccgtaacttcataatattcaatgtaataaaatggaacttcagttggg

SEQ ID NO: 10691 - DNA, 607 bp, Homo sapiens
tctttctcaccactttccttcaatttccgcttctttggagattttttcttcttttctttaatgaagtcatcttcagactctgatgcttgtctaaactgcagggttcccgagttaatgtaaaatcctccatacttcgtagtcaaagaagcaggaacaagctcatcatacgcctcagagttatcgatgaaggagtcggattcatcataaccataccccatatcgatcaagtcctgtattcggtcttttctacgtttctttccaccgtatttttcttcaaattttcgggcaagggcctctactttatgcctttccttttcttcgtcattgaaaggatctgacagatctttcttcttatctccaggctgaaggctttttaccttccctcggatattcttcaccagctctgggtagaagaactctgggcagcgtttgtgatctggttcaaagagggtgagtgtaatccgaacaggctgctgcagccggctcacagtcctgatgctgttctcctgccccagcctcctccttccgggacttcttcaaaaacgcaggattcagggaacctgggagagaggtgaactggaccctgtggggctccgacatggctacc

SEQ ID NO: 10692 - DNA, 391 bp, Homo sapiens
  misc_feature (1)...(391): n = a,t,c or g
cttcattctagaaacactctatatctttggttttcatgagaccattctcaccttgttttgtcctgtgacttttttgaaaaaaacaaaaacaaaaaaccctttttttctttttaaattctggtaaaaaacacaatgaaaatttgctatcttaaccatgttgaaatgtgcagttagtaaagtacaatcacattgtggtgcaagccatcactacccatccatcactagaacccttttcatcttgcaaaactgaaactctacccattaaataactttccatttcctctcccctcatctcctgggacccacaattctactttctagttctataacttcgactactcataaatacntcatctaagactcatatagtatttgtcattttgtgagtaat

SEQ ID NO: 10693 - DNA, 962 bp, Homo sapiens
atttttgtttgcattaaactttatgaaatgtcagaaatgattttactctaatgaaactcaaattttgcccaaagtagcaatattcttaaagatgttgaattttgactggttgaattttatatagtaacacacaagtcgtgatcatcaatattattgcagaccaggactctgcttatatgccttgctaacaaagatttctttcacagaggcttttctcctctcaagacttaaagtaagaattacattttattaagtcagttaaatgcaccatggcttcatatagtaatataaaaaaactctttgaagtgagaaatattatatcctaaaacctctaaaccacaaacattcaattgaaagagttctgttgaaggataatgacatactgactgcttacagaccaagttgcttgcattttgtatgtttagccctcctttgccactgcttttagagccttggaaggctaagtgtgatagtaatgctagctctaatgcatatttaaaggagactgcctcgcttttagaagacatctggtctgctctctgcatgaggcacagcagtaaagctctttgattcccagaatcaagaactctccccttcagactattaccgaatgcaaggtggttaattgaaggccacttaattgatgctcaaatagaaggatattgactatattgggaacaggtgggagtctcttacttaccaaaagtctttgggggtatttgtttcttacatagaaaatgctaacatgaatagaaagatactggtgcaagaccattcccgggaaagtagacatacttacatttttttccttttctgctcatttgaatgaactcaattttatgttaaattgttatatcagattactatcctatttaccaaagtttgtgatatgtattttgaatatatgtgaagagcttcacttctatcaagccatagcacttatttgtcactctgagtcgccc

SEQ ID NO: 10694 - DNA, 700 bp, Homo sapiens
ctgaagcttgagatctatctcaccgacgaagacttcgagtttgcactagacatgacgagggatgaatacaacgccctgcccgcctggaagcaggtgaacctgaagaaagcaaaaggcctgttctgagtggggagacgccagaggagcctcacggtcacgtccaacaacaccactgcaccagggaaatggatatatatttttggactggtgtttttcacaaagtatttttcaatcagagttttcagaacctgacattgttaaagatactgcttgtcccggagttgtgtattttgtaaatgttcaagggaactgtttggaaacttctttccaccattcaggaggttatcagaattaataaaagtatctgttatgtgcacttaagccgcagctgctatagatagcactgccttcttgttccagctaggcaatgccttttttttttttttttttgaagcagttctctttataaagtgttattttgatagtttgtggattctaaaatatatatatatttatataaacaccatataagtcaaatatgtatttaacaaagcaatatgtattcattcactttcaagatttgttttggtgtcaaaataacatgaaaaggtagatggagttgcttctgttgaattagctctgccaccaatatgtatcttcatacacgtttggaaatgtttcctgcagcattaggtatgac

SEQ ID NO: 10695 - DNA, 312 bp, Homo sapiens
ccaagatcgaccaactgcggcatatgccttgtggaattctgaaaataatagctaagttacaatatctgcatttagaagcagctactgtatttttaagttttcttttaaaatttatatgtacatgttatgaaaaaagagaccttaagtttaaaaaggcttcttggtataaactacatgctttatactgaaatattttctttgacgatagaatcaacttcagaccttttcctttcaacaaacactgagcacatgctatgtactaggcacatagttactggaactggaaacacaaaaataaaattcattccttaa

SEQ ID NO: 10696 - DNA, 331 bp, Homo sapiens
cttccttccagctttaacaaactgtatggaggtacattttggagttacttgggtaatttttgagtgtgagattggctagaattgctttaatataccaatgtctggccttagcttttggcagagtctgtgtgaagaagcagaggcggagtagagttaattccgtaagttaacgttcagttcgtggcagctggcaatccaaccctgggaaaggctgccggatttagcaaaaatgcaaggtgtctgtttttaaattcgcaatgaattgggtatcctgcattttatttggcaaccctgtcctgggactcacactattcactgttatcactggtat

SEQ ID NO: 10697 - DNA, 1213 bp, Homo sapiens
atttttgaacaactgtgtacagctatctttgcattttaaatgcccctagtttgagactcgggagggtcaagtgtccccacccctggaaagggctcggataggagggtgcttgcttctaaatcctgatcttctctatggggttggctggaagagaagtaggatcttgtctgaaacctcatcccccagcattgtgtttggatgttcgtgggatccgagggctggccgggcagacagaagggaagtgcggggtccttggctggcagctgggagcagaggaagggagagcgttgggaggtcgtgatgtgcgtgctctgcctccagtaggtctgaggtgcccactgttgttatgcttagttttattagattctctgtaacaacatgagcttaccaaccagccttgattttgagattaaataattgaacagattaactgggcactgaagtaaaattctacctactttattctcttagtaaaaactatacacacaataaacaactgtcaaggttgccatcatatttgagttttgtcacctaggaaaacattgtttatactttgtttttgaaaaaattcatatgaatttcccctgggaataacttgttttatttcagtttttattttctattgaaacacttgttttctagtctaggattttagccaaatagaaaagctatcatttaatttgggggaaaaaaatctattgtcctgtgaagaatttatagcaattattaaactatgttgcttaaatataaaaaaaaggatgattaatggaatatttagataatgtttccattcactgaagaagccgtgatcctttattggcaggaagacttgcaggacatatcagaagcctctgtcagaggtttacaggaggtgagatggaggggaagccctctatgggaagagtcccatggtgtgtgacatgttagggtaatcggatgtatttaagctgcgtcctcattctaaaagttattagaactgagctcttctagatttaataacatgctttgcctttggtagtgaagaacattgagataaaatctagtattaccgagttagagataattttagatcatcccttatactgttacgtggaattcctgtggaacatgaatattactgattctcaagttccagtatacagaagaataacttgtcattgcctgtcctggtgtacccagatgttccatgatggacgttttatcccataagacg

SEQ ID NO: 10698 - DNA, 3096 bp, Homo sapiens
ggacgcacaggcattccccgcgcccctccagccctcgccgccctcgccaccgctcccgggccgccgcgctccggtacacacaggatccctgctgggcaccaacagctccaccatggggctggcctggggactaggcgtcctgttcctgatgcatgtgtgtggcaccaaccgcattccagagtctggcggagacaacagcgtgtttgacatctttgaactcaccggggccgcccgcaaggggtctgggcgccgactggtgaagggccccgacccttccagcccagctttccgcatcgaggatgccaacctgatcccccctgtgcctgatgacaagttccaagacctggtggatgctgtgcgggcagaaaagggtttcctccttctggcatccctgaggcagatgaagaagacccggggcacgctgctggccctggagcggaaagaccactctggccaggtcttcagcgtggtgtccaatggcaaggcgggcaccctggacctcagcctgaccgtccaaggaaagcagcacgtggtgtctgtggaagaagctctcctggcaaccggccagtggaagagcatcaccctgtttgtgcaggaagacagggcccagctgtacatcgactgtgaaaagatggagaatgctgagttggacgtccccatccaaagcgtcttcaccagagacctggccagcatcgccagactccgcatcgcaaaggggggcgtcaatgacaatttccagggggtgctgcagaatgtgaggtttgtctttggaaccacaccagaagacatcctcaggaacaaaggctgctccagctctaccagtgtcctcctcacccttgacaacaacgtggtgaatggttccagccctgccatccgcactaactacattggccacaagacaaaggacttgcaagccatctgcggcatctcctgtgatgagctgtccagcatggtcctggaactcaggggcctgcgcaccattgtgaccacgctgcaggacagcatccgcaaagtgactgaagagaacaaagagttggccaatgagctgaggcggcctcccctatgctatcacaacggagttcagtacagaaataacgaggaatggactgttgatagctgcactgagtgtcactgtcagaactcagttaccatctgcaaaaaggtgtcctgccccatcatgccctgctccaatgccacagttcctgatggagaatgctgtcctcgctgttggcccagcgactctgcggacgatggctggtctccatggtccgagtggacctcctgttctacgagctgtggcaatggaattcagcagcgcggcccgctcctgcgatagcctcaacaaccgatgtgagggctcctcggtccagacacggacctgccacattcaggagtgtgacaaaagatttaaacaggatggtggctggagccactggtccccgtggtcatcttgttctgtgacatgtggtgatggtgtgatcacaaggatccggctctgcaactctcccagcccccagatgaatgggaaaccctgtgaaggcgaagcgcgggagaccaaagcctgcaagaaagacgcctgccccatcaatggaggctggggtccttggtcaccatgggacatctgttctgtcacctgtggaggaggggtacagaaacgtagtcgtctctgcaacaaccccacaccccagtttggaggcaaggactgcgttggtgatgtaacagaaaaccagatctgcaacaagcaggactgtccaattgatggatgcctgtccaatccctgctttgccggcgtgaagtgtactagctaccctgatggcagctggaaatgtggtgcttgtccccctggttacagtggaaatggcatccagtgcacagatgttgatgagtgcaaagaagtgcctgatgcctgcttcaaccacaatggagagcaccggtgtgagaacacggaccccggctacaactgcctgccctgccccccacgcttcaccggctacacagcccttcggccagggtgtcgaacatgccacggccaacaaacaggtgtgcaagccccgtaacccctgcacggatgggacccacgactgcaacaagaacgccaagtgcaactacctgggccactatagcgaccccatgtaccgctgcgagtgcaagccctggctacgctggcaatggcatcatctgcggggaggacacagacctggatggctggcccaatgagaacctggtgtgcgtggccaatgcgacttaccactgcaaaaaggataattgccccaaccttcccaactcagggcaggaagactatgacaaggatggaattggtgatgcctgtgatgatgacgatgacaatgataaaattccagatgacagggacaactgtccattccattacaacccagctcagtatgactatgacagagatgatgtgggagaccgctgtgacaactgtccctacaaccacaacccagatcaggcagacacagacaacaatggggaaggagacgcctgtgctgcagacattgatggagacggtatcctcaatgaacgggacaactgccagtacgtctacaatgtggaccagagagacactgatatggatggggttggagatcagtgtgacaattgccccttggaacacaatccggatcagctggactctgactcagaccgcattggagatacctgtgacaacaatcaggatattgatgaagatggccaccagaacaatctggacaactgtccctatgtgcccaatgccaaccaggctgaccatgacaaagatggcaagggagatgcctgtgaccacgatgatgacaacgatggcattcctgatgacaaggacaactgcagactcgtgcccaatcccgaccagaaggactctgacggcgatggtcgaggtgatgcctgcaaagatgattttgaccatgacagtgtgccagacatcgatgacatctgtcctgagaatgttgacatcagtgagaccgatttccgccgattccagatgattcctctggaccccaaagggacatcccaaaatgaccctaactggggttgtacggcatcagggtaaagaacttgttccagactgtcaactgtgat

SEQ ID NO: 10699 - DNA, 3978 bp, Homo sapiens
cctgactgaaaggctgcgtgagaagatatctcgggccttctacaaccatgggctcctctgtgcatcctatcccatccccatcatcctcttcacagggttctgcatcttagcctgctgctacccactgctgaaactccccttgccaggaacaggacctgtggaattcaccacccctgtgaaggattactcgcccccacctgtggactctgaccgcaaacaaggagagcctactgagcagcctgagtggtatgtgggtgccccggtggcttatgtccagcagatatttgtgaagtcctcagtgtttccctggcacaagaacctcctggcagtagatgtatttcgttcacctttgtcccgggcattccaactggtggaggagatccggaaccacgtgctgagagacagctctgggatcaggagcttggaggagttgtgtctgcaagtgaccgacctgctgccaggccttaggaagctcaggaacctactccctgagcatggatgcctgctgctgtcccctgggaacttctggcagaatgactgggaacgcttccatgctgatcctgacatcattgggaccatccaccagcacgagcctaaaaccctgcagacttcagccacactcaaagacttgttatttggtgttcctgggaagtacagcggggtgagcctctacaccaggaagaggatggtctcctacaccatcaccctggtcttccagcactaccatgccaagttcctgggcagcctgcgtgcccgcctgatgcttctgcaccccagccccaactgcagccttcgggcggagagcctggtccacgtgcacttcaaggaggagattggtgtcgctgagctcatcccccttgtgaccacctacatcatcttgtttgcctacatctacttctccacgcggaagatcgacatggtcaagtccaagtgggggctggccctggctgccgtggtcacagtgctcagctcgctgctcatgtctgtgggactctgcacactcttcggcctgacgcccaccctcaatggcggcgagattttcccctaccttgtggtggttattgggttagagaatgtgttggtgctcaccaagtctgtggtctcaaccccggtagacctggaggtgaagctgcggatcgcccaaggcctaagcagcgagagctggtccatcatgaagaacatggccacggagctgggcatcatcctcatcggctacttcaccctagtgcccgccatccaggagttctgtctctttgctgtcgtggggctggtgtctgacttcttccttcagatgctgtttttcaccactgtcctgtccattgacattcgccggatggagctagcagacctgaacaagcgactgccccctgaggcctgcctgccctcagccaagccagtgggacagccaacgcgctacgagcggcagctggctgtgaggccgtccacaccccacaccatcacgttgcagccgtcttccttccgaaacctgcggctccccaagaggctgcgtgttgtctacttcctggcccgcacccgcctggcacagcgcctcatcatggctggcaccgttgtctggattggcatcctggtatacacagacccagcagggctgcgcaactacctcgctgcccaggtgacggaacagagcccattgggtgagggagccctggctcccatgcccgtgcctagtggcatgctgccccccagccacccggaccctgccttctccatcttcccacctgatgcccctaagctacctgagaaccagacgtcgccaggcgagtcacctgagcgtggaggtccagcagaggttgtccatgacagcccagtcccagaggtaacctgggggcctgaggatgaggaactttggaggaaattgtccttccgccactggccgacgctcttcagctattacaacatcacactggccaagaggtacatcagcctgctgcccgtcatcccagtcacgctccgcctgaacccgagggaggctctggagggccggcaccctcaggacggccgcagtgcctggcccccaccggggcccatacctgctgggcactgggaagcaggacccaagggcccaggtggggtgcaggcccatggagacgtcacgctgtacaaggtggcggcgctgggcctggccaccggcatcgtcttggtgctgctgctgctctgcctctaccgcgtgctatgcccgcgcaactacgggcagctgggtggtgggcccgggcggcggaggcgcggggagctgccctgcgacgactacggctatgcgccacccgagacggagatcgtgccgcttgtgctgcgcggccacctcatggacatcgagtgcctggccagcgacggcatgctgctggtgagctgctgcctggcaggccacgtctgcgtgtgggacgcgcagaccggggattgcctaacgcgcattccgcgcccaggcaggcagcgccgggacagtggcgtgggcagcgggcttgaggctcaggagagctgggaacgactttcagatggtgggaaggctggtccagaggagcctggggacagccctcccctgagacaccgcccccggggccctccgccgccttccctcttcggggaccagcctgacctcacctgcttaattgacaccaacttttcagcgcagcctcggtcctcacagcccactcagcccgagccccggcaccgggcggtctgtggccgctctcgggactccccaggctatgacttcagctgcctggtgcagcgggtgtaccaggaggaggggctggcggccgtctgcacaccagccctgcgcccaccctcgcctgggccggtgctgtcccaggcccctgaggacgagggtggctcccccgagaaaggctccccttccctcgcctgggcccccagtgccgagggttccatctggagcttggagctgcagggcaacctcatcgtggtggggcggagcagcggccggctggaggtgtgggacgccattgaaggggtgctgtgctgcagcagcgaggaggtctcctcaggcattaccgctctggtgttcttggacaaaaggattgtggctgcacggctcaacggttcccttgatttcttctccttggagacccacactgccctcagccccctgcagtttagagggaccccagggcggggcagttcccctgcctctccagtgtacagcagcagcgacacagtggcctgtcacctgacccacacagtgccctgtgcacaccaaaaacccatcacagccctgaaagccgctgctgggcgcttggtgactgggagccaagaccacacactgagagtgttccgtctggaggactcgtgctgcctcttcacccttcagggccactcaggggccatcacgaccgtgtacattgaccagaccatggtgctggccagtggaggacaagatggggccatctgcctgtgggatgtactgactggcagccgggtcagccatgtgtttgctcaccgtggggatgtcacctcccttacctgtaccacctcctgtgtcatcagcagtggcctggatgacctcatcagcatctgggaccgcagcacaggcatcaagttctactccattcagcaggacctgggctgtggtgcaagcttgggtgtcatctcagacaacctgctggtgactggcggccagggctgtgtctccttttgggacctaaactacggggacctgttacagacagtctacctggggaagaacagtgaggcccagcctgcccgccagatcctggtgctggacaacgctgccattgtctgcaactttggcagtgagctcagcctggtgtatgtgccctctgtgctggagaagctggactgagcgcagggcctccttgcccaggcaggaggctggggtgctgtgtgggggccaatgcactgaacctggacttgggggaaagagccgagtatcttccagccgctgcctcctgactgtaataatattaaacttttttaaaaaaccaa

SEQ ID NO: 10700 - DNA, 487 bp, Homo sapiens
gcggccgcctactactactaaattcccggccgctcgacgaaatctggaagccacctggctttctctcttccatttcctgcctgactctatggtcttaactacaaatccatgaatacgtaaaagaactgcggaataggaggaagcctttgcagttacttcccttgcccttcatttccagctgaggaacatgaagcctacagagaggtgactccccaagctgctgtcacccaatgccagttctgtcaccactacactgtggcttcttcagctctaacagtgatagcattggtaatatctttttggaaagacaattcaaagaatatgggaggaaaaaaatgatggtgagtatgagagtttacagaaagagaagttttggactagaagattaagcagtggcttcttagaagagaaagaacttgagtagggccagaagtgttctgcctttgaagaggaatacggttcaacttttcatcaaagcccatgagat

SEQ ID NO: 10701 - DNA, 494 bp, Homo sapiens
ttttttctgactctatgtgaaaattcttttcaaagtaggtaaaagccatcactatatttcaaagaggtcacagtgacatcatatacaaaaggaaccagattgaaaaagatattgctgacatagccagtagtgagattactaaagaataaacagaaatgccttggaaattatttttacaccggcttgaattgaaacattaaagcaaaatgaaagctgtaagggtgttcactagttttcccaaatgcgttgtcaagtttattggtaagaaatagactcctaaatagatgcagaaagcacttaagtgttctgctcaattcaactatgtgatttttgtctctcagttaaaaatttgtccacctatgtttcaggatatgactacagacgaaaacgatttgtgctttgctgttatggatgtccgtggtcaggatgcctcccacagtgaattaaaatgcttgatttcattaagaaaaaaaaattagaccctttaatggtta

SEQ ID NO: 10702 - DNA, 532 bp, Homo sapiens
ttttttttttttaaacgcagcccgtttaatgatggggcccagactgcagtggctcaagacaggacactgcggaaagccgccatgtgccgccgcacactgtctgagatctgctcagccgatctgctccggccgtagtaatccgtgaagaggccgtcagggttgagcaggtagatggcaatggagtggtccacgatgtagtcctggtcctcatccttggggccggcattgtagtacacgcggtaactgtgactagcctgggcaacctgtttggtggagccggtcagacccaacagtcttgggtggaagtcctggacgtagcgggccatggcttcaacgtcgtcccgctcggggtccacagtgatgaagacaggctgcactggaggcaaaccaggctctgcttccagctgccgcaccacctgcaccagcttctccagctcgtctgggcagatgtcagggcagtgagtgaagccaaagtacatcagcacccactggccccggaagtcagccttgcagcgagcccggcctctgtgat

SEQ ID NO: 10703 - DNA, 335 bp, Homo sapiens
  misc_feature (1)...(335): n = a,t,c or g
tgctgtgggtggctgttctgtgctttgcagggtgtttagcagcatcctcaccctctagacattgtcaaccacacccttgtgggacagggtggggggtggggaaagttgccctcagctgaagactgctgtctagtacaggacctggcatataatacgtgctaaaaaatttttttgctgagtaattgaattaaatttattgtgttaatttgcttgcaaactttcttaaatacttttcttagggtnnnnnnnnnnnnnnnnnnnnnnnnnnnnnnnnnnnnnnnnnnnnnnnnnnnnnnnnnngttcccatacatgtacagtctcccccattataaac

SEQ ID NO: 10704 - DNA, 1093 bp, Homo sapiens
tggtcccactgctgctcagcccagtggcctcacaggacaccagcttcccaggaggcgtctgacacagtatgatgatgaagatcccatggggcagcatcccagtactgatgttgctcctgctcctgggcctaatcgatatctcccaggcccagctcagctgcaccgggcccccagccatccctggcatcccgggtatccctgggacacctggccccgatggccaacctggggaccccaggggataaaaggagagaaagggcttccagggctggctggagaccatggtgagttcggagagaagggagaccccagggattccctgggaatcccaggaaaagtcggccccaagggccccatgggccctaaaggtggcccaggggccccctggagccccaggccccaaaggtgaatcgggagactacaaggccacccagaaaatcgccttctctgccacaagaaccatcaacgtccccctgcgccgggaccagaccatccgcttcgaccacgtgatcaccaacatgaacaacaattatgagccccgcagtggcaagttcacctgcaaggtgcccggtctctactacttcacctaccacgccagctctcgagggaacctgtgcgtgaacctcatgcgtggccgggagcgtgcacagaaggtggtcaccttctgtgactatgcctacaacaccttccaggtcaccaccggtggcatggtcctcaagctggagcagggggagaacgtcttcctgcaggccaccgacaagaactcactactgggcatggagggtgccaacagcatcttttccgggttcctgctctttccagatatggaggcctgacctgtgggctgcttcacatccaccccggctccccctgccagcaacgctcactctacccccaacaccaccccttgcccagccaatgcacacagtagggcttggtgaatgctgctgagtgaatgagtaaataaactcttcaaggccaagggacagtggtctaattcaactctgtgtcccagcacctggcacaccagaagtgccatgctcagaaatgttggttacatgaatgaatgaaccatgaatgaatgaaatctcaa

SEQ ID NO: 10705 - DNA, 458 bp, Homo sapiens
ttttttttttttttctgggaaaatcatttcttttaatgacagagaaagcacaccaaatgataacagaagcctcattgggagttaccactgtacaaatcaatgcctggaggccctgaactagcattagacattcacagggaagtcagctgaggttaaggaaacatccacgcagcatctctgaggatacagaagtgggaggaggaaggtgacagccgcaatgcacacgctgtgtatctgtagcttggactcttcttcagggcagttcttgttttccttccacattgggatgggtaggggctgggggaggtttgcaaatgatcatgtggaagagaggccttgtgtatcagcctcgcagaaggagccaatactgtagacagatatcacccagatgctccatgggccatgccctggaagcgatgtgacattggtcctctgaacaatggttcagggagctcgta

SEQ ID NO: 10706 - DNA, 477 bp, Homo sapiens
gcagaggcacagtgttttatttcagatacttgaaaagatcacagctctttataatggtaaatcatttttattgactgaatattcacaccaaacacaaaagcaatgctggttcttctccttaatggactaggataggagaagagagttcagtttagtttcttgctgggctgcatgtactcacatgcaaaacattatctttaagattcagggaaaggtggtttgaaacaaagacttaaataaaaatagcaccagaaggaccaggtaccaataatcacatactccacccattcgggagtttcattttgtgaaatattattgcacttgtaatgtaaaaagtaaatgatagtaaattacccaactcagtaattttaaatacttcgatgtattctgaactaagcagtttcaaaatggttttgagtttctcttcaaaggaaacctggctaagacaactaaatctagccatttactttaaaaagc

SEQ ID NO: 10707 - DNA, 103 bp, Homo sapiens
ctagcccaaagacaacaacatttgaaaggaaaatcagggatataatgtcaaagaacactgcagtccaggggcgaaatgaatgtgccttgagcaacttctctag

SEQ ID NO: 10708 - DNA, 318 bp, Homo sapiens
gccccatgggacagggtctccactcctgagactcatgggattagactaggcctacctggatgatctgggatcctctcccatgtccaggtctctatccctaaccacatcagcaaagtctcttttgccatggaaggtatttgcaggctctgactttgtgtgtattagggcaggacatttttggcggggcagtggtgggggcagggaattattctgcctaccatgccttatacaaaaataaataaatcacaggcttatacctgaaagaattcctgcaaataataaaagaattagagcagctcagttaaataaaaaaaggtt

SEQ ID NO: 10709 - DNA, 314 bp, Homo sapiens
tttttttttctaagggccacacagctggtttggtttattatgtgaaaagcatatcacacggagtatacaggaaatacctcaagtatttgttgaaggagcatcatcaatttctccttgaacatacagcctccacaaaggaccatccctcatactagcatacttgaggaaaagctaacagcttatctacccacacctttgcattgctatggactgaaggtttaaagtgtagaatcgttttggctactcagcaggaatgtcatctgggccattctgtaggagaaaaagcctctaccaaaagtttgcacttgacccaa

SEQ ID NO: 10710 - DNA, 643 bp, Homo sapiens
  misc_feature (1)...(643): n = a,t,c or g
ttttttttttttacaagcctccatttttattattaaatttgtcagatattactttttaaattcctacacagtttctaaatggttactctcaacttccgtacttatctcattataaaacattaacaatttgtgaactggcactagtccatgaaccaaactttgagtacctctgctctagatttcaaaaacagatgtggatatatgtgtaaaaatttggtatataaaaaagatgcttttctagatgggtagaagaaaagattgttcaaatgtcctatggtctcacaatccagtggttataactgtaaaactcatccagcctttgggagacactgaaactccatttaaagataagaacttgaaggatgtttaatgtaaacctaaattgattttcccttcaactccttttgggtacataattacttttacctagaagctgttcttgactttactcataacaattataccatgacctnactgtccttctccaagatgaaacaaaaaacccttcaagtgggcctggccaacaagactgaatctattgagcctattggtcaagttagcccttgcccagccttccccaaccccttnactccagccttagctgggatgcccttatataattctcagagcatggaagagagac

SEQ ID NO: 10711 - DNA, 748 bp, Homo sapiens
ttaaaagaaagtactcctctttatttcacagatccacaagaatttcacattaataaaggccagtatcagatatacttttaatgcctttagaaaatgtctgctgttggtttattatgacagagattcttcttgttatggagttattttctaggttaagtcttcaggaacaagaactgtatgttattaaatgttatatgtatgatatctattataggtaatacatgaattgtttgctgactacattaatctatttcaaaatactaagttatgctcacataattatgatagattaaaagaaactgatatttcattttctattccttcactttgggttttctatctatattcataatacatttctttaaaaactaatgttcggccggacgcggtggctcacgcccaggctaaacttttttaaggtaacgatctttgcagaaaatttctttacttaaaaaaaaaaaaaactcacatacatgatgaaaatacagatttaagccacccacatcctcagttgttttccttagcatataaatacttcgtagtaagctttacaaagaactgatgcactgagagacattttttctgagcttagcaaatcaaaaacaatttttaaaagtccttattaacaattagaacagttttgctgtcaaataaagtaggtcttttctcttttattctcaaagaaccccttaataaaggaggcactgacaggtacattacacattaataggagattttaacactgctc

SEQ ID NO: 10712 - DNA, 306 bp, Homo sapiens
taaaatcttgcattttttattttagtagcatatattgtagatattcacttattgtcttaggaataatatctctgaattcttcggtcagcaaggtgactgcagagctaggctggttgctaaaatgttagatatagtcagagactttcagaaaaagttgtacatccccaaattgatctatatagtcaatccccaaattgatctatatagtcttatatgcaattgcatataagatcccatcaagaattttagtataaatcaaaaactgattctaaaatttatatggaaaagcaaagaaacaaaacaagg

SEQ ID NO: 10713 - DNA, 572 bp, Homo sapiens
ttttttttttttttttataggacacagtttattagaggccatcagacctcaggcaccaccagcatgtggagtctgagctgcccacctcctccaggaaggtcacttcgagtccgtgaaggaggcaggcaggtgtgggggagtgaccacaaccaaagtagcaaaagcacccctgtcccaggtgtcagagactagggtggaccccaaggatctcataacctgcactgaccctgagtattgaccctgagtgacctctgagcccgagtggccctgatgcttggcagtgacctgtgtctagtggggggactctgggacattatccccaaaaggggttttaggcctcccctaggtcatgtattaaatagtttttccttataggaaccctctggacctctcccagcattgaactcctggcggggtgtttggccactaggtggtgggaggtagggatatatgggtccgtgttcacaatctgggcctcttccttatttaaggtgccagggtggtcagagatggtcctcggcttcctcaggctggacgtccgggcagcaggtggccgctgggcacagcctcgc

SEQ ID NO: 10714 - DNA, 612 bp, Homo sapiens
  misc_feature (1)...(612): n = a,t,c or g
aaaaacacagatgttcacagcaccactgtttttttttttttttttttgagataataaattccatgagaaatctgggtttgaatatttgtttactttgtctcctaattgaacaccactccaggccttctgtctgtctcccctttacccccaaaatactcacaaaaaaattttaagacaacaagtaaccatatataggtgtttgaatgattttctcatttttatctaatttcatttcataagtcccgagtaatttacctaccataggctactatactgataatataaatgaaaccgaacattttttgctactaactctccccaatttaatgtgttttcgaaataaaaatttaaatttttttccttttaattaaaaagtcatctttgaagtccttattggctgtacattttacatgtttgctggtactattattttgtcagtcagttaaagctggcatgtacagctcttggctttaatgaaaagcacattgacataatgttagtaaattccaaaccccggcacagaatgtgagttaaaattaagtcttgctggggttagtgtacaataaactatacctacagacttttttttaataggaaggngggcaaggctgc

SEQ ID NO: 10715 - DNA, 596 bp, Homo sapiens
ttgatagtgaaaccattagatcattgaattcctctggaattagaaaaccagagagtcccattttaagaaattagatatttaatatagcattgtgtgttctattttagtaacagcagaatctcttgacattacacaactcagtgaaacaacatcatttaagccaaaatatctcccaactgactgatagactctgagcactaatatcatagtgctgtgatgatggacaattacatagtaccgataacagccatgcactgtgcaaagcatgcccttctgcacaggagagcaaggcacttgcagtagtgatctatgccagcaaaacatcattttgagacaaacatttttgtggcagatgtttttcctaaaaagtactatatcatccaagaaatatttgagtaaaatcccttgttcttttgggtgacattaactgacatttgctttttttcaagacctaatagaaaataagaaagcccataatgtatttagaaacaggaatcctcagagcaattctctgtattctcatataatttcaatgtaaaacagaaaacatattgatgtgttggtgataggcttgaattattaaaaacttcaaaaac

SEQ ID NO: 10716 - DNA, 444 bp, Homo sapiens
aaaaatagtacatctaaaatatgcctttatattatttatacttaacagatttacttaaattacttgaagctctcaaagcaatttaagagttggaactagaagaacaggtttccatcacagactagaataaacagaactgctctctattagccattcagtgtttctccccagcagtatatgggttatatagtcctgggttcactgttgtctaaagcagtgttgccaagaactacatttaaatacttcttttggcccatcaaacatggtgctctttcagtgcaatcacagacttccaccccatctccctcagttccaatgaaccaaatagttatttggtatgaaggtctaaaaattgtatggttatgatagttcaggatgacaaattggaacaatcattaaaaaaattacataagcagagttaaagttcatttaagcaaaaaaaaa

SEQ ID NO: 10717 - DNA, 457 bp, Homo sapiens
ccatcttaataatcacaataaatgtaaatggactaaatacactaactaaaagcagaggtggtcagattagatttttaaaaaccaagatccaactatgatttctaaaaaaaaaaccttgtaaatataaagacacaaatacattaaaaataaaaggatagaaaaacatatacgatgctaacatgctaacacaaattaagaagaaagctggggttgctatattaataacaaaatagattttagggcaatgatattactagagctaaagaaggtcacttcataatgataaaggggtcagttcaccaagagtacgtaacaatcctaaatgtttctgcatctaaaaatgaagtttaaaataatatgatgcaaaattatagaatttacataagaaatagaccaatccatacttgtagttggaaatttcaacacccctctcacattgataaaacaagtaggcaga

SEQ ID NO: 10718 - DNA, 260 bp, Homo sapiens
catgcagcagtaccttctcagcaccttgctcttgtaaaaggttgatggtaggtcttccagcagagcgtgagtgcacatttacaggcaaatttagtcttttggctaactggatctgtctgattaggacttgtctttgctcttccttctgttcaccagtgccagcaaatctcgggggagaaatctagtccaacctctccaattgccaacaaccgatccttataattctcaataatggcaaagctacatccaaatcctttagg

SEQ ID NO: 10719 - DNA, 1070 bp, Homo sapiens
gtgggaccctggcaaggcagttggagagtgccattgaagatgcgaggaggcaggtggaacaaaccaaggagcacgcactctccaaggagcgagcagcccagaacaaaatcctggaccttgagacccagctgagcagaaccaaaacggaattgagccagctgcggcggagccgtgatgatgcggaccgccgctaccagagccggctgcaagacctgaaagatcgcctggagcagtccgagagcaccaaccgcagcatgcagaactacgtccagttcctcaaatcatcatacgccaacgtgtttggggatggtccctattccaccttcctgactagctctcccatccgctcccgatctcctcctgcctgaggcacttatcagggcctggagcctgatggaagccataggaactccagagttgccaagccatagctgagaagcctggtggttttcctctcccagtgaaaaaatgggttcagggtcttgtccttagctactagctctagaaaagtcccaaaagcagcagaaggtgaagcaggaagcacttggttttctccttcctgatatagtcacctgttggaagtgttaaaatttcctcgacaggccttaaatttactactacattagggtaccacattttaacttaccatgactttgctccttcctttcctgagaaaatatttccactggattttttccaccagtccccttacagccctcattgttttaggaatctctctcaggttttttctgacctaaaccagcaggaagtcgtcctgggctgtaagcaccatcacttgctttttttttttttctgatttcacaagtgtggtgttttcccaaggctcccttcccaagctcagtgcaaacctctcactcccaagtttctttgagccaacttgcccccaagcacttcacaatagaccctcgagggcttgtgtccatttggccttttacaagtgtaatgccaatttcattgatttttgtttttttttgcctgatttgtatctctggaatgcatttattcttgaaatatttgtgtgattttacaaaaagcttttgtaatcagtt

SEQ ID NO: 10720 - DNA, 479 bp, Homo sapiens
ggcggaggacttgagcagggacaggagttaccactgaggacgcagaagtgacttctgcttgaggacgtctgcagctcctcctacaccagcacactggtgggaggctggcggagtcagtgactatggcccccacgttcaggaggaaggtgtgatgccgtcatacagttacaggaaaaataagaacttcctcagaaagaacaggtccgaattcttcctgtcgcgtcactgattttgaggttcttttttctcttggtgacaataggtgacccacgtggctctgtgtgtttttaaaaattgtccaccaagaagcactttgtgcccagaaagttcctgaagcatcatcctggcagggaggcgcctgctccaccagctggtgggtgtttgtaatcgccaagcaccagctataggtcacagccacatcactcacagctgatcactggttggtggaaaataaactatgagcagcagattacgttaaa

SEQ ID NO: 10721 - DNA, 1067 bp, Homo sapiens
tttttttttaataaacatttgaaatttttattgatttttaaatttaaaatccagttttaaccacaaaattgtttgaatcacaagtggtaatacaatgtcttcaatatttttctaaagttatttttctatataataataagacaacagcatagcatataggaagttttcattccagtggcttttttatatatttatccttcttaggaaggacaaattaaattttttaaattaaacttttaaaatataacaacatctaacagaactgtacaaaacaaagagacattttttaaacaacttgccaaacttacttatgagtgtgttttaaaaacaactttgtaaatgtctgggcaaagaagcaagctgtcctccctttaccttcatagtgagtttgtaaggctttgtctttgtaagcagaaagagtagactgtgttgttttttgccaaaaactgtttatacttaatctcactgaagtattgctatatggagaacccatactctgatcaacttgattttttgtgtgtaatgcttgatctaccaggtaacttcccaactgctcctaatgctagcgggctaatcccacattattattccactatcatccctgcagaaaggtcttggttttgatgaaaatcagccctttccttacctgctactgcctcaaaaagggaccaggaagattctagctggctaattcactgttccctttgagcaagaaaacggcacagggagaaaaggacttatctggtgagagatttggcatataccttcaatgtgtgccctataacacaacattgtctccgatctcatctttctatcaaatgacttccaacactcttaagtctcaggtattcttaaatctgtatcatcaaacatgaagcttctcttgtttgttagagtaattaatctttctttggattaaagtttccctttgaaataaaaccacctacctaatctgactgctaaatttctagcttctttgttttaaatatgctcaggagtcaacccaaattctgcagcaaataagtttgcttattaacaaaaaagtaaaaaaaaaagaaaagaaaaaa

SEQ ID NO: 10722 - DNA, 609 bp, Homo sapiens
gctaaatgtcccaaggggattattacagaaatgttagaaagtactattgtttttatatttgagtgatgtgtttgaaaatcactttaaaatggctggaatgatcttccaagatctaacggtagggtaaggagattgcttttctcacctgatgaaacaaatacatacttttcatcttttgcagagttgaacaatgaccatagttgacaaagcttctgaatcttcagacccatcagcctatcagaatcagcctggcagctccgaggcagtctcacctggagacatggatgcaggttctgccagctggggtgctgtgtcttcattgaatgatgtgtcaaatcacacactttctttaggaccagtacctggtgctgtagtttattcgagttcatctgtacctgataaatcaaaaccatcaccacaaaaggatcaagccctaggtgatggcatcgctcctccacagaaagttcttttcccatctgagaagatttgtcttaagtggcaacaaactcatagagttggagctgggctccagaaatttggggcaatacctggttttgccaatgcagcactgcagtgtttaacctacacaccacctcttgccaattacat

SEQ ID NO: 10723 - DNA, 425 bp, Homo sapiens
  misc_feature (1)...(425): n = a,t,c or g
aaatttctacttaagggcaagtaatttgagaattctgaaattaagcatgatgcttagattgcagtttgttttgcatttnctataattttcaaaattatttttgaagcaagacaaaagtttaatgtcagcttaagtgcttaaatatatcatgctgaccagaatcctgttatttttatatgcatcataaaatttcccatttctgcattaaataaacagaggaggggggtcaagtgatacttagatattggcacacacaaggaacaactgttggcaggcagtatcgattttatgaagagaaagtgaagtttgaaaacttttcaaacttttctagttacaatccaatttttcagatttgataatgcttttccaaagtgaaaataagatacacaataatcattgctctgtgtgattacagataggattat

SEQ ID NO: 10724 - DNA, 650 bp, Homo sapiens
ctgtattcaagtctcttcctctctcttgctcagattcttactctggaacgtctaagttcctgaaaacctctatctgctttccagaactttgtcatcaaacttcacccctatactgctctagcagggagagatgatgaaataagtaatggaccaggaataaagcaactcatcactaaatggaatgtgaaataaatacaatacacaatttccttagactgcacagcttctcctaccatattcttttctttttaggcctgccagtggtacctagtgatcactgcctttttttttttttccaggttaggatgaaggttactagcattgcagaccccctgattagccttgaattgaactatcaaaaccaccacctagcctctccattaaatacatcacagtgaaaatattcattatgatcacatttctttatttgaagcaaacctgacatgatacgccactgaaagggaggacattatagatgttgataaatgtgaaggaaatacataggagctaaggatttttatatgtatcaccaaaatgctaaagtggtagataaacaactcttagctgttatatagtgtaagcaactccagctactctgaactgtcactatcctttgttttctcttagtctgataactctttcacatccaa

SEQ ID NO: 10725 - DNA, 957 bp, Homo sapiens
tttttttttttttacgaagtttcaaaatatttgtaattgaaagacattttcaattgtaaaatgtctcttgagcatctataaagtagaaattattttggcttaaacttcatactgctttcctaaacaaattatgttgatagaggcatggtataagagtcaccttagagagagaacctattaaattccaatgtcttcactgtgttcagtttacaccaactataataaaactcaagccactttttttgttgatatgcaaaacattctggtaagttcatttgaagttgaattatttcattaacatgtaaactcacatgtacaattttactttttgtcatatatttaaatattttcttatctgcagagctatctcaggatatgaaatcataacatgctagcaactagtaatttaacattaaaacacttccctaaattattccatggaaaagtgcatttacaatataaacatgtcatatatgaagctacaaatcataatctcactggagtggatataaaatttcaaattcagtccaaatgagtcaaagaaaaaagtgctaacagagcaaatctgaaacaagttcatggggattgggtaatgagtcatcgaaacgaaatcttttggaaaccatgctgctatcctctgggatattctctttgtcttctctatcaccacaggttccattacaggaggatttagaagtcttgtcttcagaggaccttacagaatgatcctgagtttgagaggaactggaagtttcttcagggtgaaacaagttttcaaagtcccactgctgtagccaagaatgagaaaggcatatctctgctgttggtcttttctctggattttttactaaaaggctctgaataaagtctgtggccagctgtgaaactgatgaaaaagtttcttccgaataatctacattaacatgagagatattgaggtatgtttcttgattatct

SEQ ID NO: 10726 - DNA, 346 bp, Homo sapiens
atttaattatcaatcagtagattgataattaaattatttcactgtgaaccagaaggctagtatttagaaagcaaaatatttagaagtgaaagaggggggaaaaaagaatgatctacaatgtaatataaattaacctaatttaaattagattttaatttaacctactttgacagttttttaaaacaaggaagatcctaaggacttgcaactatggcaatcctcaaaatgggaccaaaaattgtcctggaatggtcaggtggtcatccatctaaagatccatccagctactatttaataattcttcataaggacacttcatctactctggttgactgtcattttcaat

SEQ ID NO: 10727 - DNA, 398 bp, Homo sapiens
attcggcacaggcagaagctgtgaaatgctgtattgccctttcacagcgtctttctcttgcttatgttttgtaaggttatttgatatgaatggttgctacaactaagtcatttctctgtcgtaagtcttaaaatctaatgttttccaccttttttgcatgatgggcattgaatgattggaataaaaagcaatgtccctgctttaaaatagacacttattgtctccttatttgtccctgtgtgtgtgtgtgtatatattaatgtataaagatacacacacacatatatctacactcttgttaatgttttttattgttctcgccatataagtataaattaatgtcagaaatatttgggcaagaaattgggggtacagggattactggcaataatcctaag

SEQ ID NO: 10728 - DNA, 623 bp, Homo sapiens
gagcgaggcccggtccctgcagcgggcgaaaggagcccgggcctggaggtttgcgtaccggtcgcctggtcccggcaccagcgccgcccagtgtggtttcccataaggaagctcttcttcctgcttggcttccacctttaacccttccacctgggagcgtcctctaacacattcagactacaagtccagacccaggagagcaaggcccagaaagaggtcaaaatggggtttatattttcaaaatctatgaatgaaagcatgaaaaatcaaaaggagttcatgcttatgaatgctcgacttcagctggaaaggcagctcatcatgcagagtgaaatgagggaaagacaaatgggccatgcagattgcgtggtctcgggaattcctcaaatattttggaactttttttggcccttgcagccatctctttaacagctggagcgattaaaaaaaagaagccagccttcctggtcccgattgttccattaagctttatcctcacctaccagtatgacttgggctatgggaaccctttttagaaagaatggaaaggtggaagctggagggacatactggaaacagaaaagagtaaattgcagctgccaagaggaatgatcacttttgaa

SEQ ID NO: 10729 - DNA, 280 bp, Homo sapiens
tttaatctagcttgccactctgccttttaagtggggcatttgtccatttactttcaaggttagtattgatttgtgtagatttgatcttgtcattgtgctgttggctggttattatgttggcttgtttgtgtggttgctttatagtgtcactggtctgtgtgtttaagtatgtttttgtattagtgtgtagtggtctttcctttctatatttagtcctcctttctaaaatctcttgtaaggcagatgtggtggtaatgaattacctcagaatttgcttgtc

SEQ ID NO: 10730 - DNA, 322 bp, Homo sapiens
tctttataaagtagactggcatctaagtaaaatgaccatttcttttatagaaatgatcaaaacagtggaacatctaaaattcaggaggccccaaaagggcattttcatagaaatgttaataacttacacattaactccagtcaataacaccgtgctacagtgtacagtttagttagactcaagagtgtaattggttcattattaaatttactcatctgtggttcaaaaaataacacaaatttaagtattttattataatccatctcataattgtgagaatactttctgacaaaggctttatcagtgtcacatttatgaaaca

SEQ ID NO: 10731 - DNA, 467 bp, Homo sapiens
tttttttttcatcttataaggaacatttatttggtaaactatctcatagaaatagactctaaaatcaaacagtttcttaaacaacagagagcataatcccaatctctccccatgaaaagcctacttcataactgaagtacctaaagcccatgaactgcattactagaagaaaggagggaaaaagacatttactaaacttccacaggaagactgtataaatctggaagtggttaagtacacatcagcctgtatccaagaatactactcagtctcaaaaattaactgaaaatctaaacttaatatggatacttctttgttcttggtaaggctcagaaaattaccatctatttaagtacgcatggtactagttacatgtcaactgatataataaaaaaggtgaagtggacaatcagtatttcaaacccaatacagggaaatcactagatgtaaataagaacttttaaaag

SEQ ID NO: 10732 - DNA, 87 bp, Homo sapiens
gcctgcacagctcttgaatggtgtggactgtcccgaggaaatccaaggttcccgtgtcagtggctatgatgacacctcaagttatca

SEQ ID NO: 10733 - DNA, 1333 bp, Homo sapiens
ccaatcttcattctcggggttggcccgccccgatagtcactccatgtcctcgtttactggttcatcttcgtaatctctgtcatggtcaaaatctggactgtggttggctgttgtcactaaggacaggggcccttcagcttcctctggatcgaggggctcttctttgacgtgtacaggatgcacggcttgcataggagatctgcctggactgctgtcactctcgttgctgttggtatgctccattgccccgttcagctcttcccgtattgcgctggctaagttgcccagagtgggatttcccatggaagcggtagtgtatagaggtatactattctcagccattgaagcctgtaaagctgcattgagaggtgtgcagtaggcgtggctgctctgcatgtttttaataagggaagggttaccactgatcttttgtggccttcgtttttggaattctacttcatccactgtccatactgcccctttaacgttttctactcgcacaaaacacttgtgaagactaagattatgacgcactgcattcttccacgtggcgcgttgcgtcggaagtaagcaaacattcgtgtgaaccagttatagatctcatttagtgttagctgcttttctggagattcgagaatggcctgcctaattaaagatgcatatgtaaatggtggtctaacttctgcagttcttataaaattcttggttctgcgcaatatctgctgacgaaatgggcacgttgtatttgtctgagtaccgctgcggatgggtcccaccgtgtgcatgctggtggttgtgatgacagaggggccttgggtgacgggagtcaggggggcggttggggtcgttggagtatgaggtaagctctgtggagaagcctccgatgcggacttggagagagtgacacttgataccagattcaagggctgaggggcggctttgggttctgtagacttcacatgcaggtgggtcatcatggcttgcaggcgttctttgtcttttgcaagctgtagctctaactgctgtacaacctgcatttgtactctacattgggctgtacttctatcgtccagcgcatgcctcactgttgagatgttttagaaatgattggaaatcttcgcacactgcttcacagcctggccacttgcatacaccatgtccatagagaggatggctatgggggtgctcctcatgggacaaactttcccttttgggagtgtggactgagagctgtccattggtagaggcatgtgggttcattattaaggaggtcttggaaggtgcagaggaggagacacatgtcgtggtcagatccaaactgctgtgattgttg

SEQ ID NO: 10734 - DNA, 1264 bp, Homo sapiens
tgacacctgcactgtgccattcctgattattccattcaggatctgtatcagcgggatggggcatggtcccagcacaactcttctgggttaaaaaaaaaaagccaggtgattcctttgtgtgttatgtcgtaagtggagtgacttcatcatatatggaagaagatttctatattcagctttttctgcaggttggagtcagcatagagttggaaaatcagctttggctttctttcctgtctcatttcctctagtgttctcctttttattgtcatcagctctcaacaactctgccacttttgtgtcccaaggtaataagatgtaggaaacaaaacattgtaaagtggagcaagaaaagttatcaattaaccacatcagagtcaaatgtcttgggtgacactaaggaggatatgggcaggtgataccagagtgctttatcttgtgatgttgatacagtagcagcctctcagacattcagccaggttggatttctcatgagtttgtcacctagttttgaatcctatcccgttggtttctgcaggaaaaaaaaaaaaatttatgtggtttttaaaatttgttctgagtggggagaatcttagggggaatgtactgaatagtatcatgggctcagctcccccatgcagggccaacaaacaccaaaatgagtaaactgggaagcttttctctctttctgtcttcatcccagatcaaagaatcccgagttaggatctggatgaaggataagcccctgaattgtcgatgggctcacccccacactgacccagcatctgaacttgcttaacagggagccggggctaaactgcttcaccctgcctgagaaccagggagcactgcatttctccacagggtggaggagaagaggcagaataaaccaagcctgggacacctccctcctgtctaggtgtactcattcttctgtttcaaaagaaggcaaggacatgaagtcaacttctacctatcttctgctgctggtgtcttatgtattctcagtttgacctgattcctcttctgtcttttgacttaacattaggggttcttggtcataacctgctctgatgtacataaagatttcaggttcaatatcaatgtgtcttaaaacagaagtattttagcgggtggggggtggggtggtggggacaaacaacgcaggatataattgccaaaaccaggcttgaggttggtgactcttgaaagattttctttcttcaggcctagatcagaaaattaagtgcagcaatatcatgaa

SEQ ID NO: 10735 - DNA, 1254 bp, Homo sapiens
gttggactgtgcaaagaagctgtaccaggagtttgggatccgaggcatctacaaagggactgtgcttacccttatgcgagatgtcccagctagtggaatgtatttcatgacatatgaatggctgaaaaatatcttcactccggagggaaagagggtcagtgagctcagtgcccctcggatcttggtggctgggggcattgcagggatcttcaactgggctgtggcaatccccccagatgtgctcaagtctcgattccagactgcacctcctgggaaatatcctaatggtttcagagatgtgctgagggagctgatccgggatgaaggagtcacatccttgtacaaagggttcaatgcagtgatgatccgagccttcccagccaatgcggcctgtttccttggctttgaagttgccatgaagttccttaattgggccacccccaacttgtgaggctgaaggctgctcaagttcacttctggatgctggaagctgtcgttgaggagaaggagtagtaagcagaactaagcagtcttggagggcaaggggaggggaatggtgagatccgagccctgtgcatggacttggtgagactgttgccttaatgacatcctgcaccgtgtataacttagtgtgtcattttgaaacttgaattcattcttatcaatttaagggatcttaaaaggatttggaaatggaacaagtagcttccagaccagatactacctgtggcaagaatgctgcctaccagttaactgctggtcctaccacagtcaaagtattcctcattaaagagagaatctcaggttctcactggaggcactgtgcatattttcaaccagatcaccaggagctgagatcttcttcagtccctagccaggaatacccatttgatttccagggtgccatctaatcctgggctgtacatgtggatatggacttgaggcccacctctgtgtccaagtggattgagcatatatgcctaggaggagatagactgttaatcgttggattttgattttttttttttatgcctgcaaataatcaaaagtaaaactggagtagcctaattttctgggagcaggtggagaactttccctcctacacagtgaggacagtcccagtctgctgggataagtgagaaagcccagggtgtaggaaggccctttttacatactcttttctcatgagagctcactattttaacaataaacaataaacgttgtttctaatttttataaaaaaaaaaaaaaaaa

SEQ ID NO: 10736 - DNA, 322 bp, Homo sapiens
ctgtgcagagcagcaagtgctccgtgcagggctgttgctatcacttggaggtgaacagcctcttttgccggtattcagtgaagaaagcaagtctaaatatgcagttctctcactggagtgaaagatgttttgttcatttctaatcaactatgctagacagctgcaagctgaaaagtgcctgcaatttgccatttatttgtaataagaaaataataaacactgctggaaccagtaatgcagaagtccccttggctgatcccggaatgtaccagctggacattacattaagaaggggtcaaagtttagctgctcgagatcgagg

SEQ ID NO: 10737 - DNA, 476 bp, Homo sapiens
gtcagtgtgaatgcatcggccacccctttccaacagccgagtggatatgggtctcatggatacaacactggtgtttcagtcacctccagtaacacgggcgtgccagatatctcgggttctgtgtactccaaaacccagcagtcctttgagaaacaaggttttcattccggtactcctgctgcttccttcaacttgccttcagccctaggaagtgggggccccatcaatccggccacagctgctgcctacccacctgccccctttatgcacattctgaccccccatcagcagccgcattctcagatccttcaccatcacctgcagcaggatggccagacgggcagcgggcaacgtagccagaccagctccatcccgcagaagccccagaccaacaagtctgcctacaacagctacatgctggggggccaactgaggcctgaccctcttctcccggtcgcatcttctgagagggcttc

SEQ ID NO: 10738 - DNA, 407 bp, Homo sapiens
tttttttggaaataagaaaattttactgtgaaaggaatcatttttatcattacaacaaccagcacaggctgtgaataatactgtcaaggcagtattatttttgagaaaatatgtctaagtgaataaactcacttattaaacccagttacactgttcaagtcattctcaaaacgttctggttgttactaaatttcctcaagagagatgatttagtgcaaatgcttcatattccatataaagaggtagaagaaaacaaacttccctgggtaccacgatgtgcagaaaggagttaacacagcaggtcatagactactacccttagaaagtcctgcttacaaagtcacctcttggctggcatatagaaacctgggagtttgggagtgttcccatcactccctaactcagtg

SEQ ID NO: 10739 - DNA, 361 bp, Homo sapiens
acagtaacaggaaactcttagcaagtggtggacctgggttctgagcccaaggagggtggtcccagaactgaggttccacacggaccacgcagcgatgcccaccatggagtgatactttgcagggtgtggggctcctgacgtgctcccctcacacgtgtgggtccctttcaaaagtggggtgagcataggatggagcaattcaacgactataggtcgccctttcagtaaagctctgtgtcatgagacctttggggggttggcggccacagttcctgcaacctcccttctaggagatggctcaaaagaaggacatgggcaggtacccagagctgtcaccctctctgtgttctctgaaagaaac

SEQ ID NO: 10740 - DNA, 211 bp, Homo sapiens
actgcacccggcctatgaagatacttttatatctattcaataataaaaaaagatgattttaaaagacataaaatatatgacagatcaatgtacaggtctctatgggatgtaaaaacagaaagcacagctccttcttgttgaatatgttaaacaggaaaacacataaaaagctaggcaatcatggaataatgttttcccaaacattgatggg

SEQ ID NO: 10741 - DNA, 312 bp, Homo sapiens
cgaatctgcgttctgaataaaaattcttaaaatcaaactgtttctataataagaaaagatgacaaagtatctacatatctttgtttaattcctctgattgtaataaataagccattatcaatacacagtggctgaatcaaaaggatttgttttatacattaaaggttgaaagaggagagacagggaatctgaactctccagatttttatatttggttttaaaagccttctcctcatttaaagtgtcattattaaaaattattaattctttttaaattctagaaacaactgaaatcacgttcagtatttttga

SEQ ID NO: 10742 - DNA, 689 bp, Homo sapiens
cgcccagcgaggcaaccgcctccgaacgccaggtgggggcgaggcgtctcggagtctcagagacaccaaggcccctgcgacaaggtggctgcagctaggccgggggcgtcaggacgacggagcgggttcgggtcggtgacacgcagacctgagggagctgggcccgccttttccgcccgcgccccaggcccttgcagatcgagatttgcgtcctagagtgggaaaaaagcagaggccagggcgccgattttatttggagagaagcaagcatctttgcctctttggagtaggaaattcagacttgaaaaagtggtgtgtggttgactctgtttctcgccatgtcttctcacaagactttcaccattaagcgattcctggccaagaaacaaaagcaaaatcgtcccatcccccagtggattcagatgaaacctggtagtaaaatcaggtacaactccaaaaggaggcattggagaagaaccaagctgggtctataaggaattgcacatgagatggcacacatatttatgctgtatcaagttcacgatcatcttacgatatcaagcctgaaaaatgtcaccactacctgggacagttgcacatgttttactgggaatatttttttctgtttttctgtatgctctgtgctagtagggtggattcagtaataaatatgtgaaagcttttgtttc

SEQ ID NO: 10743 - DNA, 324 bp, Homo sapiens
tgataatccattacctcgtgagaaagcggaaaaactgacttcagcttgcccagatggcgcagagaatgggtttcccgtaaccccgcctgtgtctttccttcagcctcgtcccaaatgccgtgggagggaaggcactctctgtcaagctgctgtcaccttacctgaagtaaggagtccacgcctgcatgtccgaggaaaacagttttctcaaacacattagttgaaaaactgaagacgctgcctaaaatacaagctgagttagagacagcccttgtaagactaggtagggtattttacagggcctctccccactagctttggttt

SEQ ID NO: 10744 - DNA, 363 bp, Homo sapiens
tctgctctcgggggcaccttccggggttcctaagccgcggggcccctcgctgcccctcgaggccctttccctgacctaggctttggcctgggctactcgttccggagccgccatgtcgtccgacttcgaaggttacgagcaggacttcgcggtgctcactgcagagatcaccagcaagattgcgagggtcccacgactcccgcctgatgaaaagaaacagatggttgcaaatgtggagaaacagcttgaagaagcgaaagaacttgcttgaacagatggatttggaagtccgagagataccaccccaaagttcgaggggatgttacagcaacagattgaggaagctacaaacaagaaatggga

SEQ ID NO: 10745 - DNA, 598 bp, Homo sapiens
tcatagctgtgacttctgtctccctccccaaaacccactcagcactaaggtccatgggaagacagatatttttatctcatacaccactgaatcccagtgtatagtgcctgggcactagcatgtgttagattatgtgataaaaaataacattataaaagagaaatacaccttatcacacaatgactcacattggtttcaggataggctgtatccctgacatctaacttgttaagaggcagaaaagtaacctctccaggaagattcattttattaaactccattaaaatcttcggtgctgacttcatctgaatcaacaatgtgataaaataacctgtttccagcagtgacttccacgcatgtgtagaaagctggttcacattcaaagttattcattacaataccatgatagccattttgaacatgctggtttattccttttcgacggaagtggtctagcactttgtttatgctgtctattccatttaaaatggcctttcctgttgctgctctaagaagttgttgcttcttttcaagatcttctcttttagcagcaagtgcttgctgttctgcattctcttctctccacaagtagtttctt

SEQ ID NO: 10746 - DNA, 319 bp, Homo sapiens
gggtactgtaaataatttcacattattactaataataaattattatttgtattacactattacataatgtaaaggctattaagacatgtttgtcttcaaagaatggccttggtttctgtgggcagtgcctcctcatggaagggtaatgcattcctgctaaatcatggacaaaacgggcttccaggagctacaggctgcagcagcagctcctcctctaagtccttcactgcctcaaactcttgttgactttgtaagcttctttcagtctagttttttcaacagagctagtatttcatgagggtctactacataccaggtt

SEQ ID NO: 10747 - DNA, 645 bp, Homo sapiens
  misc_feature (1)...(645): n = a,t,c or g
ttcattccacactgagaggttcgggtttggagcgttcattccacactgagaggttcgggtttggagcgggaggaggggagtgaggcataagtgagaaaggaggtcacatggcccaaacaggtacttccaggaggccaatcccagccggtagggatccaggccccgggaggccaggcctgcttgccgagtaccgacggccaggtgaggaggcagaagctgtagccccagagccagaagacccacactagtgtcatcaccaacatacaggggggccacaggctcccagtgcccaggttaaggtgcagtcctcaccgagaaggccacatcagcttcctgtgagtgtgtcccatggatccaggggtggccagaggcccatcaccacgggtgttggcacttcctaaaaccgcacgcagcgatctccagactcgttcttggccatgagcagcagaaatgctgcagtgctgcctgccagcgtacaggctgttcaagaacccaagaggaatttctcaccaatacgtaaacatgcaccacagctagactgcggttccgtgactttgggatttcagagacagncgaacttaagaagaaattctggggctgacaaacagcaaccaacattttgttttgcaaccaagagcatttcaa

SEQ ID NO: 10748 - DNA, 449 bp, Homo sapiens
ttccattttaatggttgaatattttctcaatatgtgtttttacattattaagtttaacatttctttgtacatttactggtttgaatttactttgtgaatcacctcttcatgttccctgtccagttcttccatttttcccccttatatctttgtaatagctccttaaaatctttggtttatgtcttcaaatattttcccccagtttttcatttaccttttatttttatttatattttataatgaacagtagttgccctttttaatgtagccagcctatctttttttatttcttttatgctcataaacagcttccccttgtttattttttccttttttttttttctttacagaggtaatcaagttaaccttctccatgttgataccacagttgtcaccattttcttctttttttgagacagagcaagagcctgtctcaaaaaaataaaaaa

SEQ ID NO: 10749 - DNA, 501 bp, Homo sapiens
gggtttggatcattggattttattaaataaaaaagagaagcaagtacaaacaccagtcaacttcagaaggattttaaaattgcaagtgtgccatgcagctaaggtttatcaggctcctcagttagtctgcactgtccttggggaggggacacagctctgaggacaggggatatttcccagggggttctgggatgaggtcagcactaactgggacagcccctgtacaacaaaggagcaaacctaggccccagggggatcctgtctcaggagaaagagagaggcaagaagggaagaggacactatcatccacttccaaggaaagccacctcacagctcagtgtgtgcaaacagcagctccgctaatttccagtaaggaggccaaagtcaaaggcacccatggagaatgggataattcaacaggaaagactcggtcattagggaaaggagcatgctaggacaggtctgggtgcacccctgaatctagctctgagcttcctagaa

SEQ ID NO: 10750 - DNA, 5493 bp, Homo sapiens
aagatggccgcggcgcgcacggctcctgcggcggggtagaggcggaggcggagtcgagtcactcccgcacttcggggctccggtgccccgcgccaggctgcagcttactgcccgccgcggccatgcggggctccgtgcacggatgagagaagccgctgccgcgctggtccctcctcccgcctttgccgtcacgcctgccgccgccatggaggagccgccgccaccgccgccgccgccaccaccgccaccggaacccgagaccgagtcagaacccgagtgctgcttggcggcgaggcaagagggcacattgggagattcagcttgcaagagtcctgaatctgatctagaagacttctccgatgaaacaaatacagagaatctttatggtacctctccccccagcacacctcgacagatgaaacgcatgtcaaccaaacatcagaggaataatgtggggaggccagccagtcggtctaatttgaaagaaaaaatgaatgcaccaaatcagcctccacataaagacactggaaaaacagtggagaatgtggaagaatacagctataagcaggagaaaaagatccgagcagctcttagaacaacagagcgtgatcataaaaaaaatgtacagtgctcattcatgttagactcagtgggtggatctttgccaaaaaaatcaattccagatgtggatctcaataagccttacctcagccttggctgtagcaatgctaagcttccagtatctgtgcccatgcctatagccagacctgcacgccagacttctaggactgactgtccagcagatcgtttaaagttttttgaaactttacgacttttgctaaagcttacctcagtctcaaagaaaaaagacagggagcaaagaggacaagaaaatacgtctggtttctggcttaaccgatctaacgaactgatctggttagagctacaagcctggcatgcaggacggacaattaacgaccaggacttctttttatatacagcccgtcaagccatcccagatattattaatgaaatccttactttcaaagtcgactatgggagcttcgcctttgttagagatagagctggttttaatggtacttcagtagaagggcagtgcaaagccactcctggaacaaagattgtaggttactcaacacatcatgagcatctccaacgccagagggtctcatttgagcaggtaaaacggataatggagctgctagagtacatagaagcactttatccatcattgcaggctcttcagaaggactatgaaaaatatgctgcaaaagacttccaggacagggtgcaggcactctgtttgtggttaaacatcacaaaagacttaaatcagaaattaaggattatgggcactgttttgggcatcaagaatttatcagacattggctggccagtgtttgaaatcccttcccctcgaccatccaaaggtaatgagccggagtatgagggtgatgacacagaaggagaattaaaggagttggaaagtagtacggatgagagtgaagaagaacaaatctctgatcctagggtaccggaaatcagacagcccatagataacagcttcgacatccagtcgcgggactgcatatccaagaagcttgagaggctcgaatctgaggatgattctcttggctggggagcaccagactggagcacagaagcaggctttagtagacattgtctgacttctatttatagaccatttgtagacaaagcactgaagcagatggggttaagaaagttaattttaagacttcacaagctaatggatggttccttgcaaagggcacgtatagcattggtaaagaacgatcgtccagtggagttttctgaatttccagatcccatgtggggttcagattatgtgcagttgtcaaggacaccaccttcatctgaggagaaatgcagtgctgtgtcgtgggaggagctgaaggccatggatttaccttcattcgaacctgccttcctagttctctgccgagtccttctgaatgtcatacatgagtgtctgaagttaagattggagcagagacctgctggagaaccatctctcttgagtattaagcagctggtgagagagtgtaaggaggtcctgaagggcggcctgctgatgaagcagtactaccagttcatgctgcaggaggttctggaggacttggagaagcccgactgcaacattgacgcttttgaagaggatctacataaaatgcttatggtgtattttgattacatgagaagctggatccaaatgctacagcaattacctcaagcatcgcatagtttaaaaaatctgttagaagaagaatggaatttcaccaaagaaataactcattacatacggggaggagaagcacaggccgggaagcttttctgtgacattgcaggaatgctgctgaaatctacaggaagttttttagaatttggcttacaggagagctgtgctgaattttggactagtgcggatgacagcagtgcttccgacgaaatcatcaggtctgttatagagatcagtcgagccctgaaggagctcttccatgaagccagagaaagggcttccaaagcacttggatttgctaaaatgttgagaaaggacctggaaatagcagcagaattcaggctttcagccccagttagagacctcctggatgttctgaaatcaaaacagtatgtcaaggtgcaaattcctgggttagaaaacttgcaaatgtttgttccagacactcttgctgaggagaagagtattattttgcagttactcaatgcagctgcaggaaaggactgttcaaaagattcagatgacgtactcatcgatgcctatctgcttctgaccaagcacggtgatcgagcccgtgattcagaggacagctggggcacctgggaggcacagcctgtcaaagtcgtgcctcaggtggagactgttgacaccctgagaagcatgcaggtggataatcttttactagttgtcatgcagtctgcgcatctcacaattcagagaaaagctttccagcagtccattgagggacttatgactctgtgccaggagcagacatccagtcagccggtcatcgccaaagctttgcagcagctgaagaatgatgcattggagctatgcaacaggataagcaatgccattgaccgcgtggaccacatgttcacatcagaatttgatgctgaggttgatgaatctgaatctgtcaccttgcaacagtactaccgagaagcaatgattcaggggtacaattttggatttgagtatcataaagaagttgttcgtttgatgtctggggagtttagacagaagataggagacaaatatataagctttgcccggaagtggatgaattatgtcctgactaaatgtgagagtggtagaggtacaagacccaggtgggcgactcaaggatttgattttctacaagcaattgaacctgcctttatttcagctttaccagaagatgacttcttgagtttacaagccttgatgaatgaatgcattggccatgtcataggaaaaccacacagtcctgttacaggtttgtaccttgccattcatcggaacagcccccgtcctatgaaggtacctcgatgccatagtgaccctcctaacccacacctcattatccccactccagagggattcagcactcggagcatgccttccgacgcgcggagccatggcagccctgctgctgctgctgctgctgctgctgctgttgctgccagtcggcccagcccctctggtggtgactctgtgctgcccaaatccatcagcagtgcccatgataccaggggttccagcgttcctgaaaatgatcgattggcttccatagctgctgaattgcagtttaggtccctgagtcgtcactcaagccccacggaggagcgagatgaaccagcatatccaagaggagattcaagtgggtccacaagaagaagttgggaacttcggacactaatcagccagagtaaagatactgcttctaaactaggacccatagaagctatccagaagtcagtccgattgtttgaagaaaagaggtaccgagaaatgaggagaaagaatatcattggtcaagtttgtgatacgcctaagtcctatgataatgttatgcacgttggcttgaggaaggtgaccttcaaatggcaaagaggaaacaaaattggagaaggccagtatgggaaggtgtacacctgcatcagcgtcgacaccggggagctgatggccatgaaagagattcgatttcaacctaatgaccataagactatcaaggaaactgcagacgaattgaaaatattcgaaggcatcaaacaccccaatctggttcggtattttggtgtggagctccatagagaagaaatgtacatcttcatggagtactgcgatgaggggactttagaagaggtgtcaaggctgggacttcaggaacatgtgattaggctgtattcaaagcagatcaccattgcgatcaacgtcctccatgagcatggcatagtccaccgtgacattaaaggtgccaatatcttccttacctcatctggattaatcaaactgggagattttggatgttcagtaaagctcaaaaacaatgcccagaccatgcctggtgaagtgaacagcaccctggggacagcagcatacatggcacctgaagtcatcactcgtgccaaaggagagggccatgggcgtgcggccgacatctggagtctggggtgtgttgtcatagagatggtgactggcaagaggccttggcatgagtatgagcacaactttcaaattatgtataaagtggggatgggacataagccaccaatccctgaaagattaagccctgaaggaaaggacttcctttctcactgccttgagagtgacccaaagatgagatggaccgccagccagctcctcgaccattcgtttgtcaaggtttgcacagatgaagaatgaagcctagtagaatatggacttggaaaattctcttaatcactactgtatgtaatatttacataaagactgtgctgagaagcagtataagcctttttaaccttccaagactgaagactgcacaggtgacaagcgtcacttctcctgctgctcctgtttgtctgatgtggcaaaaggccctctggagggctggtggccacgaggttaaagaagctgcatgttaagtgccattactactgtacacggaccatcgcctctgtctcctccgtgtctcgcgcgactgagaaccgtgacatcagcgtagtgttttgacctttctaggttcaaaagaagttgtagtgttatcaggcgtcccataccttgtttttaatctcctgtttgttgagtgcactgactgtgaaacctttaccttttttgttgttgttggcaagctgcaggtttgtaatgcaaaaggctgattactgaaatttaagaaaaaggttcttttttcaataaatggtttattttaggaaaaaaaaaaaagtcgacgc

SEQ ID NO: 10751 - DNA, 123 bp, Homo sapiens
aaaaaaaaaaaaaaggcttagggtgacaattttgacatggggacgggaaattaacattacactgaggttattcataataaaggatcttctgaggaatcggaaataaacaatgttgtatggaaa

SEQ ID NO: 10752 - DNA, 427 bp, Homo sapiens
tgcattagttttcctaattgctgctgcaaacaaacagctacagactcaagtggcttccatttctgtcttatagttctgattgccaaaagtcctaagaggatctcaccaggctaaagtcaaggtgctggcggggctgtgtcccttctggaggctcaaggaaagaatcgggtccctgccttttctagcttctaggggctccagcttctaggtttgtggcctccttcctccatcctcaaagccagcaacagcaggtgaagtccttgcccatcgtgcatcactctcccttctgcctccttcaacttttttttatatttagggggaacgagtacaggattcttacatagtcaaaaagctccttatagagaagctcggaactttcaatacagctttgcattttttaccattttaattttccatttaatttaaa

SEQ ID NO: 10753 - DNA, 624 bp, Homo sapiens
aagaagtacatccctgtgatcctgctgcttcgtagagcaccactgcacaccctaccccgagtgccaacccacctctgctataggacactattttcctggccctattcttcacttaacttccccatccctgtcccttgacctaggaatatgttaaatgctgctcccatacaattcagttagctcttgtctttttatttggtccaacccctgctttactgctcatgctgcttaaagcaggagggactagagaaacaaggcattttaggaggcctgtgtgcagttgaaaaccgacttttacacgccttataaaagcagtcaggagatagatccgtaggtttgatccttcacatctaataccaggcgctaatgggaacaaggtttaaagggtcctggtatgctaataaattgaaaaattagtgaaatttaaacttctgcctttttttcctgccttttaatctagatttgcttcctcaatatcctactttgtggtttactaggaacatgcttactctgatctttttttaaaaaacacacagtggcagagtcatttcactattgcactgtgtgttaaagaatgaataaggagttttcagttacatggccaaaaatacaggacttgaacat

SEQ ID NO: 10754 - DNA, 425 bp, Homo sapiens
agaagttacctaccagcgaaaaagttagtaactctcccccattaggaagatcaaagacacagctctccccttctatcaagcgcaagagagaagtcagccctcctggggcccgaacaagaggccagcaaagggtggaggaagcccctgtgaaaaaagcgaagcgataatcctgaccactgctgccctaggcttatggaggaacacggtggagaggaaagagacatgccttggtggccataggcttctctttaaccaggaaaaagatatgcatgtgctgtaagtccctagggtgcaagctttttcttgttatgttttaaacagctttataaactattgttcatagaagatattatgtacatttatttcagataaaggacaataagtttactttgtatctgaactcaaaacaaagtagttgtatattt

SEQ ID NO: 10755 - DNA, 337 bp, Homo sapiens
aaaatatgtagttattgatcactttgactgttttcttagaatctagaaatggttttcggatattcctatcagttattcccaaaaggtgcaatactgagacacagactgcattgaaataaaaatcaaaataagaacacagacttactgataatgtgatgtcttttataaaatggggtaattttacctgatgacagtattgaagactttacttggaaaaattaagaagttgacagctctactttagacctcagaattatttttgaaatactgttttcccagataacaaaagaattatctagagaatgttaaatgtatgactttgtttttctcaataaat

SEQ ID NO: 10756 - DNA, 1780 bp, Homo sapiens
  misc_feature (1)...(1780): n = a,t,c or g
ggctggagttcactcacatggattgaggcccagttcctgggagaagagatgctgggcaggaaggtgtctgcatgtgggactctgtacagcccggtcctctcccacatctgggaggggccagagtcagacaactgctgggttcgtccctaagagaggtcatctgactggctgttcagcctaggctgcacacacccccactttcctctaccaggccacaccggaggcagtgctcacacaggcaagctaccaggccacaacaacgacacccacctcacctctggcacctctgagcatccacgtacttgcaagaactcttgctcacatcagctaagagattgcacctgctgacctagagattcccggcctgtgctcctgtgctgctgagcagggcaaccagttagcaccatgtcttgtgacttggcggggaagattggaacgttccttaaccaggagatcctcagccacctgggcctggccagcaagactgcagcgtgggggaccctgggcaccctcaggaccttcttgaacttcagcgtggacaaggatgcgcagaggctactgagggccattactggccaaggcgtggaccgcagtgccattgtggacgtgctgaccaaccggagcagagagcaaaggcagctcatctcacgaaacttccaggagcgcacccaacaggacctgatgaagtctctacaggcagcactttccggcaacctggagaggattgtgatggctctgctgcagcccacagcccagtttgacgcccaggaattgaggacagctctgaaggcctcagattctgctgtggacgtggccattgaaattcttgccacttcgaaccccaccccagctggcaggagttgcctgggcagttttacaaacacaattttccagggttggaggctgtgggatgggcatcacatctgagaccagtggcatcttgcaggacctgctgttggccctggccaaggggggccgtgacagctactctggaagaattaactataatctggcagaacaagatgtccaggccctgcagcgggcagaaggacctagcagagaggaaacatgggtcccagtcttcacccagcgaaatcctgaacacctcatccgagtgtttgatcagtaccagcggagcactgggcaagagctggaggaggctgtccagaaccgtttccatggagatgctcaggtggctctgctcggcctagcttcggtgatcaagaacacaccgctgtactttgctgacaaacttcatcaagccctccaggaaactgagcccaattaccaagtcctgattcgcatccttatctctcgatgtgagactgaccttctgagtatcagagctgagttcaggaagaaatttgggaagtccctctactcttctctccaggatgcagtgaaaggggattgccagtcagccctcctggccttgtgcagggctgaagacatgtgagacttccctgccccaccccacatgacatccgaggatctgagatttccgtgtttggctgaacctgggagaccagctgggcctccaagtaggataacccctcactgagcaccacattctctagcttcttgttgaggctggaactgtttctttaaaatcccttaattttcccatctcaaaattatatctgtacctgggtcatccagctccttcttgggtgtggggaaatgagttttctttgatagtttctgcctcactcatccctcctgtaccctggccagaacatctcactgatactcgaattcttttggcaaaaannaannacca

SEQ ID NO: 10757 - DNA, 328 bp, Homo sapiens
gcctaggtcaagggactggtaaacagtggtgcctgcatgtgaacccaggctgtctggctccagagcctggcacttcatcatgtgggaatcctgccttttagaagtgcctccagcacagcacttggcccagggcaccagcagggctgtagagtgtgcatgagaaattgtaaattttcctttttgaaatcctttatgtgttggtgactctttgaccttccccttcaccgcaggaaagctgctgcttttttacacagaaactttcttgggactgaggaagtcattaggggatttaggtattaaaccttcctttgcgggtctgccataacaa

SEQ ID NO: 10758 - DNA, 50 bp, Homo sapiens
tgaaggtacaacacctacagtatgaaacattttgtgttaaaatagagttt

SEQ ID NO: 10759 - DNA, 330 bp, Homo sapiens
cagactttgtgcctctagcttttttcccccatgctagtcttcacgtgaagtgcatctctcgaaggcaattaaaattacacagtgccctgatttcagtcttcctgtaaccatgctgaatattttccacttaaaaaaattaagttttaattaagttttttcatcaaaacacaagtcctgctgataatgtcaggaaggcctgagaaagtaattacatgcgcaatctgtttttgacatacttcattctcctttgggacatttcttctgtctcctttacttcattaaaaatcccctattgtcgtatgaaggcttgatttcttctctatttaccat

SEQ ID NO: 10760 - DNA, 327 bp, Homo sapiens
gtttttttatcctaatcctaaacttcaaattctttaagggcacaaactatgtcttactcattttggtatcatgagtgcctagcttggaccactgtgtatgtagctcttaataaatgtttgttaaaattaactaattcatattcttaaattcttttgtactatatagagatagagagattttaattgtaataatctttcgtgagtttttcttctttatttgaaaaaggatccagacacagagatgaagaatgacttgtaccatcttctgagaacaaatggactgaaagcttgtgactagaatccactacttttcaacctcttactcct

SEQ ID NO: 10761 - DNA, 187 bp, Homo sapiens
ttccaaccccttggaggccgacatcctggctatggcagaaatgattgcagaggctgaggagttagacaaggcctcatctgacctttgtgatcttgtgagcaaccagagtgcagagggactccctggaaagactgtgacctgtttgggcctgctcgagatgatgtcctggccatggcagtcaagatgg

SEQ ID NO: 10762 - DNA, 791 bp, Homo sapiens
  misc_feature (1)...(791): n = a,t,c or g
gtaatcaccacaggaatccagacggggagtggggtcagttcactggtacaaggatcttgatcaaaggaactcatttcccacctgatccctattcactccagggtccacatctaggagtcccaaagaccggcatgcatgggttgggtcaacaggctgcctggaggtttacctcattccaggngttggagaagcactgtgggaggaactggggttcaaatctgcaaacctccaaaacataggagggatcttctaaaagtttctgagagttctaaccacagattaggggaaaaaaaagatgccctttcatcaacatgggatgaaatgctaggatttagacatggtttttttgtgtgtttttgtttttgtttttttcccaattcagaaaacactaaatcatgtaaaaatcttggaagaggagatacagattctgacctaataagatgctactgctctgattccaccatcagaatacctttaggttggcaccacttgcaatgtattagtgcagcaaactgcacgaatcccctcattagatccagggcccctgagagtagaaaggggagtggggcagtaaatggccagggaacaggagacagtgggctggagggtgtcccaggttctaaccccagctgggccttcagagccctggtgtggtctgggctaacctctcaatccttttccaagtcttaagtttccttccaactcactgtgattcttccagagaattacacagggcaggtgaaattatttcctagaaaatgcccatggagtacagaggttctcactgaact

SEQ ID NO: 10763 - DNA, 539 bp, Homo sapiens
taatccctgagacatatcagtgaggttctgattaaaacaagtagagagtcatcttcattttcaagatgtattatattttagcagtgtccttttcttgaagttcaaattaacattcatatttgtatagctgacctctgcaaacatggcagacatgaggatttaatatgactttctctcaatttcagtttatgttcagttttgaattgcaagagaacagcctgtccctagttttcctaactagcctctttggcaacaagtgggaagatcagtactccatgttggttggtagtattttcaatctgaagcattttcagagtctaaggcaattcagactgcacagctgtcaactcaggagtcccattaaactgactctaaaaattcctaaaagaaggcatgatttattataagcaaatggctaacctggcttttttggtaatagaattttaaatgaaaataaaattatacaagatacacattgtttggatttttaaaaactctattaaatgtttaagtggttgtgaatatgaggaataattaaa

SEQ ID NO: 10764 - DNA, 337 bp, Homo sapiens
tgaatattgcttggttattcccatgtctctaagaccaactgacagcataggacattttaagaggagctataatcaacttaacataagccttttccctgtgtgttagttgtcatgtaagaattaaatattaaagaggcactatttcttagatctacatcacttcgttttttccctgggaaaacaaagacccagtcttttcagggatagtcaaggtgctaaaaggccaagatagacatcaggtgaaagggagtgaagtcaccctagttccactattatattctgatgtgagctgtgtggttcctcagatcaagaaagaaactagtttgctgagttctca

SEQ ID NO: 10765 - DNA, 129 bp, Homo sapiens
ccctctagtgaggtgttttgctttacatgctctctaggccataaatatttgtttggatttttgagtcagtgtgaggctaagagcttacccaaatcctgaattaatctgaaagccaggttaaaggaaact

SEQ ID NO: 10766 - DNA, 231 bp, Homo sapiens
tcggggtttacttctgacctgcatggggtgctgtggggaacccagagatcaataagacagcccgtaccttcttggagctgtatttagcagggtcatagaagacgcactcataatcagaaaccatccagaatgtgacttctggccagggagaatagggaagggttcatggagatggtggcatttgattgaattctgaattcggggttgtaggtttcaaatattagtttgggg

SEQ ID NO: 10767 - DNA, 151 bp, Homo sapiens
  misc_feature (1)...(151): n = a,t,c or g
ggatacttcgttatgtacatatcacattttgcttagccatgcattcattgatgaacattgtacacatcacatcttgtttagccattcattnnnnnnnnnnnnnnnnnnnnnnnnnnnnnnnnnnnnnnnnnnnnnnnnnnnnnnnngcagc

SEQ ID NO: 10768 - DNA, 389 bp, Homo sapiens
cctagatagtagccttactgattagagtgataaaaatagctatgcatgtttgaaaatcaagataagcttaaaaatcaagatatgcttcaataagtccatttattttacaatttaatgtaaatctagaatatctaactatttatacaaacttaactttaaaaatagccacttgctattttacatacaaaacattcaaaagaaaattcttcatttagagtgactgaggcttcacattccagcccagagaatggcagcgaggagggtggcggcgggaagcagaggccttgggtggtccgtgctggccccagtccctcagcccaccctctccagcactgggaatatatttatgcttatttttctttttcaaataaaacttctactaaaacatg

SEQ ID NO: 10769 - DNA, 1016 bp, Homo sapiens
ttttcatatccacaaatcatattttattagctgtgcaataccaccttccattcatggcctgtgttttaattaaatttcataaactaccagtacaaatcaatacaatgcattttttaacacaccaacagcttgaatgttcttgaagcttttaaacaatgagtttactgtgagcaaacagaagcaaggactcaaagagataattagctcatgcatctggtgctggctaataattttcacatgaatgaagaaaccactctatgttaactgtatttatttttaaaaaatagtttgaaatggtaataaaatgcaattttcagaagcatcttggtgatcgagtagaactgcttaatttaaaaaataattcagttacttccacctggcctggggtggataacatgtagcaaaaacttccatcccactagattctggcagatggattgatctttcacaatatatatatatatatttttttctcctggcttctggcttccataagaagaaatggagaagcaccctgttttgaaaagagattgtttgggttcacacggtatactttggtttatttaaacaggtaagaaagcggtccctacttctgaggagaaaatgtggtttctgacttttaggtacatcacgatatcaccagtctgaatgagtttccttttctgtaaagcagaaagtgtcattttcttttcctccagtgttcagttgctcctcttcgaaaatactcttcagagaaagtatctgtacgtctgtattagtacaaaccattccttccctatgtctcaatgcctgacattcagtgcctgacagaatcagcatttggcatgtccttggatatggcatcaatttgatgctttgaactgaaagttctcataatgcatctcaaagtatcttcttaaaaaatataaaaatgtaggccaacttgtgctctcttgtaaggcttgcaaagtggtaattaaataagcagactataactcacaagggaaaaaaagtgcatttttaaataaaagaaaaag

SEQ ID NO: 10770 - DNA, 773 bp, Homo sapiens
ttttttttttttttttttttgccaatctttgaagtggcttttatgtgtagcctgacacgtaagcagaattaaccagacaggtacaaaactcgaactttgtttaattaaaaaagtactttgctggttttacacttaataatgttattttctattttccccattatcttagacattaacttagtgtattcttttcctgcaaatccattttctttcggtgtaacatctagctgttgctgcaccatcatcgctgaggtaggcacatccttcactccctctcatgccaaacgatttggtaaatgtagctccatctacccattgtcctgttcgattttttgccatcttcagtccaatccagtgatcagaactgcatttataccgcctaagaaaattcatttcttctatgttgtcaattatagttaggtcggcatgttgagtggaacagttgtatttacttgaattccaatctccttcttctttagagaaataatagcatttgttttggaaaccaatccaatcataggggcataaactctgagaatctcgagttagtttaactatcagagtaataatattagttgttattaaaacaccaacaattataaaacactttttatgtttggtcatcataccgtgcttcttttaatcagcgttttgattttctgctagcagctttgtgtcatgtcttgcagaaactctcttcaaagttgtaactttatttaactttaatataaaaatgttactcttgtttttacagcacagctccaaacgtcgac

SEQ ID NO: 10771 - DNA, 60 bp, Homo sapiens
tgtgactgcccttcagcctgggtgatgggagcaaggccctgtcttgaaaaaaaaaaaaaa

SEQ ID NO: 10772 - DNA, 590 bp, Homo sapiens
ctttactctcaccagcaatgtcctatctgactcctgtacgggatgaggaagcagagtctttacggaaagcacgctccagacaagctcggcagacacgaaggtctactcaacctatctgtcatcgcctgaggtgcccagctcagccagacaaacccaccacgccagcatctccttctacgtcaagaccctcactctacaccagttcccacctgctatggacaaatagattttcagtccctgattctgagagttcagagactaccacaaacactacaactgcaaaggaaatggacaaaaatgagaatgaagaagcagatttggatgagcagtcctctaagaggctgtccatccgagagaggaggcggtccaaggaacgacgaagaggcacaggcatcaatttctggacaaaggatgaggatgaaactgatggctctgaagaggtcaaagaaacgtggcatgaaagactttctaggttggaatcgggaggtagtaatcctacaaccagtgattctttacgggtgaccgggcttcagcaaagagcccgtcgggaggccgggaggcccgcctagccaccctgaccagccgtgtgg

SEQ ID NO: 10773 - DNA, 411 bp, Homo sapiens
  misc_feature (1)...(411): n = a,t,c or g
actttaaatacttcactgtactctcttcttgcttgcatggtttcttaggggaagttggatataatttttatttttctctatacgtaaggtgtttccccccctccccagcttctttcaggaatgttctttatctttttattttctgtagtttgaaaatngaaatgcctacatgtaggttttgggggcatttatcctgtttggtattctctgagcttcctggatctgtggtttggtgtctgatattaattctgggaatttctcagtcacttgtttcaaatatttcttatattattttgtttcttctctttctggtgttcttattacacatgttacaccttttatttattttagagacagggtctcactcttacccaagccgttctcccacctcagcctcccaaataatcggga

SEQ ID NO: 10774 - DNA, 258 bp, Homo sapiens
aagaggaggggaaaagtattccccctcaataaggctgatgtcagaggcaatgttcgaccagtactactaaattctaatccatttaactgtgataatttctggtaaaatcatgagttttcatgacaatgtctatatccattatatgtgatctgttggaagttttggctagagaaacttaattgtgaggaaatttaaatattgtgtgatgcaagtacttactgaatttggaaaccccttgatagcattcccagcaagtgg

SEQ ID NO: 10775 - DNA, 730 bp, Homo sapiens
cgaggggttgggtggcggttgagacagcggcggtactgggatgggtaggtgaggatccgagactgagtgagcttctgcgcgcggtgcttttgggaacgcgggactggcaacctgcggcgccaggagctgggccgaggcgcggcggcgggctgccggctgccctgtgaatgggaagttacgcgaagtccacccagcgtttctgaggcaatctgaaggcaaatcctgtttagacccaggcgaaggttcccggtgacccgggctctcaccagccaattgtcccttgccgtcctcctgagggtgcctggagcttaagcactgtgtgctcttggcctccacactggggatgccgctgactcccactgtccagggcttccagtggattctccgaggccctgatgtagaaacttccccattgggtgcaccaagagcagcctcacatggtgtgggctgacatcaagagctgccagatccaacaggaagatggccaatctttcctaagctgctcaccttacaagaaaacgaatcgtactgctaagaattcaaacttcagcagtcatggggagccttggaaggagcccgaatcactgatggaattggacagtgcatggagatggttcagcaggacaaggtgctgaaaactcatccccgtgtgacctcaagtaagccatgtaactctgtgaacctgcagttttatcatttttaaaataaagaaacatgacagattttcatt

SEQ ID NO: 10776 - DNA, 477 bp, Homo sapiens
tgacacggaagtagctccgaacaggaagaggacgaaaaaaataaccgtccgcgacgccgagacaaaccggacccgcaaccaccatgaacagcaaaggtcaatatccaacacagccaacctaccctgtgcagcctcctgggaatccagtataccctcagaccttgcatcttcctcaggctccaccctataccgatgctccacctgcctactcagaggtgcttccagtttgccagatttgaactagctgggaatactcttagggtggtcctttagtccttagctaaatctgacttcacatatttactcttcacaaatgctaacatgaataatctaaaacactatataatttggcaatttttgtcggagttgaaagtgcattatttgatgattttgtgttatttggcacaggctaaggtgcagaagatgaatttgcgttctgtgagcccaacattagctatagcagaaagtgatccaggg

SEQ ID NO: 10777 - DNA, 602 bp, Homo sapiens
ttttttatgcttttagaattatttattcaaaaacactttataataaattcaggtaacagtaaagtaatacattcaatagtactaaaatctatagaaaatagataatttcattaaggtgcaattaaaatacttgaaattgggacacatctctatatttcaaaccaatatactggctttctttttaaaagactattctagtctttacgatgtccaaagtttttcctctttgcttttatttgctttagaccatatttaaatttttagcattcctaagtgcatacattttaggcatatactataatgaccaagagtttgtgaacctactgattaggtaaacactttggggaggtatgacctgcacaaagtagggtgggaaagctattatctcccttaatctggacacaactgttcaagcagtctataatttattagcttctctgatagcttcactatttggttttcattgaccttttgagcaactgactggcaaaccccagattcttttcgcctgaaatcttttcaagttaaatactgtccatattacacttgtacttataatttactatcttcttgccttggacaacttatttctccaaattctg

SEQ ID NO: 10778 - DNA, 293 bp, Homo sapiens
ctgaagcagaaccaaccaaagagagcacatgtagaagatggaggttcaagatctaaacaaggaaatgagcaaagtaagaagacaccaattgagaaatctgattttgctgctgctacacatcctcgtgctttttacctcagtaaaccagatgaaactccaaatgcttggatgtctgattcaggaacaggattgacttactggaaactagaggaaaaggatatgcaccactctttgcctgaaactttagagaagacgttcatatcattgtcttccacagatgtgtcaccaaacca

SEQ ID NO: 10779 - DNA, 321 bp, Homo sapiens
cgcatcatcaccattcctccttttctggcctatggagaggatggagatgggaaagacattcccggtcaggcatctctggtgtttgatgttgcattattggacctccataaccccaaggacagcatttccattgagaacaaggtagtacctgaaaactgtgagcggataagtcaaagtggggactttctcaggtatcattacaatggcacgcttctggatggcaccctctttgattccagctactctcggaaccgcacgtttgacacgtacattgggcagggctacgtgattcctggggattggatgaaggtctacttgggt

SEQ ID NO: 10780 - DNA, 238 bp, Homo sapiens
cccacagcctgtcttttctcgtgtcacactggaatgctgtacttcacatcttcttttttttaatgggaaagattccgaggatgtctcttctttctgagtatagatgactgtaggtaaaatacatacctataaagagcatcatgagatatattttcagcacatatgggaaatagatggataaagtcaaagggcagcttggtggaataagtgccaaatgattcaaaataaggcagcgatt

SEQ ID NO: 10781 - DNA, 97 bp, Homo sapiens
ctctattctcctgcaatgccgggccccggtttcttctactcttgggtgctctcccaaacacaggacctgtgaaatttcagcttgcctgggccttgga

SEQ ID NO: 10782 - DNA, 427 bp, Homo sapiens
cattttcagccaaacactgaatttctcctaaactttatccctgaaacatccctagagaacgaactttattttcacaagaaaataaggcacaataagggggaagaacttaaacctcaacataatatcgtgtccaaaaatgtgtatttagaaaaataaaatcctgtggagtttgttatcctaatgtttattttatactagataaggtgacttgttttcttgtattgaggtcttactgtttcagatttgtttttgtttctgttctaactctaagcagacagagctcacaagtctttggcatccattttaggttgtacactcagagtcatcttataactggaaactgtcaggtggtcccccaccccagtgagtgtatgaaagagtcaagaaaaagattggaaacaaactattgggtgaataattggttgct

SEQ ID NO: 10783 - DNA, 349 bp, Homo sapiens
ttttttctctgtgacaaactttattaaattttgcatcagtacagggcatctcttattgcatactagaatcccaggattcaggcgggtggtaaagtggcaacggcgaatttgggtatctggtctcccaaaagtacttgccgctctacccctgactctgcaatggctgccaggcggatcactcctccactggagccatcccgctccatggccaaagcgagagcattggcagtgaattgcagacactcttccttggtcatgccttcccggtaggtagcatcaacatagccatagatgtaggagctcccggagcctccaatggcaaaggactgccttaccatcatacccccca

SEQ ID NO: 10784 - DNA, 689 bp, Homo sapiens
aaattgatttcctgtcattttgaatcatttatcacctgcgatgcatgattctattaattttgttatgttactgttttaaccaaagctgaccgtaaggataaaacacttaagttgttgctgagtactatatatcctcaatatgcatgtctgcccatcacatcaaatgttctgtcaacaagatgtttggtaatttttttttaaaaaggttggaaaattaattatagaaggttctatactgtttttttaattaagaaactaaatctagcaggctaaaggttaattgtagtgattttttttcacatagatatctttctatgacctagttagttactgcaattcagaattagttcacattgcataaagaattacttgttgtaagcaaaatgctgaaactaccaaaccagtggatgaagaccactaagaactttgcacataatcatacaatcttttgaaaatattttgcaaatatgtgtttagacaataagatggactagagttcgacaaaatgatttctttatttaaattttgtataagtattttcttcgacactttcaaattatattgtgttcttgatatatgctgtatatttatttgttagtgcatgtgtttttaatttacatgaaaacatgagttaggagaaattacaggttgaaagatgaaatgcctgtatgtgctctgaagaaatggta

SEQ ID NO: 10785 - DNA, 559 bp, Homo sapiens
ggggggttgctattattgttattgtttctagatgaatgtgagaagccaaattattcagtgtcttaaagaccatattaaaaactcctgccagggggagggcacatgcgcgtgatcccaactacttgggagggtgaggcgagagggatcgcctgagtcgcagaaatgctgggctatagggcactaggtcaattgggtatgtgcactaagttcggcataaacgtgcagggcaccagaaggttgcctaaggagaggtgaagcagagccaggctggaaacagagcaagtcaaaactcctgtcctgatgagtagtgggactgcacctgtgcataaccactgtactccagcttgggcatcataacaagaccataactctttaaaaaaaacatttttttaactgcatccattgaaatacagaaaaaaaataaaaattaagtgaaaacaatttaaaaatactctgaattttatcttaagtgcaattagaatccactgaaagattttagggagggagtatcactattccacttacaaatttatattttaaatcactttggctactatgg

SEQ ID NO: 10786 - DNA, 693 bp, Homo sapiens
tttttgttttgcttttgttttttcgcaactctttacatacaaacagctatggtctcccaggaaggaacttcctctgttgagtacagaagtctgggaaaagactggtgaaattgcatgcgaggaagaaacaggtctaactaaatgtgaatctatacttttaaagcaagggaccacaaagggtaggtcccaaggaagttgcattgcttgctgcacttgtcacacgggctgtactttcttctctcatttatttccatttacagcgttgaaaactgaggccttaggctttggttgaaaaccgaggccaagggtgaccagccagtgagttaaggaggccccagccgaactttgctggaagtgctccagcataaagcctctctccagaaccagccgccactgagacgtcttgaagtcaaagtaactcacacccttgtccacctcgccctgcggtgaagaaacttcgggtcgcacaggctccagaactcatcttggcgtgggctgtgacttactgggggatgggcctccttttcgttctagctcctaaatggagcggagcgccaggtggtgtcagatggggcggcggcccctccaatggtggcaccctcagccacggataaggttccaattaggtaaggacgcaagtaatgctgtcgtttcggctgactgctcctttcattccttggaggtggtcggtgt

SEQ ID NO: 10787 - DNA, 314 bp, Homo sapiens
cagcatcacacccagttcattttttttttttttttgtatactcactatgttgcccagtttttgtttgctttttagctgtgttaacacggtctgcagtgaaacgcaccctcctagctccttccagcacataccggcaaacacatatctgccctgttttgtacacacgaggacagctcacctcatgccctgttctgctcctgatttttatcctcacctccgtatagagaggctcacccgatatcagtcagcatgaagcagcctgaaacccttttttcggctgtgcagggctcagctgaggagattgagtaggttat

SEQ ID NO: 10788 - DNA, 320 bp, Homo sapiens
tgcatcccccggtgctgcaggaggcttctcacatgctttgggatatcttcagggaaatacgctcttaatagaaactgagaatttaagaaagtctgcctgggcggaggacacctgcacttgttaccctgagttgattcctggaaacttcgggacccctgggtatttaacagagggacttcagtggggagctcctggtcagaggacttggatgttgtcattacattctaagtgagactgtccacatcatctaggaaaatggtggccctgtccttaaagatttgtgtgcgccactgcaacgtggtgaagaccatgcagtttga

SEQ ID NO: 10789 - DNA, 295 bp, Homo sapiens
caaatcttctaaattggtatctgcattttaaagagatccccaggcactttgtatgctccttacagtgcaaaaagcaatagtctgaagggtacacgtatggtgatctcttgagtttcttaggtgttctagcaagataagggatccccctcaaggttttataatgactaaagttttagtgagagcagaaagcaccttgagacatctgtcaacttaagattttagacccagaagcttttagaactgaaagtggggacagtgtcttcttaacaatatgtataaattatattgaatcttt

SEQ ID NO: 10790 - DNA, 766 bp, Homo sapiens
tcacagcaccgggcagttttatgtactgacttcctttaagcgttatctaataaaaagtgtgttatctaataaaagttccacacagtatttaaccgtcttaattcatctagggtagcaggggatataacagaactgctgggttccacaggaggttgaggggccaggatccccaacactagatatcttccttagcggggagaaagctggaaattacaagatgactcaacggagaaatgggcttcagtgggtaactttcagaaaattataaacccatatcagtgcacatagcgagggaaaggggagtttacttgaggtttgggttactgtgagcagactacttggggtgactagtattggcatcagaaccagaaatccaggcgctcagggcagccctgcaggtggggtgggtctccaggctgctccatactcagcgcctgtgttcctctccattcttcgggatccatcagacatactccattgagtacccccatcccacccccttttcagcttcacaggtttcacagaaatttctcaccacctgtttaaaaataaaaataattcagcctcttgacatagcttcttctaggtaaacggtcttcttttttttttttgtttccttctgctcataaaagaagggtatttccttgtctggtttttagacagaacactagcagtctgcagagtgtcaaagatgttctcctgggggattacactggcgctacagggtggcaggatcgtggagtcagcattagttggtgtccatgct

SEQ ID NO: 10791 - DNA, 6485 bp, Homo sapiens
ggtattaaaactgatcttttgacatttttgacaatgttcttataaattactttcttttttatcatatatggatgggatgaagcacagagtaagatagagtgcacagcaaaggggatctgcccctcctatctgtccaataccccacaggttttggtgataatcttgggcaatgttccagtcaaacctgcctcccacttctcactaaagttagtgaacatgtgacccacattccccaaataagagcctcttataaactccattcttggctttttcattcatagagatagctattttatgagacatagataaagcattttttagtgatgtgcacgatgccttttttcttaattattaacttctcaaaacataaacacattggaggcacttaataaagggagctgtacgtaccgccgtccgcgcctccaaggtttcacggcttcctcagcagagactcgggctcgtccgccatgtccgccgcagacgaggttgacgggctgggcgtggcccggccgcactatggctctgtcctggataatgaaagacttactgcagaggagatggatgaaaggagacgtcagaacgtggcttatgagtacctttgtcatttggaagaagcgaagaggtggatggaagcatgcctaggggaagatctgcctcccaccacagaactggaggaggggcttaggaatggggtctaccttgccaaactggggaacttcttctctcccaaagtagtgtccctgaaaaaaatctatgatcgagaacagaccagatacaaggcgactggcctccactttagacacactgataatgtgattcagtggttgaatgccatggatgagattggattgcctaagattttttacccagaaactacagatatctatgatcgaaagaacatgccaagatgtatctactgtatccatgcactcagtttgtacctgttcaagctaggcctggcccctcagattcaagacctatatggaaaggttgacttcacagaagaagaaatcaacaacatgaagactgagttggagaagtatggcatccagatgcctgcctttagcaagattgggggcatcttggctaatgaactgtcagtggatgaagccgcattacatgctgctgttattgctattaatgaagctattgaccgtagaattccagccgacacatttgcagctttgaaaaatccgaatgccatgcttgtaaatcttgaagagcccttggcatccacttaccaggatatactttaccaggctaagcaggacaaaatgacaaatgctaaaaacaggacagaaaactcagagagagaaagagatgtttatgaggagctgctcacgcaagctgaaattcaaggcaatataaacaaagtcaatacattttctgcattagcaaatatcgacctggctttagaacaaggagatgcactggccttgttcagggctctgcagtcaccagccctggggcttcgaggactgcagcaacagaatagcgactggtacttgaagcagctcctgagtgataaacagcagaagagacagagtggtcagactgaccccctgcagaaggaggagctgcagtctggagtggatgctgcaaacagtgctgcccagcaatatcagagaagattggcagcagtagcactgattaatgctgcaatccagaagggtgttgctgagaagactgttttggaactgatgaatcccgaagcccagctgccccaggtgtatccatttgccgccgatctctatcagaaggagctggctaccctgcagcgacaaagtcctgaacataatctcacccacccagagctctctgtcgcagtggagatgttgtcatcggtggccctgatcaacagggcattggaatcaggagatgtgaatacagtgtggaagcaattgagcagttcagttactggtcttaccaatattgaggaagaaaactgtcagaggtatctcgatgagttgatgaaactgaaggctcaggcacatgcagagaataatgaattcattacatggaatgatatccaagcttgcgtggaccatgtgaacctggtggtgcaagaggaacatgagaggattttagccattggtttaattaatgaagccctggatgaaggtgatgcccaaaagactctgcaggccctacagattcctgcagctaaacttgagggagtccttgcagaagtggcccagcattaccaagacacgctgattagagcgaagagagagaaagcccaggaaatccaggatgagtcagctgtgttatggttggatgaaattcaaggtggaatctggcagtccaacaaagacacccaagaagcacagaagtttgccttaggaatctttgccattaatgaggcagtagaaagtggtgatgttggcaaaacactgagtgcccttcgctcccctgatgttggcttgtatggagtcatccctgagtgtggtgaaacttaccacagtgatcttgctgaagccaagaagaaaaaactggcagtaggagataataacagcaagtgggtgaagcactgggtaaaaggtggatattattattaccacaatctggagacccaggaaggaggatgggatgaacctccaaattttgtgcaaaattctatgcagctttctcgggaggagatccagagttctatctctggggtgactgccgcatataaccgagaacagctgtggctggccaatgaaggcctgatcaccaggctgcaggctcgctgccgtggatacttagttcgacaggaattccgatccaggatgaatttcctgaagaaacaaatccctgccatcacctgcattcagtcacagtggagaggatacaagcagaagaaggcatatcaagatcggttagcttacctgcgctcccacaaagatgaagttgtaaagattcagtccctggcaaggatgcaccaagctcgaaagcgctatcgagatcgcctgcagtacttccgggaccatataaatgacattatcaaaatccaggcttttattcgggcaaacaaagctcgggatgactacaagactctcatcaatgctgaggatcctcctatggttgtggtccgaaaatttgtccacctgctggaccaaagtgaccaggattttcaggaggagcttgaccttatgaagatgcgggaagaggttatcaccctcattcgttctaaccagcagctggagaatgacctcaatctcatggatatcaaaattggactgctagtgaaaaataagattacgttgcaggatgtggtttcccacagtaaaaaacttaccaaaaaaaataaggaacagttgtctgatatgatgatgataaataaacagaagggaggtctcaaggctttgagcaaggagaagagagagaagttggaagcttaccagcacctgttttatttattgcaaaccaatcccacctatctggccaagctcatttttcagatgccccagaacaagtccaccaagttcatggactctgtaatcttcacactctacaactacgcgtccaaccagcgagaggagtacctgctcctgcggctctttaagacagcactccaagaggaaatcaagtcgaaggtagatcagattcaagagattgtgacaggaaatcctacggttattaaaatggttgtaagtttcaaccgtggtgcccgtggccagaatgccctgagacagatcttggccccagtcgtgaaggaaattatggatgacaaatctctcaacatcaaaactgaccctgtggatatttacaaatcttgggttaatcagatggagtctcagacaggagaggcaagcaaactgccctatgatgtgacccctgagcaggcgctagctcatgaagaagtgaagacacggctagacagctccatcaggaacatgcgggctgtgacagacaagtttctctcagccattgtcagctctgtggacaaaatcccttatgggatgcgcttcattgccaaagtgctgaaggactcgttgcatgagaagttccctgatgctggtgaggatgagctgctgaagattattggtaacttgctttattatcgatacatgaatccagccattgttgctcctgatgcctttgacatcattgacctgtcagcaggaggccagcttaccacagaccaacgccgaaatctgggctccattgcaaaaatgcttcagcatgctgcttccaataagatgtttctgggagataatgcccacttaagcatcattaatgaatatctttcccagtcctaccagaaattcagacggtttttccaaactgcttgtgatgtcccagagcttcaggataaatttaatgtggatgagtactctgatttagtaaccctcaccaaaccagtaatctacatttccattggtgaaatcatcaacacccacactctcctgttggatcaccaggatgccattgctccggagcacaatgatccaatccacgaactgctggacgacctcggcgaggtgcccaccatcgagtccctgataggggaaagctctggcaatttaaatgacccaaataaggaggcactggctaagacggaagtgtctctcaccctgaccaacaagttcgacgtgcctggagatgagaatgcagaaatggatgctcgaaccatcttactgaatacaaaacgtttaattgtggatgtcatccggttccagccaggagagaccttgactgaaatcctagaaacaccagccaccagtgaacaggaagcagaacatcagagagccatgcagagacgtgctatccgtgatgccaaaacacctgacaagatgaaaaagtcaaaatctgtaaaggaagacagcaacctcactcttcaagagaagaaagagaagatccagacaggtttaaagaagctaacagagcttggaaccgtggacccaaagaacaaataccaggaactgatcaacgacattgccagggatattcggaatcagcggaggtaccgacagaggagaaaggccgaactagtgaaactgcaacagacatacgctgctctgaactctaaggccaccttttatggggagcaggtggattactataaaagctatatcaaaacctgcttggataacttagccagcaagggcaaagtctccaaaaagcctagggaaatgaaaggaaagaaaagcaaaaagatttctctgaaatatacagcagcaagactacatgaaaaaggagttcttctggaaattgaggacctgcaagtgaatcagtttaaaaatgttatatttgaaatcagtccaacagaagaagttggagacttcgaagtgaaagccaaattcatgggagttcaaatggagacttttatgttacattatcaggacctgctgcagctacagtatgaaggagttgcagtcatgaaattatttgatagagctaaagtaaatgtcaacctcctgatcttccttctcaacaaaaagttctacgggaagtaattgatcgtttgctgccagcccagaaggatgaaggaaagaagcacctcacagctcctttctaggtccttctttcctcattggaagcaaagacctagccaacaacagcacctcaatctgatacactcccgatgccacatttttaactcctctcgctctgatgggacatttgttacccttttttcatagtgaaattgtgtttcaggcttagtctgacctttctggtttcttcattttcttccattacttaggaaagagtggaaactccactaaaatttctctgtgttgttacagtcttagaggttgcagtactatattgtaagctttggtgtttgtttaattagcaatagggatggtaggattcaaatgtgtgtcatttagaagtggaagctattagcaccaatgacataaatacatacaagacacagaactaaaatgtcatgttattaacagttattaggttgtcatttaaaaataaagttcctttatatttctgtcccatcaggaaaactgaaggatatggggaatcattggttatcttccattgtgtttttctttatggacaggagctaatggaagtgacagtcatgttcaaaggaagcatttctagaaaaaaggagataatgtttttaaatttcattatcaaacttgggcaattctgtttgtgtaactccccgactagtggatggggagagtccccattgctaaaattcagctactcagataaattcagaatgggtcaagggcacctgcctgtttttgttggtgcacagagattgacttgattcagagagacaattcactccatccctatggcagaggaatgggttagccctaatgtagaatgtcattgtttttaaaactgttttatatcttaagagtgccttattaaagtatagatgtatgtcttaaaatgtgggtgataggaattttaaagatttatataatgcatcaaaagccttagaataaggaaaagctttttttaaattgctttatctgtatatcctggactcttggaaactttataggcctaaaacactaggggtt

SEQ ID NO: 10792 - DNA, 303 bp, Homo sapiens
caaacttctgctagagaagtccttcaccctgtggagttttccccctgctcctctggccactctcctgatggatccctgtggtgccaggcaagaatgggctgcttagggatccagcaagctcccagtgcctttctgctacttcctctacccttgtatttcgctcggctgagctctctaacttgactcagctccaggtaaactcgggaacttctgcaaacacatcttcagtttctccagtgggtgtgtgtgttcgggagaggagggtctccctttcccacttccgcgtttggggcactcacagta

SEQ ID NO: 10793 - DNA, 314 bp, Homo sapiens
caggttttactgattttattttctcattaaagacaaacttctgttttaaggaacttgggaaagttgatatgaatttctaatttaatgtattaggtcattaaaataatttttgagttcccttagacacatacaggcttttcatttttttcaaaagtaccctccttaaagtctgtaacagttaacatttttgagtacctttgcccaggtacgttgcaggcaggggtggagtgggggcatgcattggtcgagtcacatatcattactgtatttagtttggggagtatacagaaacttaaggtttttttgtttttgtt

SEQ ID NO: 10794 - DNA, 298 bp, Homo sapiens
tttaagaaaaaaaatctaccaccccattcaggacacccctccccaacacatattgggggaaacggggcacggcacgcgttgggttcaggaaaaaaaccgggaacggaaaaagaggctggtttggtcctcagcttcctggtcaggtttccccgcggcctccgctgccgccatccaccgctgggtgccgtctgcattccctcgccgcgccacggtgcttctctgttgccggctcacatcaaccgaggttccagatgggtgcaaggagatgtgggtgggaaggagtagggtatcggggatt

SEQ ID NO: 10795 - DNA, 545 bp, Homo sapiens
cttttgcacttacaaagcagttggggcatttattgacatttaaacaagggaggagatcctgaacactagtctcgctcagtttataaaaacttgaggccaaactctccatcatctgtacacagcttaaccacggccaggagcaagaattcgagttaaacgaattgaaccagtccaaccacaagacgataaagggaaacagggcgtggggatttccagtttttccttttacattacaaagtttccaacacaagaagccaacaataccccagtgctgcaccaagttacttcccactgtttcccaaggcacagtcaattaataatcagtagtccaagttctaagaacatttcctggaaaacaaggacgcacctcccgtggctctatgcatggcctgccactgatgaatcaaattcttaagaacctacgaccgtctgatacccttgaggagagcaccctcatagaatctccagcatcaggcctcagttttcccatctgtaaaagacagccatgcaaagtgggagatccgctaggcttccagatcgaagtc

SEQ ID NO: 10796 - DNA, 2615 bp, Homo sapiens
tgcttgggcagagttggagtttatttgctgcagttccttggcgctagtttacaaggcaaaaacaaacaaacaaaaacaattagaataattatttcttaaaaaccctgtcaacaactttcagtcatttctttatatttttgtattttgacaaaacttcttttaaacaaatacaaaataatctaaaaggagaaaaactatacatagattatttacacctctgataaatagactaatactgacccaggtgcctctctgtctaggaaacacttgagaaccaggccagggcccgggccagctggacaggctccagcaccggcccaaacacgcccagacctcggcaggcaccacctggttctcccacccagaaagttcaggtttccagcctggaccctcttctggtcaccctcacaagctctgggcacaaaagtgcctaaagccattccctccaggtaggatctacacaaagtggcggggagggaggtgacagactgtccccctctattcctcccaccactcctctgcaaaagctatttccagagatgctcgccaaccctaaaggatcagaggagccgtggcgacgcggccctgtgaaaacccgcagctcctccacctgcctcctcggggctgcgccctgcaccgccctggtccagggtcctgtggaggggcggggcgagacggccagacagccagccacctgctctgcctggactggcatgctggccctggcggagtggcaggagctgccctgagagtccctgagagaacggcaggaaaatgctgcgtgtcacggctcccttcatactgtaatgaggaggggcagggccagctcacacagcgcctgcaggggaagacagagatgcgagaggcagcccggccacccccctcactccagtgcaccccacggagcagataaaggcccatcttcccctctagggggcccaccacaaaatgcatccagagtagtccagttagggctggttttgaggcagaaaaagctgaagcctacggggatcggggaagtcctactccttcctctagaacgaggactggagtctggggaagaggaagaaaacccaaaatgaaacaggttatccggaacctctgtcccgataaccttcctcacagttttggttattaggtatttagctcaaggaaaatgctgactttctactttaaagcccaacaagaacttggattctgaaggaggaaaataacgtaagcgtccagtcagctctctcctctcctcgggctccgcaggcacttgggatggaaaagcatccgcgggagatgccggactgcacgctgctgccgactgcgaccccggccaggcaggcccccgactctgactgtgccgtctgaggctccactgggcctctgccctctgcgtcctcgacctcacctgtccatctcgccaagacaagcaccaggcagcgagctcccacagcacaggagaggcaggccaggccctgccgcgggcccaggctgatgccccttggccgcagccccaggtgctcttctccagggagaagctccccagcgcagccagggcagaatgcacctgaacagccctacgttctctcttaaaaaaaaaaaatagatctttatagtatgtggcttctcttcctttccacctttttctcttaacatataataatatatggacacatgtatttatggtgcagggtttgaaggcttcttcacggggacaaccaagaggtaaacagttggctctgagctctgctaccagaacactgagcagagaaactggccaggaggctgccctgccgacaagagctctgccctgtgagagaggaaggctctggagcccatgctggacaggtggccggtcctctcttccccagtgataactgcccacccttctcccacttaaaaaaaatagcaaaagcctgaagctagtctctaggaatccagggcggggcctggcagaggacgctctgctcggcagcagtgcatccatggaggtgcgggagaagagcaggagctccaaggcccccgcagaccaacgcccttggctgcacgctcagtgtcgcttcgtggaggagaccttctttttccgtgctgcgagcatttcgtagaaagggtccctgctgatggctgctttaatgcacttaatccactcctccttctcctcgggcgtcggagctgagatccggtaaacagtgtggttcccctccaccacccgcccgtcagcctcggtcttgcaggccttgataacttggtctttattgtcggggatataaagctcaaagcagtttggttttttggagtcctccacttcccggatactcagattctctaaagggatgattccacggggctccttatccgtggtatactcaaagtagtaaaggcagttgtcagtcagaatgaaccagcgtctcttccaagtctttaccctgccacctccgagtttcaatagccagccttctcggtctggattgaagaaagtgtgagtgaggtcattcccgtcgtcttctgggattttaaagggttcattttttatgctctcatagagattccggaggagctcctccggcaggtctcccccatcattgatgcctcggttcatggcaatgaaccttctccacagtggg

SEQ ID NO: 10797 - DNA, 2148 bp, Homo sapiens
gcgaccgcctccagctcccggcgcggcccggcccggcccggctcggcgcctcagacgccgcctgccctgcagccatgaggcccccgcagtgtctgctgcacacgccttccctggcttccccactccttctcctcctcctctggctcctgggtggaggagtgggggctgagggccgggaggatgcagagctgctggtgacggtgcgtgggggccggctgcggggcattcgcctgaagacccccgggggccctgtctctgctttcctgggcatcccctttgcggagccacccatgggaccccgtcgctttctgccaccggagcccaagcagccttggtcaggggtggtagacgctacaaccttccagagtgtctgctaccaatatgtggacaccctatacccaggttttgagggcaccgagatgtggaaccccaaccgtgagctgagcgaggactgcctgtacctcaacgtgtggacaccatacccccggcctacatcccccacccctgtcctcgtctggatctatgggggtggcttctacagtggggcctcctccttggacgtgtacgatggccgcttcttggtacaggccgagaggactgtgctggtgtccatgaactaccggaatgggagcctttggcttcctggccctgccggggagccgagaggccccgggcaatgtgggtctcctggatcagaggctggccctgcagtgggtgcaagagaacgtggcagcctttcgggggtgacccgacatcagtgacgctgtttggggagagcgcgggagccgcctcggtgggcatgcacctgctgtccccgcccagccggggcctgttccacagggccgtgctgcagagcggtgcccccaatggaccctggggccacggtgggcatgggagaggcccgtcgcagggccacgcagctggcccaccttgtgggctgtcctccaggcggcactggtgggaatgacacagagctggtagcctgccttcggacacgaccagcgcaggtcctggtgaaccacgaatggcacgtgctgcctcaagaaagcgtcttccggttctccttcgtgcctgtggtagatggagacttcctcagtgacaccccagaggccctcatcaacgcgggagacttccacggcctgcaggtgctggtgggtgtggtgaaggatgagggctcgtattttctggtttacggggccccaggcttcagcaaagacaacgagtctctcatcagccggggccaatttcctggccggggtgcgggtcggggttccccagggtaagtgacctggcagccgaggctgtggtcctgcattacacagactggctgcatcccgaggacccggcacgccctgagggaggccctgagcgatgtggtgggcgacccacaatgtcgtgtgccccgtggcccagctgggctgggcgactggctgcccagggtgcccgggtctacgcctacgtctttgaacaccgtgcttccacgctctcctggcccctgtggatgggggtgccccacggctacgagatcgagttcatctttgggatccccctgggacccctctcgaaactacacggcagaggagaaaatcttcgcccagcgactgatgcgatactgggccaactttgcccggcacaggggatcccaatgagccccgagaccccaaggccccacaatggcccccgtacacggcgggggctcagcagtacgttagtctggacctgcggccgctggaggtgcggcgggggctgcgcgcccaggcctgcgccttctggaaccgcttcctccccaaattgctcagcgccaccgacacgctcgacgaggcggagcgccagtggaaggccgagttccaccgctggagctcctacatggtgcactggaagaaccagttcgaccactacagcaagcaggatcgctgctcagacctgtgaccccggcgggacccccatgtcctccgctccgcccggccccctagctgtatatactatttatttcagggctgggctataacacagacgagccccagactctgcccatccccaccccaccccgacgtcccccggggctcccggtcctctggcatgtcttcaggctgagctcctccccgcgtgccttcgcccctctgggctgcaaataaactgttacaggcc

SEQ ID NO: 10798 - DNA, 364 bp, Homo sapiens
  misc_feature (1)...(364): n = a,t,c or g
tgcccagtaagttgagatgtcacaaaaacagagccagaaaaagaatctataccatctgctacagccaggaccagctacctaatttacaagtctcagcacaaaatgaaaatgtgggcctcnnnnnnnnnnnnnnnnnnnnnnnnnnnnnnnnnnnnnnnnnnnnnnnnnnnnnnnnnnnnnnnnnnnnnnnnnnnnnnnnnnnnnnnnnnnnnnnnnnnnnnnnnnnnnnnnnnnnnnnnnnnnnnnnnnnnnnnnnnnnagggtgagtgcagaccctcacaggcacagggagggtgaggagtaggaggtgggctgantgtgactnatatccatgcacagttcaccagctccaggagtcttcctc

SEQ ID NO: 10799 - DNA, 2816 bp, Homo sapiens
cgctcccacccgcccgtggcccgcgcccatggccgcgcgcgctccacacaactcaccggagtccgcgccctgcgccgccgaccagttcgcagctccgcgccacggcagccagtctcacctggcggcaccgcccgcccaccgccccggccacagcccctgcgcccacggcagcaatcgaggcgaccgcgacagtggtgggggacgctgctgagtggaagagagcgcagcccggccaccggacctacttactcgccttgctgattgtctatttttgcgtttacaacttttctaagaacttttgtatacaaaggaactttttaaaaaagacgcttccaagttatatttaatccaaagaagaaggatctcggccaatttggggttttgggttttggcttcgttttttctcttcgttgactttggggttcaggtgccccagctgcttcgggctgccgaggaccttctgggcccccacattaatgaggcagccacctggcgagtctgacatggctgtcagcgacgcgctgctcccatctttctccacgttcgcgtctggcccggcgggaagggagaagacactgcgtcaagcaggtgccccgaataaccgctggcgggaggagctctcccacatgaagcgacttcccccagtgcttcccggccgcccctatgacctggcggcggcgaccgtggccacagacctggagagcggcggagccggtgcggcttgcggcggtagcaacctggcgcccctacctcggagagagaccgaggagttcaacgatctcctggacctggactttattctctccaattcgctgacccatcctccggagtcagtggccgccaccgtgtcctcgtcagcgtcagcctcctcttcgtcgtcgccgtcgagcagcggccctgccagcgcgccctccacctgcagcttcacctatccgatccgggccgggaacgacccgggcgtggcgccgggcggcacgggcggaggcctcctctatggcagggagtccgctccccctccgacggctcccttcaacctggcggacatcaacgacgtgagcccctcgggcggcttcgtggccgagctcctgcggccagaattggacccggtgtacattccgccgcagcagccgcagccgccaggtggcgggctgatgggcaagttcgtgctgaaggcgtcgctgagcgcccctggcagcgagtacggcagcccgtcggtcatcagcgtcagcaaaggcagccctgacggcagccacccggtggtggtggcgccctacaacggcgggccgccgcgcacgtgccccaagatcaagcaggaggcggtctcttcgtgcacccacttgggcgctggaccccctctcagcaatggccaccggccggctgcacacaacttccccctggggcggcagctccccagcaggagtaccccgaccctgggttttgaggaagtgctgagcagcagggaatgtcaccctgccctgccgcttcctcccggcttccatccccacccggggcccaattacccatccttcctgcccgatcagatgcagccgcaagtcccgccgctccattaccaagagctcatgccacccggttcctgcatggccagaggagcccaagccaaagaggggaagacgatcgtggccccggaaaaggaccgccacccacacttgtgattacgcgggctgcggcaaaacctacacaaagagttcccatctcaaggcacacctgcgaacccacacaggtgagaaaccttaccactgtgactgggacggctgtggatggaaattcgcccgctcagatgaactgaccaggcactaccgtaaacacacggggcaccgcccgttccagtgccaaaaatgcgaccgagcattttccaggtcggaccacctcgccttacacatgaagaggcatttttaaatcccagacagtggatatgacccacactgccagaagagaattcagtattttttacttttcacactgtcttcccgatgagggaaggagcccagccagaaagcactacaatcatggtcaagttcccaactgagtcatcttgtgagtggataatcaggaaaaatgaggaatccaaaagacaaaaatcaaagaacagatggggtctgtgactggatcttctatcattccaattctaaatccgacttgaatattcctggacttacaaaatgccaagggggtgactggaagttgtggatatcagggtataaattatatccgtgagttgggggagggaagaccagaattcccttgaattgtgtattgatgcaatataagcataaaagatcaccttgtattctctttaccttctaaaagccattattatgatgttagaagaagaggaagaaattcaggtacagaaaacatgtttaaatagcctaaatgatggtgcttggtgagtcttggttctaaaggtaccaaacaaggaagccaaagttttcaaactgctgcatactttgacaaggaaaatctatatttgtcttccgatcaacatttatgacctaagtcaggtaatatacctggtttacttctttagcatttttatgcagacagtctgttatgcactgtggtttcagatgtgcaataatttgtacaatggtttattcccaagtatgccttaagcagaacaaatgtgtttttctatatagttccttgccttaataaatatgtaatataaatttaagcaaacgtctattttgtatatttgtaaactacaaagtaaaatgaacattttgtggagtttgtattttgcatactcaaggtgagaattaagttttaaataaacctataatattttatctgaa

SEQ ID NO: 10800 - DNA, 372 bp, Homo sapiens
agcctgacttatcctttgaaaggcctgattataaggtttgtcctcagctgttgcatctgggaacttagatatcagaaggtatcttagtctgttctgctgtcataacagaattacacaaactaacgtattttataatgaacagaagtttatttggttgacaggtgtggaggctaggcagtccaagaacatggtgccagcatctagtgagggtcttggccatggcagaaggcaccacatggcaagtgagcatgagaaagatatatggggtctaaacttagcctttgatcatgagcccactcccaagataggcagcactaatttcatttaatgagggcaaagccctccttacctaattactttttaaaggtctca

SEQ ID NO: 10801 - DNA, 92 bp, Homo sapiens
tgggggcctgtaattgaggctaattcaatagcaacaatagacaacatgatatggctgctgtcactttgaaacccaaaaggtctttgggtagg

SEQ ID NO: 10802 - DNA, 1018 bp, Homo sapiens
tttttttttttttttttttgaatgataagacttttaatttggtagacttaataggcaaagtccctatgagtaggcaaatctgcatgttgagttttattccaggttcagttttaggttcactgtctctctctttgatgaacactgcacaaagttatttgtattacagctccttaaagaaagagtacaaattgtttacgactagttttttcatatacacgaaaaagcacaattataatttctgtcccactcagaaattaatggcaaacccatagtaacctaataaagctattttaacatgtgctaaataattcttttatctatactgttgtattgatcaaattatttatatgctctttaaaaatcttttatgaattgaaagctataactctctctcttgaagtctgtctgcatcacataagtattgatcagtcttggatgattcattcatagccgactgtcttcgttgagtggtcttcacaaatctcagcagattgatgatggcggcaggtgttactccgggtatgcgactagcagccccgatcgtctgtggacgactaaaatgtagtttctctcgaacttcatgggacaaagacacatccctgatagtcaaataatctaggtcttttggcagttggagagcttcatcttgctgaactccctttatttcttgtagttgatggaacaacactgattcataagtggcttctattttcagtctttcagccagctctctacatttagtatacttcttcaagggctctggaacagccttggctaatgaatccatgtcaacttcctcatacttcagaacatcgagagctctgacaggcagacttctactagtacttatagaagcctctgggattaattttttccatttagagctcaaaaactcaatagatttcaacacagaaatgccttcttctaaagaagacttcatccaacaagctctttcatatcgttgttgggacacacagccagcgtctttataccctcgcagtgtgaagctcgctgtcag

SEQ ID NO: 10803 - DNA, 390 bp, Homo sapiens
aaagttctgaagtagaacctgcgcctcctctctgcttctccctcctcctcagtaatttatttcgagcttccaggcaagggccacggaagaagggaaagcaagaaactagatgcctgtgtggtaactcctcgcggacgtaaggtggactctcttgcagccaacttcccatcagatcaccctgctggacttgcagaccggaatggggctcgcctaaggagccgagcgctgcggaggctgctgcgtgttggatgggagtgggagggggctggagcgagatttccagggcgcagtcctccggggcgttacgctgggcataatggaattgcagaggacgtctagtatctccgggccgctgtcgccggcgtacacggggcaggtgcttacaactac

SEQ ID NO: 10804 - DNA, 428 bp, Homo sapiens
tttttttttcatcatcagggtatggtttccggtcaattacattcatgtttgataaagctactctgtctttaggaacaaccaatgagatatcaaaagttgctttgatagcaggctcatcccagcaaggaaaagcccttcgcgagtcagtagccttaagaaaagaatatgaaatataaataccttagaattaacctaacaagttatttcataaagcagtcgccatttccctctgtcattcattcattcccttgttcaaatatttactttctcttcagtgccaggcaacaagctaggcattaactagaaagaaaagacaacacttgctaccactgccattctagcaaatatccaggaacagtgtctgctatggattttaacaatatattataattatttacaactaaatttttgtttacattttaacattt

SEQ ID NO: 10805 - DNA, 189 bp, Homo sapiens
cttcctctgactatgagggcatcattaatagcaggacacagagcgctttgactcactctctggagctcttctcccaactcaggctggctccgcacttccttcctccaggtacagcctttctgtatgctgcaggggagaaagacacaaggccatcacttcactcctggccatcccatctctacaactcat

SEQ ID NO: 10806 - DNA, 2213 bp, Homo sapiens
ttttttattataaaatcaaattttatgatgatgggtcaatttaaagactgtaaggccacagagatagaaaatcaacaacatagtagacgagacattggcagaagatcacttgatcgtcaccttttttcttgtgcttggtggttctggcagaaatttgttctccatcaggactttcagggtatatccaccgcagcgtatacttagcttccagttcttggatgctccgcggtctccttcaatttcaaattccctgggagtgaaccactttttatcctcactctgtatacacttctttgaggttccttgtttgaatcgctccttatatagagtgcccttcacctcaccacaggtcacaggaagttcagattgtttaaaattaatattttcatctttgggaattcttggacctctttttcttcttcttttcaaaggtctagtgttggcttttcttcctctttgttgccatcttttcttttggactttgttattcagagttaaatgttttctaggtctgtctttctttctccctctttggagaccatttactttagatctatgccttctcttttttcttcttttcccactgtgtttttccaaagtagaattgttttcaacatccatggtatccatcatgtcagatgcttgactactttcagtccttgcttcttggcttcttggcacaccttttggaaaacacatgacacaggagcacttcttattttcaggttcttgtggctgtgatcctgaccctcttcttagggatgagctgccaggtttcctgaagctcttctccattactcaggtctgaaaagtcactactgctgaaacgtctcttcctgctgggtattctccaagtagatgtacttctagaagtcataggagccttctcaccatgccttgcttctcagtgcccccgcttgaggcttcctgcggggcgcctcctcctcactggattctgaaaagtcgtggtcttgtcctatcactcttttcttaaaactttctctgaatgtagataattttctgaaatccatgggctctggtacaatctggggtcgtgagcaagtggcttcttggccctccttttcatcatttgattctaaagggttgtcattattgatcacaggctcacttctcggtgctgagatgaagacttctaagggctcatcaacgtcagtggatccttcagagtcctcactgctgatgactattatgtcagatgcctggttatgatgagttcttgcttgggcttggccactcaacttttgaattagaaaatggcttttccttttttatatccaccagttcgcacagaacaggaattaatttggattccatggttgtgtagctctgcctctgggctttcttcatcacagggcaaccgggcagggcatctcccttccagcatccccattattcacttggacagcaatttgttcgcaggactctgttggctcagccttttgagcacattgttcatttgtttgttggcttcctagcgaatcatctttgtcactggttgtatcttttctctttgcatttatctgttctgttttcacaggggtgctctgagagtccattttcaggtggggttgtaccagcatgagatggggaacccgaaggtggccaagtcaggcttcgaaaagagttttcaccagttccttgttcaagacttagttggaggccagacctctcctccctctcttcttcttcactttcttggagaggcaatttgtcatggattacattttcaaagcctttataaatgtgaattaaatcggggtattcctgcatgttgacatcgctgaacagtgcttccagaactggcaggttaaatgtcttctccagttcactaagaacaattgtacaccactctctgtacagggaccaggtttctacaagaatcttgagaatcttcaaacattttatttgtgatgagattacgatcacggaggccctcgaggaatggaaatgtcttttttattgcatttgaaatctccaccttatttcttttgaagtgcttgaatacaatgtcatagagcagcctgtcatctacaccctggtcttccgtgaacatcctttgcaaatcgtggctgtgtgcaggaagatggttcatctcatttgctactggtgaaatacattcattcagcctcctggtgctcaggtcgccgcccccacctgccatcttcccaccctaggccctgcgtgggcctcag

SEQ ID NO: 10807 - DNA, 977 bp, Homo sapiens
agatagagactcatctttttgcctttgagatttactttaggaaagaaaagtttcttttgatgctacaatcagtaaagagggcatttgctattgattctagtcatccctggcttcatgagtgtatgattccgtctctttaatactgcagtgtgtgaaagtaaagatttatctgatacagttagaacagtattaaaaccagaaatgaatcgtctttttggagcaacgaatccaaagaatttttaatgaaacttttctgaaaaggaattctgattcattgccacacagattatcagctgccaaaatggtatattacttagatccttctagtcagaagcgagctatagagttggcaacaacacttgatgaatctctcactaacagacacctccagacatgtatggaggtattggaagccttgtatgatggtagcctaggagactgtaaagaagctgctgaaatttatagagcaaattgtcataagcttttcccttatgctttggcctttcatgcctcctggatatgaagaggatatgaagatcacagttaatggagatagttctgcagaagctgaagaactggccaatgaaatttgaacatcactaaacaagcaaatggaatgactttggaccatatctagtatataatatttttgtcacgcacctgctgcattgctctaacttacacagaatgagaggagtaaatgttcttgccttcaaatagtgttttacgttttttatcctgctgaaaaagtatatataaaatatctaacattacaggatagaggttcagtttcttaaaaaattaaagctgctaaaattgagtggttaaaaaagataccttatcctattcctccccacccacccatgtttttaaacctaatttatataaaatctggaggctgttacagctaacaaagcaggtgtgtggcagaaatattactttaaatttgtcttgtgagattttactatatctcagac

SEQ ID NO: 10808 - DNA, 399 bp, Homo sapiens
  misc_feature (1)...(399): n = a,t,c or g
tttaagagatggtgttttgctaagttgtccacactgatctcaaaatccttttgtttttgctttggaatggtctggnaactcctgagctcaagtggaannnnnnnnnnnnnnnnnnnnnnnnnnnnnnnnnnnnnnnnnnnnnnnnnnnnnnnnnnncaggttgagcttttaaggtattaaagatccactaggtgaaaaaaaagagtgaaagatacatatgccatttaagggaagcacaggaaaactcctattttgtttatatgtgaatagaggcacatagatgcctagaaaagtgtctgggagggaatgaaaccagattggccacaaaaatcacctctggaaaaaggaaaagaatggggactttcactttttgcttcatatgtttcatgtacctttttt

SEQ ID NO: 10809 - DNA, 421 bp, Homo sapiens
tttttttaaacaataatctataacagttttactatctaaggattttcactccaagaagaaaaaatacatagtaacgccaagcttgcaggacgatgacttaacagatacattttctcttaatggaaacttatctagcttcagtaatatttctggatgtagcatcaagttgctgttgcacatttttaaaagactggtccagcagtgtttcctcttcatttaaagtattggcaatagcatcattacatggattgtccagaatgtcttcgtttaatccatttgactcctccttttgatcctcatcagtattaacctcttcaaccgtgtgtgccctgggtgtattcattaacatatcatttcctagggtctgactattactcagcagctttgcctgccttctttccaaggccagttgtttatttct

SEQ ID NO: 10810 - DNA, 324 bp, Homo sapiens
tgattttctaatatctagatggcttacaccatttgctaggcaaatagaatgggggctgattccatttatcttgtctgagctgaccacagcaagggcgtggttttggtcaggctccatctctttttggtttgcctctactctttggaagtacccctgcaaggagttctggctaagaactggggcccttcccccatggtgtgtcctgaactttaatctttgtcccccacggtgtgtcctgaactttaatctttgtcttcttagtacatgggattggtgaagaaacctgctgtgctattcagaggctttctgcttggtttcagcctt

SEQ ID NO: 10811 - DNA, 766 bp, Homo sapiens
gtggtaataaaatgttgtcaattttattaaaagctgattccatttcttcacacagttaagtacgtttctttcttgttttgttaaagcccatttcataagagtgagttggctctgtgagaccatcactgataaagacacatacagttagcaccacacatttataaatgcagatagccacaatgacctttccaatatgtacaagctccatttacacatccacacatgtatttacagctaataaataaaatgtaaagccagaacatccttgatatatataacaaagtttttcggagccagagttcccagtgctatgtgctgctttagtgaatcttttaagttaatgcaccctgggtcacaacccaaatccagaaatttaatgaattaataaaggggatgccaacaacaaatcatacatcattttatttttagagagaattcattccaagcctgatgatgttaatcacaacattggtcctactatttataggcacgatcatctctctcagagaaagggtcgaagttctggcacatcaggaacaatttctactccgacatgttccaatacatcccttgatcgactgttttcccttccgaattatgctgaaggacaacacacatgcagagctttctagtatgtgttcagatatcacatactttcacagtcgggttcccagctatagcctctgagatatttgacatctttatcatttcatatttatacgtagaagagcattctgaaaaataggagatctagtttataaatagt

SEQ ID NO: 10812 - DNA, 45 bp, Homo sapiens
attatggtccttcacgcctgacagtgtgggcccttggttgggaac

SEQ ID NO: 10813 - DNA, 5185 bp, Homo sapiens
gggaacttggattaggtggagaggcagttggggggcctcgttgttttgcgtcttagttccgccctcctgtccatcaggagaaggaaaggataaaccctgggccatgaggctacccctgctcctggtttttgcctctgtcattccgggtgctgttctcctactggacaccaggcaatttttaatctataatgaagatcacaagcgctgcgtggatgcagtgagtcccagtgccgtccaaaccgcagcttgcaaccaggatgccgaatcacagaaattccgatgggtgtccgaatctcagattatgagtgttgcatttaaattatgcctgggagtgccatcaaaaacagactgggttgctatcactctctatgcctgtgactcaaaaagtgaatttcagaaatgggagtgcaaaaatgacacacttttggggatcaaaggagaagatttattttttaactacggcaacagacaagaaaagaatattatgctctacaagggatcgggtttatggagcaggtggaagatctatggaaccacagacaatctgtgctccagaggttatgaagccatgtatacgctactaggcaatgccaatggagcaacctgtgcattcccgttcaagtttgaaaacaagtggtacgcagattgcacgagtgctgggcggtcggatggatggctctggtgcggaaccactactgactatgacacagacaagctatttggatattgtccattgaaatttgagggcagtgaaagcttatggaataaagacccgctgaccagcgtttcctaccagataaactccaaatccgctttaacgtggcaccaagcgaggaaaagctgccaacaacagaacgctgagctcctgagcatcacagagatacatgagcaaacatacctgacaggattaaccagttccttgacctcaggactctggattggacttaacagtctgagcttcaacagcggttggcagtggagtgaccgcagtcctttccgatatttgaactggttaccaggaagtccatcagctgaacctggaaaaagctgtgtgtcactaaatcctggaaaaaatgctaaatgggaaaatctggaatgtgttcagaaactgggctatatttgcaaaaagggcaacaccactttaaattcttttgttattccctcagaaagtgatgtgcctactcactgtcctagtcagtggtggccgtatgccggtcactgttacaagattcacagagatgagaaaaaaatccagagggatgctctgaccacctgcaggaaggaaggcggtgacctcacaagtatccacaccatcgaggaattggactttattatctcccagctaggatatgagccaaatgacgaattgtggatcggcttaaatgacattaagattcaaatgtactttgagtggagtgatgggacccctgtaacgtttaccaaatggcttcgtggagaaccaagccatgaaaacaacagacaggaggattgtgtggtgatgaaaggcaaggatgggtactgggcagatcggggctgtgagtggcctcttggctacatctgcaagatgaaatcacgaagccaaggtccagaaatagtggaagtcgaaaaaggctgcaggaaaggctggaaaaaacatcacttttactgctatatgattggacatacgctttcaacatttgcagaagcaaaccaaacctgtaataatgagaatgcttatttaacaactattgaagacagatatgaacaagccttcctgactagtttcgttggcttaaggcctgaaaaatatttctggacaggactttcagatatacaaaccaaagggacttttcagtggaccatcgaggaagaggttcggttcacccactggaattcagatatgccagggcgaaagccagggtgtgttgccatgagaaccgggattgcagggggcttatgggatgttttgaaatgtgatgaaaaggcaaaatttgtgtgcaagcactgggcagaaggagtaacccacccaccgaagcccacgacgactcccgaacccaaatgtccggaggattggggcgccagcagtagaacaagcttgtgtttcaagctgtatgcaaaaggaaaacatgagaagaaaacgtggtttgaatctcgagatttttgtcgagctctgggtggagacttagctagcatcaataacaaagaggaacagcaaacaatatggcgattaataacagctagtggaagctaccacaaactgttttggttgggattgacatatggaagcccttcagaaggttttacttggagtgatggttctcctgtttcatatgaaaactgggcttatggagaacctaataattatcaaaatgttgaatactgtggtgagctgaaaggtgaccctactatgtcttggaatgatattaattgtgaacaccttaacaactggatttgccagatacaaaaaggacaaacaccaaaacctgagccaacaccagctcctcaagacaatccaccagttactgaagatgggtgggttatttacaaagactaccagtattatttcagcaaagagaaggaaaccatggacaatgcgcgagcgttttgcaagaggaattttggtgatcttgtttctattcaaagtgaaagtgaaaagaagtttctatggaaatatgtaaacagaaatgatgcacagtctgcatattttattggtttattgatcagcttggataaaaagtttgcttggatggatggaagcaaagtggattacgtgtcttgggccacaggtgaacccaattttgcaaatgaagatgaaaactgtgtgaccatgtattcaaattcagggttttggaatgacattaactgtggctatccaaacgccttcatttgccagcgacataacagtagtatcaatgctaccacagttatgcctaccatgccctcggtcccatcagggtgcaaggaaggttggaatttctacagcaacaagtgtttcaaaatctttggatttatggaagaagaaagaaaaaattggcaagaggcacgaaaagcttgtataggctttggagggaatctggtctccatacaaaatgaaaaagagcaagcatttcttacctatcacatgaaggactccactttcagtgcctggactgggctgaatgatgtcaattcagaacacacgttcctttggacggatggacgaggagtccattacacaaactgggggaaaggttaccctggtggaagaagaagcagtctttcttatgaagatgctgactgtgttgttattattggaggtgcatcaaatgaagcaggaaaatggatggatgatacctgcgacagtaaacgaggctacatatgccagacacgatccgacccttccttgactaatcctccagcaacgattcaaacagatggctttgttaaatatggcaaaagcagctattcactcatgagacaaaaatttcaatggcatgaagcggagacatactgcaagcttcacaattcccttatagccagcattctggatccctacagtaatgcatttgcgtggctgcagatggaaacatctaatgaacgtgtgtggatcgccctgaacagtaacttgactgataatcaatacacttggactgataagtggagggtgaggtacactaactgggctgctgatgagcccaaattgaaatcagcatgtgtttatctggatcttgatggctactggaagacagcacattgcaatgaaagtttttactttctctgtaaaagatcagatgaaatccctgctactgaacccccacaactgcctggcagatgcccggagtcagatcacacagcatggattcctttccatggtcactgttactatattgagtcctcatatacaagaaactggggccaagcttctctggaatgtcttcgaatgggttcctctctggtttccattgaaagtgctgcagaatccagttttctgtcatatcgggttgagccacttaaaagtaaaaccaatttttggataggattgttcagaaatgttgaagggacgtggctgtggataaataacagtccggtctcctttgtcaactggaacacaggagatccctctggtgaacggaatgattgtgtagctttacatgcgtcttctgggttttggagtaatattcactgttcttcctacaaaggatatatttgtaaaagaccaaaaattattgatgctaaacctactcatgaattacttacaacaaaagctgacacaaggaagatggacccttctaaaccgtcttccaacgtggccggagtagtcatcattgtgatcctcctgattttaacgggtgctggccttgccgcctatttcttttataagaaaagacgtgtgcacctacctcaagagggcgcctttgaaaacactctgtattttaacagtcagtcaagcccaggaactagtgatatgaaagatctcgtgggcaatattgaacagaatgaacactcggtcatctagtacctcaatgcgattctgagatatttgaatttcataaaattgtaactgaaatttaaaatttttagttcaatgtgattgttttctttaaaatgagtactgaattgtactggtctgtccttttttcctttgcctaattgaagaaataattgcttgttttctagcctggcaagatattttcataaaagagggataacaatgctgattactaccttttaaaatattttagataaatgcacagcaccacagcaccacatctagcatttagtgatgggtagctgatgtcagcttcatgtggattttaagcactctagaaacaatgaagcttcttggcatattttaaggagctcccaaaatgtgttacctattaaattgtaactcagcaagtagaagaccatttgaaaagtcaggtacaaatttcctcaagtggcataaaaatgtagtcagttttctcttttaccagtttttatttccactccaattatttagaactttatttgtacatgtgcagaagaataaggcagctgagaatcttgtttcccccaagagagttttacaggctgagtgttgcaaatgtgttctttgtcctgttatatgtatatcaggaatacaaggatgtgaaataaaactgtaaatttgcataactggatgtacttagataatgtgaaataaacattaaagacaaggtctatttttaataaaaaaaaaaaaaaa

SEQ ID NO: 10814 - DNA, 1758 bp, Homo sapiens
gaattccggcggcggccgcgagcgcgctcggtccccggcgccggcctcgcctcctcgcagcagcgccatggatgagttccacccgttcatcgaggccctgctgcctcacgtccgcgccttcgcctacacctggttcaacctgcaggcgcggaagcgcaagtacttcaagaagcacgagaagcggatgtcgaaggacgaggagcgtgcggtcaaggacgagctgctgggcgagaagcccgaggtcaagcagaagtgggcgtcgcggctgctggccaagctgcgcaaggacatccggcccgagtgccgcgaggacttcgtgctgagcatcaccggcaagaaggcgccgggctgcgtgctctccaaccccgaccagaagggcaagatgcggcgcatcgactgtctccggcaggcggacaaggtgtggcggctggacctggtcatggtcatcctgttcaagggcatcccgctggagagcaccgacggcgagcgcctggtcaaggctgcgcagtgcggtcacccggtcctgtgcgtgcagccgcaccacattggcgtggccgtcaaggagctggacctctacctggcctacttcgtgcgtgagcgagatgcagagcaaagcggcagtccccggacagggatgggctctgaccaggaggacagcaagcccatcacgctggacacgaccgacttccaggagagctttgtcacctccggcgtgttcagcgtcactgagctcatccaagtgtcccggacacccgtggtgactggaacaggacccaacttctccctgggggagctgcaggggcacctggcatacgacctgaacccagccagcactggcctcagaagaacgctgcccagcacctcctccagtgggagcaagcggcacaaatcgggctcgatggaggaagacgtggacacgagccctggcggcgattactacacttcgcccagctcgcccacgagtagcagccgcaactggacggaggacatggaaggaggcatctcgtccccggtgaagaagacagagatggacaagtcaccattcaacagcccgtccccccagggactctccccgcctctccagcttcacccagcaccaccggcccgtcatcgccgtgcacagcgggattcgcccgggagcccacacccgtcctccgctctgcatttccctacgacgtccatcctaccccagacggcctccacctacttcccccacacggccatccgctacccacctcatctcaacccccaggacccgctcaaagatcttgtctcgctggcctgcgacccagccagccagcaacctggaccgttaaatggaagtggtcagctcaaaatgcccagccactgcctttctgctcagatgctggcacctccgcccccggggctgccacggctggcgctcccccctgccaccaaacccgccaccacctccgagggaggagccacgtcgccgacctcgccttcctactctccgcccgacacgtcccctgcaaaccgttcctttgtgggattaggaccaagggatcctgcgggcatttatcaggcacagtcctggtatctgggatagcaaaggtcttcttccctcgccccttctccatcgtcccaggaatcccagggggcagcacagccgcccccggcccacgtttttggtggaaaattagagtgaacaagaacacccctgccgactcccagcccggccaaaaagacaaaacacatagacgcacacactcaggaggaaaagaaaaaccggaattc

SEQ ID NO: 10815 - DNA, 301 bp, Homo sapiens
  misc_feature (1)...(301): n = a,t,c or g
ataatagtagaccccattttggtgctgattttggtgagaattaacgaaagggaatatagagagagctgcctcttggctagatatatgctttaggacagtacctaggacacagaagtgctacgtaaaaggtacctctatccctgatactcaaaacgtgggcccagccatatatggcatccgttggaagcttgctagaaatgcaggatcggctgggcacaatggctcaaagtgnnnnnnnnnnnnnnnnnnnnnnnnnnnnnnnnnnnnnnnnnnnntnagcccaggagttcgagaccagcct

SEQ ID NO: 10816 - DNA, 416 bp, Homo sapiens
  misc_feature (1)...(416): n = a,t,c or g
agacagggtctctctatgtttcccaggctataaaacggggttttatagatgaagaaagagaagcacagagaggacagggaagctggattggaaccataccttaagctcacattactagggtctcagaatccactcccaagggtgatcctgaagggttcactgtcaccctccggggtaagccacctcttttccccaagcgattcattccccacatgaaactcaacagtccttctatcccttcttcttaacctttcaggagtcacccaagagtcctgcctgcctccgcttacccctccaactcacttcctgctcccaggggccaagggcctggcnnctcactcacagaaactctgtctttttcttctcttctttatccttagtcctcagctttgtcttccagggagagcctgggtcga

SEQ ID NO: 10817 - DNA, 314 bp, Homo sapiens
cgccgcgcgtgtgaggttgtctagtccacgctcggagccatgccgtccaagggtccgctgcagtcggtgcaggtcttcggacgcaagaagacagcgacagcttgggcgcactgcaaacgcggcaatggtctcatcaaggtgaacgggcggcccctggagatgattgagccgcgcacgctacagtacaagctgctggagccagttctgcttctcggcaaggagcgatttgctggtgtagacatccgtgtccgtgtaaagggtggtggtcacgtggcccagatttatgctatccgtcagtccatcttcaaagccct

SEQ ID NO: 10818 - DNA, 2315 bp, Homo sapiens
gagtttagttgtagcagaggggccacagacagaagctgtggtggtttttactttgtgcaaaaaggcagtgagtttcgtgaagcctggaagttggccatgtgtcttaagagtggctggactttgacatgtggctgtttgaataagagaaggacaaagggaggagaaagcacatgtgctccagtgagtcttcgtcactctgtctgccaagcaattgatatataaccgtgattgtctctgcttttcttctgaaatgtagataactgctttttgacaaagagagccttccctctcccccacccctgtgttcttgggtaggaatgggaaaaggggcaacctacaaagattgttggggcaagggaagtcacaagctttcggatggggcggtggcttttcacaaaacatttagctcatcttattctctctttgtcctctctcccctcctgcccgcccgcaccctggaattgccactcagttcctctgggtgtgcacatatgtttggagaaatagaggagagaaaagagggccacgtaactgagagcttacagtgccaatgcccgtttgtgttctggccagagtggagtgcgcagccctgactcccaggcgctgagattgttgcctggttacccaggaagctgctgttccggctgcccagcctttctctgagccagcggatgcacagtccgtggccttcttcaggcttattgatgatgctttttgcaaatgttgaatcatggttctgtttctaagttggatcttttttgttttctccttgccaccctaatttgacatcaaaattctctcttgtgcattgggccctgggtcattcaaacccaggtcacctcattccccttctctgttcacacctaatgtcttgaagagtaggtagcagcagtgtgggctgaacctaggccagcttgcttagcgggtcaccctgctgtgaagtcctggcaggtgttggtaatgtgtggaaatgcagtcagcaagtttgctggggagtttgataaaagtataaaacaaaacaaaaaaagcctcgggtattaattttgttccacgactttctttctgtagcctttacaccagaagggaagggaatgggctacagcaggtagtggaggaagaggggggtgagcaggtgtattaaaatagcttacgggtaaggcctaaaaggtcacccctcggccccctctccaaaagaagggcatgggcacccccaggagaggatggccccaaaaaccttatttttatacatgagagtaaataaacatattttttttacaaaaataacttctgaatttatcagtgttttgccgttaaaaatattcctctatagtaaattatttattggaagatgacttttttaaagctgccgtttgccttggcttggtttcatacactgatttatttttctatgccaggcagtagagtctctctgcctctgaggagcaggctacccgcatcccactcagcccctccctacccctcaagatttgatgaaaattccaaccatgaggatgggtgcatcggggaagggtgagaaggagagcctgcctgctcagggatccaggctcgtagagtcactccctgcccgtctcccagagatgcttcaccagcacctgcctctgagacctcgctctctgttccagcaaccctggttggggggtcagacttgatacactttcaggttgggagtggacccaccccagggcctgctgaggacagagcagccaggccgtcctggctcactttgcagttggcactgggttggggaggaagagagctgatgagtgtggcttccctgagctggggtttccctgcttgtccagttgtgagctgtcctcggtgttaccgaggctgtgcctagagagtggagatttttgatgaaaggtgtgctcgctctctgcgttctatcttctctctcctccttgttcctgcaaaccacaagataaaggtagtggtgtgtctcgaccccatcagcctctcacccactcccagacacacacaagtcctcaaaagtttcagctccgtgtgtgagatgtgcaggttttttctagggggtagggggagactaaaatcgaatataacttaaaatgaaagtatactttttataatttttctttttaaaacttggtgaaattatttcagatacatattttagtgtcaaggcagattagttatttagccaccaaaaaaaagtattgtgtacaatttggggcctcaaatttgactctgcctcaaaaaaaagaaatatatcctatgcagagttacagtcacaaagttgtgtattttatgttacaataaagccttcctctgaaggg

SEQ ID NO: 10819 - DNA, 628 bp, Homo sapiens
ttttttatttacagtcaaagtagtaaacttgcagatatatctaaaaccaattttcaaaccagcttcataacatatgctgtaagtaaataaataccaaaacctgataacactagcatggagaaaagaaaagctgaattaaaaagacattcctttacacaacttagtcaagacaaaatacacattactatgtgatgttacactaattattccaataattatttacttaagaagagggacaaaacagttttgttacattaaatctttctcttatttgccatccccacctttctactccattactgcctcctaatactttcccttcccaaggagattggagattaagaaatagcctctgcccctcaatctagaattaacttaccttttatttttacatacaaacactggatttcccagagtcgtcttttaaaggagttaagattctagctctggcaggaaagtcaagtgatttaatcacaaccatagtggtttctctactggtgtttaacatgtaccacataaactaactactaacatagccaattctaaggtcatttatgtgagatattaagactgaaaatacacttttaatttctgcctttttctcccaatatataatccctttttaaag

SEQ ID NO: 10820 - DNA, 249 bp, Homo sapiens
ggaggtttccagataaaagtagactcaatagatatgttaagcatttggaagaaaaatctgttgatgagtataaatagcatctaatgtaaaaaacgaaggatagggacacaacaggaaaagcgaaactttttataaaaaaggagacattatcacagtaaatttcttgggctttacagtaaggcagtatttccctaatcataatgcagaactacagccagtttaacccaaaattgggggtggaatatagtg

SEQ ID NO: 10821 - DNA, 292 bp, Homo sapiens
cacagaagcagtgatgagcaaggtctcttgtgccctgaagcccagcgaggtgtccacacttcacccttggctgggctgtgtgccaggaaaccctcccggtccaaggtcttcacaaccacgccacgcccctttccgagacagggctcccctccaactcctctccacccggccagccaggcactcactttgtggaatcaccatcaggaaaactatcttaacctatcaatcagcagactttcttccttctctaattctgacataatatttgagatttcaaagaacccatcttgaa

SEQ ID NO: 10822 - DNA, 570 bp, Homo sapiens
  misc_feature (1)...(570): n = a,t,c or g
aaaaaaaaaaaaaaggtgttccactaaaaaaacaatgccagttagttcaacttgcaactcaaaaaattacataagtacttttcctcaaaacaaccatcatattttggtatgcctaaaaagggctttatgcatacttcctatttcatcacaagaacacacacatatacacgaatagacatcaaactcaatgctttatttgtaaatttagtgtttttttatttctactgtcaaatgatgtgcaaaaccttttactggttgcatggaaatcagccaagttttataatccttaaatcttaatgttcctcaaagcttgggattaaatacatatgggatgttactctcttggcaccaaattatcttgatacattccaaaattttgtctgggttaaaaatagggtggtgggtattgagggccaggattttggcaaattacnggaggcttccnggcacttaaggnggtttttttgggattagggtttggcctacctaccccggtggnacctttnccgggatttttttttccccncaggnccagttggtttccccttgggntttttggcccgtntgggt

SEQ ID NO: 10823 - DNA, 436 bp, Homo sapiens
tttttttttcatcttgactatccattttgtttttattctcttggttttggacaggtccaaactaaaacatttttagtttgttgtcccatccagtttcccgatgggttacctcagatgtgaaccataataaccaggagaagtggcatgctgggcccagggcccaactgaggaatgtgaggccaactaataacttagctccttctaaactaatatccattcaaagaaattttcaagtctcatttaatgtggatggagctggtgccagggaggactatttattgagatcttaattcacaaatgtctcaaagcagtttaaaatgttcttgatgttacgtaatgagttagaaacctgtccaaccacataccagatgcatgggctggggctgggacaagttacttgaccaatctggacttccattattcatgactccaggag

SEQ ID NO: 10824 - DNA, 327 bp, Homo sapiens
gtgaactccaagactgttttgatgttcatgatgcatcttgggaagagcagatattctggggatggcataatgatgtccacatatttgacacaaagacacagacttggtttcaaccagaaattaaaggtggagttccaccacagccacgagccgcgcatacgtgtgcagttcttggaaataagggttatatctttggcggacgtgttctgcaaactaggatgaatgatttgcactatctaaacctagacacctggacttggtctggaaggattactattaatggagaaagccccaaaacatcggtcatggcatactttaacacctata

SEQ ID NO: 10825 - DNA, 781 bp, Homo sapiens
cgtcgactttttttttctttttttggatgtattgaaaatattttataatcaattctctagaatcctagccatccggtacaggaaaaaattatattggaacacttccgtatttttaaacaatgaaaaaaaatttgactagaggatggcataagaaatttacaaatacaaacttaggcttcctcacatttcccacagagcaactaaacgagaaaaagatttcaagaaatgacagtatacctcgaatgcaaaattccaaagtcaaatagctacttacattaagagatttaccaaaacagtttgtaaattaaacattaacagcaaaaggcacaaaaagcctatttcttttatggtgtctcggctgattctttaagaagcagataaacaaggtactgtatggaacgatcaaaacttggcctgagctgtcttctgataattaatcctagtatatccagatttgttgtccaaggacacaagctccatgccaccttctgctgtcactttccaagaagaggctgtttttttttttgtttccagttttcactatgatctgagtagacagagaatgtcataaaataaatgagagtattccattatccgatcagaaatgccacctcttttcccaactcattgctctgacttgaaagatgaacgtatatatgaattctcattttattctcctgagaaattatgcatgatccattataaaacatacaggtaatacaaagtccacaagcctgtcatgtttatggcagtggtgtgatctcagctcacggcaaccttc

SEQ ID NO: 10826 - DNA, 587 bp, Homo sapiens
ggtcgactttattattttttaatgagaatacaggattgagacaatgtcctcactgattttttttagtttgtgttatgaaatttcagtattctgtagtctagatttggttggttaatacgacatattagatattccaaaaaactcttgaggtaggtgatttatagtcagattattcaacggttccatgcttgcaaatatgagtattcattaaaatttgtaacctcaaaatcaatcattgcagagctttcacattcattgacagacatgcacagtgcagcaataaatttaaggtgcccaatatgcatgttcccagcagaattcaaaaaggtgacactctttcttgcttcaggtctcatactataaacaagtgccctattcacaatctacttagtgtcacatattttgaattttgggggcttttcttcctgatttcattgtttaaaatggcccccaacatagtgcttaagtgctatccagtgtttcaagcacaagagacgtgacgtaccttgcagaagaaaagaaaggtgtgctaaataagcttgttcagcatagcgtgcggttggcattcctgattaaaaacagccgcg

SEQ ID NO: 10827 - DNA, 442 bp, Homo sapiens
tgtccagtgtatgaggacgtcccagcgagaaatgaaaggttctatgtttatgaaaataaaaaggaagcattgcaagctgtcaagatgatcaaagggtcccgatttaaagctttttctaccagagaagacgctgagaaatttgctagaggaatttgtgattatttcccttctccaagcaaaacgtccttaccactgtctcctgtgaaaacagctccactctttagcaatgacaggttgaaagatggtttgtgcttgtcggaatcagaaacagtcaacaaagagcgagcgaacagttacaaaaatccccgcacgcaggacctcaccgccaagcttcggaaagctgtggagaagggagaggaggacaccttttctgaccttatctggagcaacccccggtatctgataggctcaggagacaaccccactatcgtgcaggaagggt

SEQ ID NO: 10828 - DNA, 407 bp, Homo sapiens
gctcgattgaaacttctgaatccagatgaccttagagaagaaatcgtcaaagccggattgaaatgtggacccattacatcaactacaaggttcatttttgagaaaaaattggctcaggctttactggagcaaggaggaaggctgtcttctttctaccaccatgaggcaggtgtcacagctctcagccaggacccacaaaggattttgaagccagctgaagggaacccaactgatcaggctggtttttctgaagacagagattttggttacagtgtgggcctgaatcctccagaggaggaagctgtgacatccaagacctgctcgggtgccccctagttgacaccgacacctacagagctggagcgactgcgtctataggagccgccccctgtactatggggtgtgtc

SEQ ID NO: 10829 - DNA, 2200 bp, Homo sapiens
  misc_feature (1)...(2200): n = a,t,c or g
ttttttttttttttttggtttaaaaacaggagactatttaatccatctaaaaatacaaatcaggaaatggggggaaccataggaaaatcctccacctctaacagagcgaagttactggctttctgcttgctccaagaatcccaaggcttgatgtttggaaggaattatctgttcttcaactactcccagatactcagacataagttacacacatctggagaagggttctgccctgctgaagctagatgggagctcaatgcatgggagaaaggagcatcaatctagaaaaaaatgatcaaagaacagctgagtgacagtgtggggccatcccaggcaagtgggctcttggtgctctggtgtagccagaacccatacaagctggggctgggcctaggaagcccaccagcccagcctgtgttcagctaacagcttctgtgttcttatttaccatcatcaggccacagccctgggagcaaagccctagacgctccttcaagcccctgctggttggtttcatcattatctcgcctcttccaaatctgaatgtaagcctctgacagtgtgatcatctggggaaggatgtcagtcacctggaggtcttggtaattcatacccatttgcctgtcccatgatgaagcacgtggaaccggtaggagccctcggagggcttgccgtcatgcacgatgttggcaatgaggtcataggtggtattcttgtgtactgcttgtacttcttcagacaagtattctctcagatccacatttgtaatagggaaattgacaatagttggattcttctcaacaaagaagttgttcttagtgaatctcttgatacaaaagattagatatggaggcaacttggtaagctggaagcgcttcagaaagttctccttgtaagtcttatattccttctcaagtgatgccattgaacttagccaggatgttgaagagtggcacttggggaatgatgagctgctccttctcgtccttgtagaggggggcagtaggaaggtccagcgtcaggtacataaaagtggactccaccattgtctcctggtactcgtcattatggagcaactgctctttttcttctgctggcagatcaggatggggaagctttttagtgaagatcctcatggacccctggaaaacatcagtcacaatagtcttctttttcttctttgtgccccccagagctgagtgcagagcattcagaaaccaagacagaaagtcaacgccatctccttgtttggtgatctgaaaagtcttcttactgcaaagtacaactgcctgaagcatctcatggggagacacatgtgccttgaaatttcgagggttccagagctttctcatcagctctccaaaacgctggaccaacaagaacatgatatcccctggaggacgtttgatgttcttataattgtcttcttccagaaagtagttccggagaggaggaacattagatagagcctgaaggacagcgttggccataatcattggcctttatgttattcagtcccacaatacccggcaggtaagtggtaccatcatatgcccgggacaatttggccttgcttgtccaagtttgcaatttgctgctttgtgaaagtgggcttcaaacacatacgtgatatcctccaatgaggaatcgatgatctcatagttgtctggaaggcagtaaaacttgagggtgtggaggttgaggaaaacatggtggctaaactggacactgtgaatgtaggcgtgagacttcaaaccccggccttgaaagtacttgccacacaccagacaggcataagcattgatgtgtgagagggagatagaacacagtttctcaaagtcaaagtccagcacactcctgttaatggtgtccaggtacgggcagtggcggctcctccggtcctcagaatccactcggccattctttgctcgcacctcccgctcaggctccgagtcctcatcgaccntctntcccgcttcacccgcacaaacgggacaacagaagccggggcctcgcgcgcgctcgccggctcgaactccnnttcacgcgcacagggctgccccgggagctcgncnctcaggtcccgctcccgatncntnttcccttgacgcgaccggagctgccccgcgactcagancntncttcccgcgagtggaaccgcgagactcccgcttagaccggccggacatctnccactacc

SEQ ID NO: 10830 - DNA, 115 bp, Homo sapiens
taaagatccttgacatggctagcaacataatgattgtcactctacctggggcttccaagctacttggagtagggacaaaatatcttggctcacgtatttaagagcctgaatattc

SEQ ID NO: 10831 - DNA, 287 bp, Homo sapiens
cggtgctctagccatagtccagggatgtgggggagaagaaagaagggtcactggggttgatttcagttctggagcagccaagagtcgagctgggttcggtgtgggcagtgccatggttgcagatggagaggtcagggaaaattcttaaaggaggcagttgatggcattctgggctggggtgaggagaaaggtgtgtgtgtttgacctctgtgaccctcattaggttaagggagtgggcttaagtcaggcaggcagggctttgactccttgccagctgtgtggcctta

SEQ ID NO: 10832 - DNA, 412 bp, Homo sapiens
  misc_feature (1)...(412): n = a,t,c or g
gtggggccttatgaagaccaggattctgcgggtgtcaggggattgcccctcttgacagagactagggttttagactgaggcttcctgcagggtgttcgcattgcccttctccgttccccttcagacctttctngggagaagaggtcggaggagggnagaaagactgttcatcttattctgaatcctggagcagctgaaggttttctcttgagtcaggatgcagtggtaatgcattaaccagcaagtgtggccaaggataatgaaaaagtgggaaaggaaggtcctcctcctccctgattgtagcatccagcagtctctgtagccaggttactcaagaaccacatttgatttctggcctttgcttggagtgatggcatttttatttcactgtgttttaaagtcttcatttatt

SEQ ID NO: 10833 - DNA, 920 bp, Homo sapiens
gtcattacctttacgattcctatttattaaaaaaaagactggtaaataagcctgtgatacagaaaaactggtatattgttgagtttcttggcatttaggtaattaaatttttttattgttgaaccaaaaaaagatccaatgacaaatccatataaatgtgataccatttacaatttttaataaccataaaagcaccattatataagacacttaaaataatttttcacagaacattagaaagaagctgttggccaacaagaaatagagcatacgtcctctgtggtcttgtctatcatgatctcacattaaatctgattccaacctgttggaaattaatttggattcataaattcagcatcagtataagaagacattccagagttgtgaggacttgattgtcttaatgccacataaaacatcaactgctcattttgtaatgagcatggcttttatatatccctgtatgacctatatcctggggtgcctaatttcttgcactcccaaacatttgagctgccgactaattacacatgttaataggcataattttagaagtcgtttattccttttaaaagttagtgttttatgaaggcaggcttattttatttacactattagcacaacagccaaaagttattcaggtttaatcctgctgaataaagtagtaaaaacacaaggcgtgactttaaataatgacactgatttccctcagtagctcctgtagctattaaggatttgacagcatttttaacaatgatacatcattaaaataaagaaataacttcccaaagtgtctactttgaaggacaatgttcccttagatgtatgctttctggcatattaacattaaaggaaaatcagtatcataagagtcgcacatctcacatttttagatacatagattatcaaagtagcaatgg

SEQ ID NO: 10834 - DNA, 318 bp, Homo sapiens
  misc_feature (1)...(318): n = a,t,c or g
gaaaattgcaagactagatatttcctaagggcctttcctctgattttgggaaaagtatctcacaaaataaaacatttttctggataaaaatatcagtttattagaaagcaggnnnnnnnnnnnnnnnnnnnnnnnnnnnaacttagaatgtttggtatatttggtcatcccacttaagctgttggctccttcattcattcattcattcattcattcattcagtgattcaatgtttatgacactgctttgtgccagacataggaggctttgcactgagggtcaaagggtgacaagggcagccctgtttgtttcaactgg

SEQ ID NO: 10835 - DNA, 1215 bp, Homo sapiens
ctctcaggaaccccggcccctaataagaagaggaaatccagcaagctgatcatggaactcactggaggtggacaggagagctcaggcttgaacctgggcaaaaagatcagtgtcccaagggatgtgatgttggaggaactgtcgctgcttaccaaccggggctccaagatgttcaaactgcggcagatgagggtggagaagtttatttatgagaaccaccctgatgttttctctgacagctcaatggatcacttccagaagttccttccaacagtggggggacagctgggcacagctgggtcagggattctcatacagcaagagcaacggcagaggcggcacaaggccaagggggcagtggctctgccggacagtatggctctgatcagcagcaccatctgggctctgggtctggagctgggggtacaggtggtcccgcgggccaggctggcagaggaggagctgcctggcacacaggggttggtgagacaggatcaggagaccaggcaggcggagaaggaaaacatatcactgtgttcaagacctatatttccccatgggagcgagccatggggggttgacccccagcaaaaaatggaacttggcattgacctgctggcctatggggccaaagctgaacttcccaaatataagtccttcaacaggacggcaatgccctatggtggatatgagaaggcctccaaacgcatgaccttccagatgcccaagtttgacctggggcccttgctgagtgaacccctggtcctctacaaccaaaacctctccaacaggccttctttcaatcgaacccctattccctggctgagctctggggagcctgtagactacaacgtggatattggcatccccttggatggagaaacagaggagctgtgaggtgtttcctcctctgatttgcatcatttcccctctctggctccaatttggagagggaatgctgagcagatagcccccattgttaatccagtatccttatgggaatggagggaaaaaggagagatctacctttccatcctttactccaagtccccactccacgcatccttcctcaccaactcagagctccccttctacttgctccatatggaacctgctcgtttatggaatttgctctgccaccagtaacagtcaataaacttcaaggaaaatgaactcattcttcctttgatatttgagagcagatgaaagccgagg

SEQ ID NO: 10836 - DNA, 366 bp, Homo sapiens
cgtccacatcccgctcagactgcatggctctctcgcccctcaccacaccagagaagaagagttgctggggaatggccattcctgcaatggacagtggcagctcaatgaagacacgggctcgtgcaccagagagtccacacaggtgagaagccgtataaatgcctggaatgtatgagaagttttactcggagtgccaacctaattaggcaccaggcaactcacactcacacttttaaatgccttgaatatgaaaaaagctttaactgtagctcagatcttattgtacatcagagaattcacatggaagagaaaccacatcagtggtctgcgtgtgagagtggcttcctcctaggaatggactttgtt

SEQ ID NO: 10837 - DNA, 290 bp, Homo sapiens
gccaaaatggctgccccgaggaggcccgcaccgcgtagccagtgaaggttggggagcaagcttatgcgggaaagagggagggggactccaggaaaagccgttgagaggaccatcacaacctgagcagcacaggttccagttacagccatcccttgtcataacttttgaactgtatttggaaaaatactggccaggaaagaaaaatgataaaatttttcctcatggtgaataaacaagggcagactcgactttctaagtactatgaacatgtggatattaataagcgtaca

SEQ ID NO: 10838 - DNA, 584 bp, Homo sapiens
ttttttttttgtgtttaaattttaaaactttattggctgacggaaaactgccatactttcttcccactaccatcctgctattcctgaattcaatttgcaaaagaagcatagaccaagaagggttccttaggtgctcaacagaatttaaagtgcgacagatatgtttacaattagaaaataaaacttctctctcagtttaaagaaatttttttctttgtacatattttaaagtacagttgtgttttctttttaggaactgtggaaaatgcctatttataatgtctttggaaggataccccattttgtaattgtggtcttccagattcttctgggttaacatgttgagatgtattccacggtactcgcatttctgataaatccatattgtctcgaagagacttcctttcagctttctgacatcttatcaagaattagtagaggggcaagaattcttgccctgttagtttccacaatgcagccatttaacaccatctcatccaaaatgatgtgtactttatccaaattaaacattatatctaattcactcactcggctgaaatactcatctaaaacttcccacaaag

SEQ ID NO: 10839 - DNA, 449 bp, Homo sapiens
ccttggaagcattatgttccaattaaaagaaatctgagtgatttattagagaaagttaaatgggctaaggaaaatgatgaagaagccaagaagattgcaaaagaaggacagttgatggctagggacctactacagccacacaggctttactgctactattaccaagtactgcagaaatatgccgagcgccagtccagcaaacccgaagtacgtgatggaatggaacttgttcctcagccagaagatagcacagccatctgccagtgccacaggaaaaagccttcaagagaagaactttgagtcagcccagaatcacactcctgtgtatcccggctacatctttaaggaaacgattgaatctaagctgtgaaggacagtatagaagactgcaccaagtggactaagttctcccggtggctttatatatgtagatgggatatagcagtact

SEQ ID NO: 10840 - DNA, 2598 bp, Homo sapiens
agagagccgcggcgcctcgttccgaggagccatcgccgaagcccgaggccgggtcccgggttggggactgcaggggaaggcagcggcggcggtggcgggacccaccgggtctgggactggggaactgcctccggttcacgatgccagtatggacagaatagcttatgatgcttatccccacccaccacttccgaaacattgagcggaaaccagaatacctccagccagagaagtgtgtcccacccccctaccctggtcctgtgggaaccatgtggtttatccgtgacggctgtggcatcgcctgtgccatcgttacctggtttctggtcctctatgcggagttcgtggtcctctttgtcatgctgattccatctcgagactacgtgtatagcatcatcaacggaattgtgttcaacctgctggccttcttggccctggcctcccactgccgggccatgctgacggaccccggggcagtgcccaaaggaaatgccaccaaagaattcatcgagagtttacagttgaagcctgggcaggtggtgtacaagtgccccaaatgctgcagcatcaagcccgaccgagcccaccactgcagtgtttgtaagcggtgcattcggaagatggaccaccactgtccctgggtcaacaactgtgtaggcgagaacaaccagaagtacttcgtcctgtttacaatgtacatagctctcatttccttgcacgccctcatcatggtgggattccacttcctgcattgctttgaagaagattggacaaagtgcagctccttctctccacccaccacagtgattctccttatcctgctgtgctttgagggcctgctcttcctcattttcacatcagtgatgtttgggacccaggtgcactccatctgcacagatgagacgggaatagaacaattgaaaaaggaagagagaagatgggctaaaaaaacaaaatggatgaacatgaaagccgtttttggccaccccttctctctaggctgggccagcccctttgccacgccagaccaagggaaggcagacccgtaccagtatgtggtctgaaggaccccgaccggcatggccactcagacacaagtccacaccacagcactaccgtcccatccgttctcatgaatgtttaaatcgaaaaagcaaaacaactactcttaaaactttttttatgtctcaagtaaaatggctgagcattgcagagaaaaaaaaaagtccccacattttattttttaaaaaccatcctttcgatttcttttggtgaccgaagctgctctcttttccttttaaaatcacttctctggcctctggtttctctctgctgtctgtctggcatgactaatgtagagggcgctgtctcgcgctggtgcccattctactaactgagtgagacatgacgctgtgcgtggatggaatagtctggacacctggtgggggatgcatgggaaagccaggagggccctgacctcccactgcccaggaggcagtggcggggctccccgatgggacataaaacctcaccgaagatggatgcttaccccttgaggcctgagaagggcaggatcagaagggaccttggcacagcgacctcatcccccaagtggacacggtttgcctgctaactcgcaaagcaattgcctgccttgtactttatgggcttggggtgtgtagaatgattttgcgggggagtggggagaaagatgaaagaggtcttatttgtattctgaatcagcaattatattccctgtgattatttggaagagtgtgtaggaaagacgtttttccagttcaaaatgccttatacaatcaagaggaaaaaaaattacacaatttcaggcaagctacgttttcctttgtttcatctgcttcctctctcaccaccccatctccctctcttccccagcaagatgtcaattaagcagtgtgaattctgactgcaataggcaccagtgccccaacacatacagccccaccatcatccccttctcattttataaacctcaaagtgggatttcactttctgatagttaacccccataaatgtgcacgtacctgtgtcttatctatattttaacctgggagactgttgtcctggcatggagatgaccatgatgctgggggttacctcacagtccccaccctttcaaagttgacatatggccatcccattggcccagaatccacagacacacctaagcctgtggcactgggacaggaatagattttccatttgagaggcacttcctgtgtcagtcttgtttgaaggaggtggtgatggtggatagaggtgaaggaggtagggagtgccctccaagtgcaaaaataacaaatatgattattgaccatcggggaattctcacacattgatttgttttttaagcaattgccagaaacccccttttttagcttttgcttggggtgggggtaggagttaaggtttattcaatcctgtcctgggtagggcgaaagttaatctagccatgtgatttttcagaaaagtaagtggaacatgctgccacttttcaattctgtcagtgcttccacatggaaacaaaatgcaataaaatttttccaaaacctgaaaaaa

SEQ ID NO: 10841 - DNA, 376 bp, Homo sapiens
aaaatctgttacctcacttgtggtgctgggtcccctcatcctctctaagaagatgtgatccattactgaacatgaggtgcccctcttacccaaggaatttataacatgactctggctccacagtggtttctagttcttcccccacaagcgaaagagctgtttgcaactttggagttgctgtagactgaactgtagcttgtagctgttgaattaagtccaaaatctaaggaatgcgatggacttgtgcaaagggatccagaagagacactttttagttgatgtttcaagaatagggagagagaggatgggtaccatggaataccaaagtgaaggactttgtgtcattcagtaaaattttcttttttcataaaaaaaa

SEQ ID NO: 10842 - DNA, 419 bp, Homo sapiens
ggtcgaccagcaatgaataactaaataggaaactaaaatttttaaataaaattaaatgtttaaaaaacatttacaatagcaacatatgaagcacttagatattaatttaataaaatatatgcaggatatgtcatgttcatgggttggaaaagattcttgttagtgcatcaattgtccccagttttatctataaattcaatgctattctaatcaatatcttagcaatcagatattgatcaaataattctaaaatctatgcagaaaggcaaaggaactagaatggtcaaaacaactatgaaaaagaacaaagttgtaggactctcattacctaatttattcccgctgcccaatttaaagatgtaaactgggtaagcagagtccttcagctgaggtacagtaaaaaagagtatgattttggt

SEQ ID NO: 10843 - DNA, 335 bp, Homo sapiens
cttaaaaataaacaagtaattaaccactctaattgttcagaaattttaccatttgaccttatttgaccaacattaacattagtgggggctttgcccattaaaaaccccagtaagtattttgagtgcatcctatgtgatgtggtgttttgagcatagtaggcacccacagcaacttttctgcgtggtactaaaactgccgaaaatgcgacgtagaatcaccagatctttagtgtttaatatccctggtataagatgttataattaatgtaatttctttcttggcaaacacctcatgtctgtcttagtgaagatttaataaaccacttatttttctt

SEQ ID NO: 10844 - DNA, 743 bp, Homo sapiens
ggtcgacttttttttttttttttttttagtcacacaattttaattgtgaattatagtgaatggtaaacagtaaaagagtaattacatgaaaagctccatattttgcatgtttcaactgttcttcattgtctttacttgtaaggtgttgaaggtgggatccactcctgaatcttctttctagtggtagaataaggtacatattgttctggggtgccagtcacgttgaatttatggttcgtccaaatgaatttacgagcagtaagtggttttgttgttggaggatcatcagtcatactgtgaagccaacgatgccattcaggaggcaccatgcttccatccacatcccagaatgtgtttttgccattcatttcagtagtatatacaacccatcggtgacggcctggggtgggaagatgaacatttaaaaagaaaaacttttttttttaaagcatagatgcataatatccaaagaagacaacctttttattaagaaaagactttttgtgatcttatataagagagctattggaggaataacaccctgggtgaattcgtgaaggtaagctccaggaggtgtgtggcaaactttaagcagcaacccgcagcagggactgagatgattcactgctgtgggtggggctcaggcctttcccacaggggagaatccttgcttccctgccagctccccacagagggagtagcagacaggataggaaagtgtgttcccagatgtacagggtatt

SEQ ID NO: 10845 - DNA, 321 bp, Homo sapiens
tagacggccgtctgatttttttttccccctttttctttttcagagggcacatctgctcgataacacagagaggctggaaaggtcatctcggagactagaggctggataccaaatagcagtggaaaccggtaagaattctgagagtgagcaaattgtcttgcttatgcacagcagtcttcacaacacatgacatttcagggaaacttcaaaggagtagcagagacagcagcccgagatgtggtttacatattggggagacaattgggagcttatttgcgcttatcttttttcaagttaaaaggcatgacatctactgaaaac

SEQ ID NO: 10846 - DNA, 321 bp, Homo sapiens
caataaagtatgacggacttattgccttggcagtacaaataaatgtgatcataatctttttaggaagcatatgcattcatctcatgaatagcacagtggctgagagcaagagttccagggccaatgcttcgtggctctgcttttgatcaaatgggtgacctttggatggttacggaaccgaaagagacctccattaccctgcctgtaaaaccgaagttatactcgtcattttcgcatagcgttttttttcaggatcaagtgtgactgttgaggtgaaacacatttactgtgcttaataaatgtgagctataattattagga

SEQ ID NO: 10847 - DNA, 986 bp, Homo sapiens
attcggcactgaggttttaagactcagcagaattcaaaatatgaaaatttattttgcataggaaacaataatctctggtaaacatcattactgcatctaacaaaacaatgccttcaattaaagggggaaagtgagtttttaaacattagggttaatttagaagaaaatacagtatataataatctcaacatcatgtttagggtaaaaatgctataatgtgaaaaaagtccctaagaactggacagaacctacctaacaacaccatttaccgtgtatgttttcaatagacaaaacatattttgtaccaaattccaacagtggtaattctatagttgtggccctttaaaaaatgggcagcattgtacttgaatcagaaagcttactgggatttcctcatcgaaagtagagattgcagctaatcctagtaccttttgttagtaattacttaaggcacagtgcaaagttgaaggactgttttggtacaaactcaagccagctacatgtatgcttgccttggtatccttgctagagcacatgcaggtataataccgtattatacacaacaaggccaccctgttgtatctgtgttacaattaaacatcagtcccagaaagtgaaccctagtcatttattataggtgcccacctctgacttggaacaaaatgccactccattcatgttcatttttgtcctggagaggatttatttcctaaaagattctgaaagccaacaaatcaatgtagttcttcatagagaacttaagagtaaggctcaaaatggcctcaaaatgggcttcttggatgacttccaacagtgactggccttctcaacactgcagatgtctgagcactaccataacctaacgaagtgaggaaggaggaggcaaattggtatttttaaacaagaatttaagtggctctttctttcaagtctaaaaaaacctttggctttaaagattataaactgatttactaaatttataaaag

SEQ ID NO: 10848 - DNA, 477 bp, Homo sapiens
aaggaattcggaacaggtgcatttcaactagtacatgtattcaccgcccatccaaatataactaactacgtgctgccaggtacttgtgatactaaccagatgatacaaggagttgaacgggagagggaactggagctggcatatctttgacaaataggccaagtcaatgcaaattttgcaagtcatgggccataaaactgttacataaaccttttgtgattttggcaaagaagtatgtgaagtttttattgaagaaactaacttaaacatacaatattgaactgttatttttctgtcttccgttttcagctaaattctgtccaacgtttaataaatcaatgggagggaacagggtaaatgaactgaaaagtctaaatatatcaacttaaagtagctttggtgagtatgggagagttttcttgagggaagtgtcttacctattgcttttttgcagaggatattttactttagatttgg

SEQ ID NO: 10849 - DNA, 94 bp, Homo sapiens
tgctgatttctactttaattccattgaggtcagaaaatatcctctttatgatttcaatcctcttagttttattgagacagggtattagccatgc

SEQ ID NO: 10850 - DNA, 336 bp, Homo sapiens
tttttttttttttatgtgaataaatacaaaagattttattttttcctcttaatttctttaaaatacatatcattatttaaagcagaaattgtaacttatgacaggacttacaatatttaaatatgtagatttaatatgtatgacaactacagcataaaagacaggtatgataaatggatgtacatacttacaagatttctacattttatgtgaagtggcacatcaactctaggtagactgaaaaattaagaatgtatattgtaatcactagaacatccaacttaaaaaaattattaaaacagtatagctaaagagccaataaattaaaatacaatt

SEQ ID NO: 10851 - DNA, 183 bp, Homo sapiens
gatctgagctgcgtcatcaggccagtgtcacaccgtcatttatgtgtcctcctcgagcagtgcaagtctatcatcctgggtgtgggaatggaacataactatttggggagatgttaaatggaagtgttagcttccctccataagagctcacttaaattttttttttaaattgaaatcaaatcc

SEQ ID NO: 10852 - DNA, 84 bp, Homo sapiens
atatacttaaaaatagttaaaataaataaattttattacatatactttaccacaatcaaattttttaataaaaatcacagtaac

SEQ ID NO: 10853 - DNA, 462 bp, Homo sapiens
ggaagcccttgctcttgcactttgcattaaaagtgggaaacgattaatcgaaagggagattttattcccaggttttccctgggactttgtgatatcataattgaacagttcttttgttttacatttcaatttagttgcctcatagaagtataactgcccaatctatgagtaaagtgtaagtgtcaaaactttacaattgcctccaagtcatattttttgcagaagcacatttaaagcacttttctgtaaaagctagttccttacctgcttggaaatctttttgtttgttcttctattcctttgttaatcagatgtaatccctttctttaatgtgtatttttcttggtccaccatgtttacaggtggggagacttgagagatacttaggcataactggggcagaaagtgtgtaagtgaaagtatttttcaaaggaatgcagttattatccggattgccatttg

SEQ ID NO: 10854 - DNA, 427 bp, Homo sapiens
gcgaccgccgcggaggatgtgacccggcagtacggcaaatatggcgtcatactgttgaatcttcaagtccaggaggttcagcaacatcagatgaccatgaatttgatccatcagctgacatgctggttcatgattttgatgatgaacgaacattagaagaggaagaaatgatggaaggagaaacaaacttcagctctgaaatagaagatcttgcaagggaaggcgacatgccaattcatgaacttctcagcctttatggttatggtagtactgttcgactacctgaagaagatgaggaagaggaagaagaggaagaagaaggtgaagatgatgaagatgctgataatgatgacaacagtggctgtagtggggaaaataaagaggagaatataaaggattcatcaggtcaggaggatgaaactcagtc

SEQ ID NO: 10855 - DNA, 567 bp, Homo sapiens
ggggttccctccttcgctctacttgccaaacctgtataccaagctgctaaaggccctctccatgagcctttaaaaccagcacagcctattacccaacctttctgtctactccaaaaggctctcatctcagcccccatcctcaccctcccagacctcatcaaaactttctccctgtgtaccgacaaatggcatggagttgcactaggtgttctaacccagtccaaaggacccaccctccaggttattgcctacctctccaaacagcttgaaaccacagttctcagatggcctgcctgcctccaagtgctggtggcagctgctgtcttcacccttgaaagcctaaaactatctcttcatgccaacctaacagtttattcaacccataacatcaaagacatgctaactcaccacagtgtactaagtttcatctccccctcacagcttctccaactgtatgctctattcataaaaactccccaaatcaccgtgctaaccaggctctcgtctaaacccagccatgctcttacctgaaatttctacctgtcaagaccctgcacacttctgtgt

SEQ ID NO: 10856 - DNA, 1897 bp, Homo sapiens
  misc_feature (1)...(1897): n = a,t,c or g
gaattccatccctcccccctcccccaccccaaggacaaaaagaaaaatgctgtggctagaggacaggggtggagagagggaaaaaaaggacaaaaataaacaaaacatcaaatatgaaaattctcagagataatgcatttataaacacagaaatggttacaacaaagatggccgtgatgagtgggtataatatatttatatatatatatttatatataaatccgtgtccggcatctgactgtggcacctagggagctaagtccagtccttgagtttaccttgaactctcccttctccgcaacacccctgttttggagtttgcacagattacacaaagcctcccacagctccttgggnggtgggttggggagacttgagagtataggtctttgtaggcagagaaggagagaggcttcaaggaaatccgtaaaaccataacacacacttctaagccacctgtgacccaacttgggaatttctggccccttgggggacccacatgctcaggcccttgcccccttcaaataaaaggaggtctagcccctaccccaaatctccttctaccagcagtcaataggaagcaaagtgagacgatgtaggggaagaaatggctcctcagggactgaggcatttgagaaacctctgttcttttgccaggcaagaatagaacaagaggctggttgcatttggggctcccttttctctgttatctgggagggcccagccctctagtcttacatcagcccaaactttgaggataaggagggtaaggatagggtaagtggccacactggacaaggttctatgaggtcatagcaaatccttcccttgagcaccgacccccagttttagaagctttgccttgggaggggaggctgctggatgacaccatcagctcagtattcctttgcaatcaggagggctgatgttccttttgaagaagagttcagaaaaaggatggtatcctgtgaaggaaagccgtgacagaggcccaaggagatggagccaaggcctgtcaaggaagaaaaggacttttcccaccaagagttggagaaagaagacaccaggactacttcttcctcttcccagtgggtggcagcacggatctctaagagctggcccaggtgctccacctggatggtgctggtggtgacagtgaggcagatgtccttatgatgctccgccgtcttatacggggtcaggtcaaaggaacactggggtggagggttgggattgctgtccccaccacccccaccctggggggctgccccaggagactggaagtgtggtggtggctgttgctgctgctgctgctgctgctgctgctgctgctgctgctgtgatgcctgggaggcctgggcctgggcctgggcttgagcctgagcctgagcctgggcttgagcttgagcctgggcctgggccactgctgccgctgctgctgctgcctgcacctgttgctgaagatcaggcgggttgtgtttgcgcatatgtttcataaggtatgtttctgatgtgtatgcccgactgcagatagtgcaggtgtacaccttggcatgcttcactgtgtgcgtagacaggtgcacctctagtgaggctgcatccgtgtacgcccgatgacagttgtggcacttgaagggtttatctttgttgtgttgccgtctgtgggactgcagattggagagttgtgtgaaggctttctcacagcctgggtgtgcacatttgtatggtctatcaccagtgtggattcgggtgtgctgctgaaggtgggagagctggcggaaggatttctcacagaagttacaactgttaggcttagcccctgagtgtatacggatgtgctgggccaggtaggagctgttggcgaaggtcttggagcaatgtggcaccctcgtgccgc

SEQ ID NO: 10857 - DNA, 140 bp, Homo sapiens
gtgtgactgaggagcgggtagtcaacagagcaaagatcaggaaagctgcctgctgcgtttaatggcaggaaagtcattagtaagaatcatctgggtggactgatgggggtggaagtcagcctcaagtaggtagagaatga

SEQ ID NO: 10858 - DNA, 358 bp, Homo sapiens
ttttattttttttgaaaatcaaattattttattgtaaaaatttatataaaataactcataagggcaacagttaaaaacaagttaaacagaactaaccaaatatataagatatttcaaataaaaaagtaataataaaagccttgctagcttgtttgaaagtatatataatactttatttcctagacttaaaattgtgatttccattacacttaattagtatacaaaatattatttttaaaagacaggttctcaaactcaaggattaacaaatatttgcaaagtgatcaccaaagtctttgtatatttgttaacaaaaacacaaatccagaatataaaatctatctgaaattatctaagc

SEQ ID NO: 10859 - DNA, 251 bp, Homo sapiens
ccaaacctctatcttagatgttaaagaagacccttattgactacactggccaagaagcaacagagatataaagctgaatcttgtagctaacccctgaaagcaagccaacgcaaattcctccgccaggccagtcttctagtgccaatatggagactgtgggccacagaagattcccttctatttcaggttctcaaaaagtggtgtagactcaggcaaatgccaggaaatgtgtccatatggccagaggagac

SEQ ID NO: 10860 - DNA, 187 bp, Homo sapiens
caggacagcatttacgttttttggggggtaagaacaggttttatcctgctgaccaaccttaagcacaagaattaatccctaactccatttagtgataaggaagttggatgaacaagtgatagctctggtaaaatgttatttctttttgccatcttggatgagtaatgtgtcagcagtaaggtaggaa

SEQ ID NO: 10861 - DNA, 71 bp, Homo sapiens
aactcagatcttgctaagatttactggttgggaatccaaagttaatgccaagaagcagccgccagttggga

SEQ ID NO: 10862 - DNA, 524 bp, Homo sapiens
gccaccggctcacgtatactgtgactgtatattgattgaaagtttctctttttttcaaataattaacaggtttaacagaatgtatctctgatctattcctttcactgcagacatctattgccttttcagcctagcagccctctcccctctatggagactcacacttcctactccagtcacgtgcctctcatgggggctgccatgttctcacatgactccacccctctggcctcagttgattggctcagggatgaacatctggcctaaattggccaatcagaattcttcccttgaatatttttccaaactggaaccaggccaagttaatcattctctgtgatgacaggaactgtgtgtaatgagaaatacaggagcttttgtgaccacatatctcgccttatggagaaaaggcttgagtaagaagaaattaagctagtatgcagacaaacctaggagacagagatggagagagagatctgatggtgtctccattccagagatgggagagagagatcttgtgggta

SEQ ID NO: 10863 - DNA, 1221 bp, Homo sapiens
aaagtaatcaaaagaaataaaatctgagacataagcagcatttttacctcctttctgcaatcctttaaatgcctcacagaatacgtcttatcttgtaaaaatactttcataaaaggccaagttgtcatgattcttccatttgattaggggcaacgtgtgctattaaaggggaaaaaataatggattgcaaatcgccttagctttcaaaactaatttgttttatcatttaagaatacttgaggaacttctttgatcagaattatatttcagagaattgttaaagcatttctgatttaaagaaaaaaccatctaattattgaagcatttctgtatttcacatgggggtaacagagacaattatgttatagcgagttacaagttgcaatttacatcttctataacacatgacttggattggtctaagttgccagaggtatcgggtaactggtcattgttttgttttgtttgttttattcttccttttttttggagtcacactacatgtatagtattgctcacgttagcagttttctgtaaggagggcaagtgtcaggataataggtggactttttactcacctattttaccacaatctcaccctgcaggtgatggtcaatgcttgctgctccatctttattcatcgttaatgttaatttatgacaactcagggggaaaaacataacaagcctagtttggttacaggtacacacaagcttgaatatttctctgcactgaaatgaaagtggcatagttcatcaccacctgctacattttgtagagcatcttatcagccatagaaataggacaatctataaaactttggggagggtgggggaggaaatgacaaagtgtctgtcaaaaacaggcataatctaaaacaaggtggatgtagcaaatctctgtcactgcttgagaactttgagcttgtggcagttttgcagacttacatgacttcagcactttacgacatattttttactatgaatgttcaatacaatttaatatttataactgatttctgagggatctgctccatgtctattctgttatctgcatgaaaacaaaatgtatgccaatttcagtatgtcaataatcaaggttttaaatgtttggaagaaaatacaaacaagattgctgatctgttctgtattagtgacattctggtacttctagatttgcaataaatttatggattttttatttaaagaaaaaaaaaaaaaa

SEQ ID NO: 10864 - DNA, 287 bp, Homo sapiens
gaagcttacctttcttctaaggaattgaagctcccagtgacctggagggaggattcgtgattatggaggcggttaaatcccaagatctgcaggataagtcagcaagatggagtcccatgagagctgatggtttagttccagtctgatggcagcaggcttgacgccaaggaagagatgatgtttaattcaagtccgaagcaaggaaaaagctgatggtcctgtccaaaggccccttggaggttgtgtaggttggctatacagattctacaacttcccagacgagtggc

SEQ ID NO: 10865 - DNA, 327 bp, Homo sapiens
ttagaaataaagtaaattaaaatttaacaggaaaaatgaaaatgaaagtacttcggtttacagaacagaggttgattgaacctgtctggtagaacctccgtgatcagcttagcattgtcagtcctgaaataatcttttgtgacctccatgatcagcttagcattatccggcctggaatatcttgagactcagcatacagcggatgtatgtaatggcaggtgcaaacaaacagaaaggtaaccaaatacaagtatttatgctgtacttactctattagaataaattagttaacataatatatacctctttttatcaaattggaaatta

SEQ ID NO: 10866 - DNA, 670 bp, Homo sapiens
cacggtggatttttttgaaatacccatgtgtccaatagcaagttaaggaacctagcgcatcaaattttgttttcttcattcatttggaaccttattttcgcaaaaaacctagctggaataataatgccatattgtattttgcacactgctttattttctagaggctctgggagcaaattacattcatcacattacctctgctctctcaagattaaagtctttcagcaacattctttattgtcatcataagggaaaaacttttatcgcaatgatagtcagttcacattagtttagcactatagatagtattcagaaattgctttctctttggtaaagaagataaataggtgaattttattgcctgtgttttcaggcttcagaggtacctggcaccttactcaagcaaaaacaaaaaacagctttacttcaaaagcatgtgcctctggtaaattatccatcacttttgttttaaagtggtccctccaagaataatgtggcatacacagtgggtttggttgtaaggcagatgtaatagatgacttcaaaagcctgctccttactgcactctggacaaggccctggtctgtatagtttggcttcctcttgttaagtcattctacaaggtgacttgccattttgaactttcgtaagagaccccagcatttagact

SEQ ID NO: 10867 - DNA, 324 bp, Homo sapiens
ggggggtggaggtgggagggggttgagggctgagtatgctagtaataaatgggagtcatatatgactttgttcagatgaccttattttttcataattttgtagcttgttgctatccatgaacatacgcatccctcagtagacagtttcctttactgtgtgcatttttactgtacactgtatagagtagagtatctgttaagtaaaatatatatgtaaatttatgtcttcgtgttctgaatgttagatggaaaagcagaggagcaacactacactgtactgacccctgggaaaataaaatgattaatgtacctaggctgtcactt

SEQ ID NO: 10868 - DNA, 418 bp, Homo sapiens
tttttttttagagattttcagaaataattttatttacagaaaattcacagaggattaataaaatgtcatgaatacaattttgttggtaataattagcagaatcaagagtagattaatatataaggtaacatgatatattaataatacaaactaaaatatcaattttatgctagctttatccattagtttttcatattccaattttaaacaaatctagaaataagacagtatatatgaaacaaatttgctaaatatttttaaattatgccacctcagatattacctcaattttaaaaccatctgtaaattaaatgaccttcccattataatttctaaatataaagaagcaccagctggaactcaaaatgcataaaagatattgttatatattttaagaaaatattatattagcaatatc

SEQ ID NO: 10869 - DNA, 473 bp, Homo sapiens
gatggtcttaatattatctttccacgaaatggatatatttctagaaaatatatatttactaccataatttctaccaccacccccattttgctctgcattatacacagtagagaagaactgaagacactgctgtgacagtattgcagtccaaggcatcatgtgctcttggtgggatactctgattatcagcatcaacagtactttactgagcaagactttgaaggcctgagaagagagcaaagttatggaaagtatttaactcttattttatattgaacaaacaaggtttaatcatgtcatacatttttggttttctaagcagagactaatacaaatgcagccacataaaggcagtgtactggggggtggggaggggaagggaaaccattcacataaaatcagctgactcaaaattgaggatagttaataggttgaaagggaaaaagtatgttgaaaatttagacataaatgaa

SEQ ID NO: 10870 - DNA, 1373 bp, Homo sapiens
aaaatttaatcagttatacttaaattccaaaagaaatacactaccctgatttatcaccaagttcctcattttactctcttccatacaatctgtgggaaccatcccataggagtataaggcagtaactgaggactcttacccacgccactctcagatgtatgttaaacctcaagattcaccaaaaaactccaaggtttttattttcacttttaatgatcttttacttaataataaaatgaaaaataagaatataggaatacatacaatctatatacatatatttattgcaaatacttaaaattcttatgtaaaatgattttctatatttgtgaaaaaatatgactttttaaatggtgttgacaccaacttctctgtacataccctcaattccaatgttaacaattcctttaaaaaggcaaaagacacaaaagtttagcatttaccaaaccagtctgtacaaaccttacagccagaagggaaaaaaatagcttgtggtaaataagtcaattttcttttaaaataaaaaataaaccccaaaactattccccttattgcatttttctgaaataatctgagtgtctttagagtaacttcctttgaaataatttgtgccttaacagtgaggtcctacatcaaacataccatatatgagaaattcaaagtcttccactgtcactttttacagatattaaaatatatattacttaaaatatattactggaaagctatttttaaaattgatcttcaatagttgtatcaaatgtaaagcattaaaaaaaataaagtaaccaagaatctacgaagctattgcttcaactttaggaaatgttttacctactgttctctttcaataggtttgtaggtattgaaacatggtaggaaaggcccctgcctatcaccatgtttctcaaagtctctttggactattctataaattgagctgaaaactacccttggccaagttacttacttagcacacagttgtaaggagatggggagacttttccctccttgctatgatgtgaaacctctaggtcaaagagaaaacactctggcactgctcactgatagtgagttctagaaataaatagcagtgtaatgaccagagaagtctccccactcctcacccccattatagcaaatcacttcaccagagagttatttatggctctctaaggtggagaaaggcaataataaacaacagaatgttaactgtcaggtcattaatatgtatgacttttcaccttcacctggaaggcaatgaggtcttcctttggctatttaaatctgagataagctcttaaaacatgtacatccgtatgccttcacagcccaataagtatgctctctccaccccaagtttcccatttgcc

SEQ ID NO: 10871 - DNA, 627 bp, Homo sapiens
aggttatcttatgatgaggcttttgctatggctaatgatcccttggaaggcttccatgaagtaaaccttgcttcacctacttctccggaccttcttggtgtgtatgaatcaggaactcaagagcagactacctcaccaagtgtcatctaccggccacacccttcagctttatcctctgtacctatccaggcaaatgcattagatgtttctgaacttcctacacaacccgtgtattcatcccccagacgtttaaattgtgcggaaatatctagtatcagctttcatgttacagacccagccccttgctctacctctggagtcacagctggattaactaaattaactacaagaaaggacaactataatgcagagagagagtttttacagggtgctactataacagaggcttgcgatggcagtgatgatatttttgggttgagtactgatagtctgtctcgtttacgaagcccatctgttttggaagttagagaaaagggctatgaacgattaaaagaagaactcgcaaaagctcagagggaactgaagttaaaagatgaagaatgtgagaggctttcaaaagtgcgagatcaacttggacaggaattggaagaactcacagctagtcta

SEQ ID NO: 10872 - DNA, 421 bp, Homo sapiens
ttttttttttttttttaccatcacttttttatttggcagtaatagtaatacatccatgttacagtgcttattttggctaaagagccagtgcaattttttctgctactgtagtgttttacttttacacaaattaatgagtacagtccttacatttaggagacagaaacatttactgacatcagctaagtaaagctaatacatggttgttcacaaactaaacaaaacaataacataatatactcattaggaacaaagtagggatgttcttatttccactaatcacagattatataaattcttaaatttcacatacatatttctaaatctaagcaaaaaaattagaattcagcttaattcctataatcattttgaaatttacatcaaataatttctgaatatatattcacattaaaataaaagt

SEQ ID NO: 10873 - DNA, 199 bp, Homo sapiens
cctcacgggggggtcataagcagttaaacgtctacactgaaaagtatcatcgactcatttaatgttgtatgactgatattcatgaaataagccactttcttctcacacaaacttccatgaaaatgaaaacacaaattctcaccattgccaacatagctgttcatacctagaacaccttttccttgagccctactttctc

SEQ ID NO: 10874 - DNA, 390 bp, Homo sapiens
  misc_feature (1)...(390): n = a,t,c or g
cggcgatgcactaggcctcgntcagggcggctgccccgggacccgcagttgagtggtgattttatgcaatggcttcaagccacagttcttcaccagtgcctcaaggaagcagcagtgatgttttctttaaaatagaggtagatccgtcaaaacacattcgacctgtgccatcactgccagatgtgtgtcccaaggaacccacaggtgattcacatagtttatatgttgccccatctatagttacagatcaacatagatggactgtatatcattccaaagtaaatctcccagcagcattaaacgatcctagattagcaaaaagagaatctgacttattcacaaaaacatggggattggactttatggacactgaagtcataccttcaatct

SEQ ID NO: 10875 - DNA, 322 bp, Homo sapiens
tgaaaagtaagatttcattggtatgaaacaatcactctggtactataaatgtcacatgaataaagtgaattttaaaatagaaattattaaagagatatgccctgtttacccttaaaaataaacagaatttcaaacctgaataagttaaatctgttagtaaaagcagagtcgatcaactattcttcacaatggtgagtgcttgatagctaaactttagaatgataccaaatctgttttcaaaactgtaatacaatatagaaatctgcttgcaaactatttgtctagcatttctgaataataatatatttaacatattattgca

SEQ ID NO: 10876 - DNA, 558 bp, Homo sapiens
cacttttacccctctttccccactcctcttctccgaccctccgggaggccttccccacgggatcgtggggactttaccagatcggtttgtaataacacctcgaagacgctatccgatccatcaggcccagtattcctgtccgggggtacttcccacagtgtgctggaatggttatcacaagaaggctgtgctgtcccctcgcaactccaggatggtgtgtagcccagtgactctgaggatcgcccctcctgacagaagattttcgcgttctgcgataccagagcagataatcagctcaacactgtcctcaccatcaagtaatgccccagacccatgtgcaaaggagactgtactgagtgccctcaaagagaagaagaagaaaaggacagtggaggaagaagaccaaatattccttgatggccaggaaaataaaagaagctgtcttgtcgacggtctcactgatgcctcttctgcattcaaagttcctcgacccgggccagatacactccagttcacagtggatgtcttccactttgctaatgactccagaaacatgat

SEQ ID NO: 10877 - DNA, 133 bp, Homo sapiens
gcctttccctgcactttcaagaggctatttctatatctatagtcttctttcactgggcattggtagcacagctaaataatattcttagaactttgctgggccggacgtgatagctcatgcctgtaatcctagc

SEQ ID NO: 10878 - DNA, 333 bp, Homo sapiens
gtcctgttactattgacgtcacacaataaacacattaacagttctatcaatatcctcattcttctaaactgcattttaaagttgaaaacacctttttttaaaaaaagtaaatatatttcatttaaaaatttaatctcaattcaaattttttcagatatattctcagtaaaaatatactttggatcagattgactatttaaatgaattttatatatatatataaacacacacattaacagtttaaaggtaaatgtatttttgcaaaagaagagaaattagggagtgctctgaaattcagtgtagtgatgcacttctgaagtcctatgcagcaca

SEQ ID NO: 10879 - DNA, 971 bp, Homo sapiens
actgctttccttccccctgcttgctatacattgtctggaactggctaagaaatggggaacatttgtgaaaaccaagaaatgtaatggttttggatgaataaaatagaccaaagttaaggtaagtgcacaaatatcagtgtcaggctatggaagaaagataaagagatacttttttttttttttttttagaggggagatgctgaggtcagggcacttatgtgcatcaagtgatggagacagagtaaagagaatttatggatatatatgcatatcttgctaataagtttggtttatcatcacatcaagataaattgcctttagcatagaacttgagataagtagacgttcactagcaagtgctaacatttggatcagggcaaaggcgtttccaggagtgtttttataccagacccctgcttagtccatggggctgaggcatgtcacataactcagagcaagagccttctatttgtgtaagacccaaccctgggaaggatgcccgagacaatagctatgcctctgccccagcctgatgccatgtgatctagagcctgggcagcaacaaccctgtggtcaaagacatggaagaaacactctgcaaatcccacagtctgttcgacggcttggaaaggaagcaagtggcattgggacaattgctctacatgcctacagcttacctgtcaactacagggggctgccaaggtgtgcaagacgacctgggggcagagccatgctcagggcacagatagatggggatgggagtcgagatggggcatgggaagtgatgagggctctgagaacacatgaagcaggtattggacatcagcagatagatgagactccttggcaccacagtccgagcctggggttgggggatagctggggagttgtcaggcaggaacattgatgtagtcatctgaatcactgtcctccatcatggcggcaggctggtggtagaggctcacgtattc

SEQ ID NO: 10880 - DNA, 590 bp, Homo sapiens
cctgatacttcctacactagataatggaacttcaacattagcctattgattgcccaagaacaaacatttttttctaaatgtcaggtgttatggggaggattgatgctgacagcagaggtctagttaaaaactgatgcagaggttcaaatacgttgtgcagtaatcactagaactcaccttctaaagtgtcatgagagctctgattctgcaattagagattttttaatgtgtttttgaaattaccttgtaaaccacaaatctgtgtctctgcattgccccttattgtttcctaccacaaattctacatcaagaagaaagttttaaagttagactggatttatttgtgattttatggagcacaataaggtacattgagatagcatactaaaggaggccaaatacaggaagcatcatcttttcttattctcttactgcctggaattttcccactgacctggaattgtgcacagttctacaaaggacaattgacattgttttccttttactaacgtacgtgggttttccttaaggtccagactgaattttgagacctgtaccaggattgccttctgtgtgactttttcttgcag

SEQ ID NO: 10881 - DNA, 1322 bp, Homo sapiens
ttttttttttttttgggatattttatgaatatgtttaattcaactgtttctttggaatgtagtagtcatagtttggaatttaagttacagttcagttctatgtggtttttacgctactcagtgtctgagaatacaaatgtcatttaaagttaaggctttgctgttcattttgaaacaacaatttacaagtgtcatattgtcatagaaaataataatttctgtaaaaaaaatctgcacaaaatcttatgatggtacaaaacatgaagcaataatataccagtaaaatgaaaacattttactacagaaagttttatagatttccataaagaaaaaatatgttattttacacctttaaaaattacaaaacaatctaaaacaatataaactgaacattttgtaacactgcctttacaaattaataactttataaacatataatttttaaatatatttatcagtgcaagatactttaaattttaaagttgcagtatcatttttccttggctgaggacaactttaagtctgttgcctttaaaaacaacaaacgagtgtttcttagtgctttccttctggtaggattatatcaactaaatgaatgtctctggggacaaaaaactattcttctttcatggtgatcaatattttcctggaaacaaaaggcattctcaatccaatttaactaagatgaatggactgtctcatctatgatgcaaatgtgactcccaacaaatgtctttgagtgagacgtctagcaatgtgggaaggaagatctaaaaaatctcatgtccaacatggcatgataaaaatccaccaaaaccaaccaaagcttctttgggttaattcataggctgcctggtaagatatttgcttccctgtgctgttagaggcttagatgttgccagccctaaggcagtcttattctttgtgagccgctggaagtttctagaagcattcatttaagtctattttttcaaggttgctgttatgaatttttaaaacatttgttttgactttatgtgtttttccccctcttatcttaaaatacttgacccccaggcatcaggatttatagtttcattcttaaattaactgttcttccttccacttcccttgtgtgactcagtagcaaaataagaaagttcctcttgggtccatttttgccatatttggataagaaaaatcctccatgcttttggatttggaagattttatccagttcttcctttgggtctcacttgaaagccaatttgtattatttctttcctcaacttatcactatttctactaaatgccaacatttctatcaaaggtcattttgaata

SEQ ID NO: 10882 - DNA, 557 bp, Homo sapiens
gtcttttccagctgtttgcgaagagccaatttggctgcagcctgtgagttggcagcatcagtcatggcgctggggctaggaagtggcgaggacactctgttcaccgtccctggctggatatgagaagcaaggttcatatagatggcagaggatgttgtacgctgacatggaacagaagaacttgactgcggttgataattgatggcgggattcatgttgggtgttgtggtgcgtacaaggccaggcttaggcgggccccgcttgaccctgtagctgggctgggtttggtgcaataacacgttgagacatcaacatgtgtggaagggtggtattggtagctgaacggatgacactgtgaccctgtaatgttctcaaattttgaggttcaaccccttgggccccaggccgagagggaagcttagataggccctgctgtcccacatgggcaggagatggctgaacaatagatgctgcattctgtacaactggagtcttctggaccacattctctttctgtagctgactctgtctcagtttctttaacaggaccagtcggg

SEQ ID NO: 10883 - DNA, 421 bp, Homo sapiens
ttttttttttttttttttcaaagttgtaagctttatttctatgtataaagtccagctttattagatgtttctgattcccaaaataatagtattaggatattccttattttaggctttaaataatttgtataataaaatagtgtcagtaggtccaaagctgaaatgcaaagttcagatttctaatacaaaggagaggagtattttgtttcttttggtacagccatggttcccaaactgtgtagcagggcaccttagcaaattaacatgggtgccacacaatattttaaaatttttgagaaaaacatagcaacacctgttggacatcacataaactactactttgaggtagtttacattttcaacattaaatagcattatattcctttctataacaacatatctttacaaaactggggttttc

SEQ ID NO: 10884 - DNA, 93 bp, Homo sapiens
atttttacagcagcacttttcataaagcaaaagactgcaaatccaaacatgcatcaaaaagagagtggataaattctggtacatcagacaatg

SEQ ID NO: 10885 - DNA, 384 bp, Homo sapiens
ataagtagagagtttatttgggccaagcatgagggttacaacccaactgtatggagacaagttgtcctgaacaatacacattcttattagcaacagttataagtaggttttcaaagaaaaagaagaggcagttcctaagttatttaccacgaatttacattgaaacagcataagctatcaattggctataaattgctctctgtatcaaattccaggaaaatgaagataatgtgcaaggcagctagtcgggaacaaaatgactttaaacaattgcccccagctatggttgtggaggggcagtgtggcacacaggaagcaagactaaaggaacatacttatgtctctctgggcctgcatacctcatagaactcaaactgctctatt

SEQ ID NO: 10886 - DNA, 438 bp, Homo sapiens
acaaatatgcaatgatatgctaactagtctacaactctacagccaaattaattgtaaagctatcatttcattatgtagcctttctgtggatcatacccacagcattcacaaaggaaacagacttagttgggaaatcagatctaggtttacaaagaaagaaaatgagatgttttggtctatctctgtggcaatagcctgtatctttctaaaatgtgtacatcacaaattggaagtaattgggatccttctctactagggggtgccatgcttcgtctcaaccagtagcaaaaggcaacgatccccttgcccaaatatcacttggttaaggtaagcagctacttagacacagaatagtgcatttttcccagtggtgagaatattataaaagtaatattcataattcttatttattttttttgaacagagtctcactctgtc

SEQ ID NO: 10887 - DNA, 522 bp, Homo sapiens
ggtttgatgttgaatttgttgatgaaggaagcacttcaatggatctctttgaagcatggaagaaggaatataagttgcttcatgaatattggatggctctgaggaatcgtgtgtctgctgttgatgaacttgcaatggctacagaacgactaagagtgcgtgatcctagggagccaaagcctaatccgcctgttcttcatatcattgaaccacatgaggtagaacaaaaccgaataaaactactaaatgataaagctgttgctacatcacagcttcagaaaaaacttgggcagcttctttacctaactaatttggagaagtctcaagataaaacatcgggaggtgttaatccagaaccttgcccaatctgtgctcgacagctaggaaaacagtgggcggtactgacctgtggtcactgtttctgtaatgaatgcatttctataattattgaacaatacagcgtgggatctcacagaagctccattaagtgtgcaatctgccgccagaccacatctcacaaag

SEQ ID NO: 10888 - DNA, 453 bp, Homo sapiens
ttttttttttcatttccactaaaatatttatttaattgatatcttacagaaataaataaaaacaatttttgtctaatacagataggtttttttatatatatgtaatttgattttacaaaattgaagcatatcaaattgttttctctaaaacatagctcagaaaggaatagtagaaaacaaacacaaagaaatactgaaatagtctcatttttaaattataagcatgggccttctgaatctcagcatgacatgttattagtaaaagaatgtaagatatggagtcaggggacctgggctccactgtttacttgctacatgtcctaagaaagtttcaatatatctgaacttcagttctctacctttaaaacagtaaagatattaattatatcaacttcacaagattgttgggtaaattaaacacgtaaatgtacatgaaagctctttttaatatgt

SEQ ID NO: 10889 - DNA, 363 bp, Homo sapiens
ggcaactgcccaaggccactctgaggagggttgaatgttctttattaaaaggactgaggatcatgtgtgttggtgggccttggactctgctctaagctcaaattttgcagtttctgctgtcatcacagctgggaatgagaaagggagggggctctggttggtctccctctgcctctggagcacacatgcaggacaagaggctgctgtaggagcagctctgaaagctgagttctcgggtccttgtgaaggagggaagcttgcctgccttggagcgtgaaaaagtcttgctggacagaagtctcatggtttaaaaatgggaagggagaggattgagatcacactagaatgcacagaaaattctta

SEQ ID NO: 10890 - DNA, 1388 bp, Homo sapiens
tttttttggaatgattaaagatgtctttataaagtttttttcaagacttcattctaaatacacagaataaaaaatggtgtcagctcacttgtaagacaccaaccagattttccttatactgtctcaaaatttaaagatcaatttccccagagggtgtgcaatgcatcataaaatggcccttttttgaggatgggagaggaagggttgggcaggatggaatattaaattgtaacatgataaacatgcaagactgttatccaatctagataatttatatacattttgatgacttaggaaaacaaagcaatcatttgtgacaagcctaaaaagcttgacatatttaacatacttaggaactttttttgtgcggtgggaattctctaattgtatcatgtgggccttttgaaagtaacaaacagaaggccagtctgttgcaagtttgctgctgaacatcacattccaccctaagaaaacacaaggtggattgcatcgagggtggataccttaccttagcacagaaggaaaaagtatgtcagtgcaaagtatggactaaactgctttcaggaaaaaagttgtaaaaattgatacaggttggaaaagggaattttccttcccggcttggagtcctcccaatttaaggcagaacccatccactccaatttctgcagtttaaaactttctctacttatttagttttctcctctgagttcaaccgctgctggattcgtttggcataactttgtgccaatggagttaatgatagataggatgaagtaacacaccatgacaacgaccaacttttcaaacatccaggacaaccagttttctccctgtggtgtgcccatttcgcttttgtggtgaagcttctgccgttgagcctccaggtactcctgaaatggcttctgcagagatggacctatgccggggacagcactggaagccagggtacagtagcccaaagaaaaagacacatttgggaagaaaagcaggaaaaacgttaaagaaaatgtacttaccacctggactcaaaaggcagggattggataggaagaggaataaaatataaaaatcagagaactgctgaaattctgtgacccctttttagttaaaaaaaaaaaaaaaaaaaaagaaaatttactccatctaacaaccccttaaaaaccaaaatctctcccaccaacatgtctgggagaaaccaagagctgtaaatcagaaaccgcttccagcaaaagagttagtcctcagagtaaggtcagctcagctgatactgtactctggtatggcacaaagaataaaatgaatgacttctcagaagtcccacatttatcaccactagttcctgtaagaactggtttgaaccaattaataaggatatgacttatgcttgt

SEQ ID NO: 10891 - DNA, 1224 bp, Homo sapiens
taccgggcgggggcggccatcttagatgcgtgcaattaagggctttggcgggattggctccgcgtttgggctggtccgctgctccccacctaccagggtcggatccggagcccttccccgcggggcggggacctccaaacaaccgactcctttccaggtgaagggtgacttggctgaagaaacacttaaattctggaaatagcgactcagtatcatggccagcagccttaatgaagatccagaaggaagcagaatcacttatgtgaaaggagacctttttgcatgcccgaaaacagactctttagcccactgtatcagtgaggattgtcgcatgggccgctgggatagctgtcctctttaagaagaaatttggaggggtgcaagaacttttaaatcaacaaaagaaatctggagaagtggctgttctgaagagagatgggcgatatatatattacttgattacaaagaaaagggcttcgcacaagccaacttatgaaaacttacagaagagtttagaggcaatgaagtctcattgtctgaagaatggagtcactgacctctccatgcccaggattggatgtggtcttgatcgtctgcaatgggaaaatgtatctgcgatgatcgaggaggtatttgaggcaacagacatcaaaattactgtgtacacactctgaaccagtgaacattttggatgtttccgtgttctcctgtgtcatctctactgggccataggaccgggcaaacctaccttaaaataggcagaggaaagtttcatgagaagtagtgtgtttaacaagacagactttggttgctgtattcaagtatttggattatgactgtggaggagggcttgcttaagatatgtggttgtgtttttttgtggaaaagtaaggagttaggtggcttgataataggcagggaaaccagattgtcgggactatgacctttttctccagtatgctacctgatttgtttggctggccactaggtggcagcattggttctacttctctgctttttaagagaaatttcaggaaggatgatcattccagttagtttggcattttttgtcgtttgtgcacataacttggtgttatccttatgtcatcagattcctcctaggggagagtttttgttttaattacaaaattaaattctacattgttaccaagaaatttgtggtgataaaaatggaaaaataaaaatttggggagttaaaaaaaa

SEQ ID NO: 10892 - DNA, 128 bp, Homo sapiens
aaagaaaagttggtagggcatattttaagactggctatcttcttttgaaggaaaatcactagcttaagtggaacattaggtttcctgtttcctgtcatagtttttctaaattacattcagtacagcaa

SEQ ID NO: 10893 - DNA, 81 bp, Homo sapiens
aagaaatttgctagggatttttgggaaagacttgattcccaaataaaacactgacttgaaagaaagccttttgctctctac

SEQ ID NO: 10894 - DNA, 791 bp, Homo sapiens
agctgtcttattataatgttttttgacaaatcatattgtattcttttgtacaaaaaagaactacttgtattctagaagaaatatgaaatgcttaatttataagcgggctggagattttttccaatattgttttctttgaaaatgaaaggggatcatctattttagttttggggtctgggaactttttgaaaatttaatttgtggaccaatgttttgtgaaagctaaagagggcaggggttaaaatagggcttgaatttctcattctgtatagaccagcaaacttccctgtgcaaggcaagtttacatcacaaatccaagaatgtttgcatcctaaatgctagtttgcttcagcccctagttaacctcaggacttggtttgcatataaaaggtagacagctgatatgttttcatgaataaatattgtcagccagaaaaggttggtgtcaggtaatgcatatttttttaagctttgttttatatttatttttcatttagtttttattgggaatggttttccaagaactcctcagttctgcctaggtgtttttgggggagccctgttttccatagtgtaattccatttaagaggttgtctaaaagtctttttaattaatagaaagattttaatatccaagagtagtcaaattaaggatataaactttccacaccttcctgtcgtgacagatgaaaagcacagaaaggacaacccttgaaattcatgttaacgttgggtcatttccaatattttgtacccgtttttaaattctgtttagtgtatttacttcatgt

SEQ ID NO: 10895 - DNA, 675 bp, Homo sapiens
cctttttttcattttttagtgcacatatgtcataataaagtaatgcccagctaagtgctataggggaaggcaaagtatgctggctggctataggaagtgacaccatacactgacaatcacaccatacaacagcgccaaacgactattcaaccacttatcagacacatatgaaaatccaaaatgttttattttatttttttttccttaaatagagataaccagtaaacaattttcagaacttggaagtttaaaaacgtgcatataaaaatgggcattatatactttttattgaatgtggattgactgcagtctgctaagaaaaatggggtgtgggagctgaagaaaaaggaagttgtctttttttttttttaaggcttgcttgtgaaaggaacagttgtaaaaacaaaattgcttgaagcagggtcagcttagtgcttcacagtttgactgcttctctaagaggagcccttcctgcgcacgtgcattcaaaaatcacaaaaaagtacaaagacaaacacctaaaacacactgcgtcaagtgcagcaccgactttggtcaaataaaaaaaaaataaaagaaaaattaataattgctaagcttttctacatgatataagcaggtattgcatattttcatatatctgggggaaaataaaggaagactccaaataaattg

SEQ ID NO: 10896 - DNA, 391 bp, Homo sapiens
caaagacagcagtcacgtatcagttgaaaattcttacaacagcattattttctgtgtctatgcttagtaaaaaattgggtgtataccagtggctgtccctagtaattttgatgacaggagttgcttttgtacagtggccctcagattctcagcttgattctaaggaactttcagctggttctcaatttgtaggactcatggcagttctcacagcatgtttttcaagtggctttgctggggtttactttgagaaaatcttaaaagaaacaaaacaatcagtgtgggataagaaatattcagcttggtttctttgggaagtatatttgggattaatggggtgtatacatttatgatggagaactggtatcaaagaatggattttttcagggat

SEQ ID NO: 10897 - DNA, 394 bp, Homo sapiens
ttttttttcagtaattcaataatttattcctctaaaaaagtgtgtaaaagtatatagctctcatccacaaggtatatatgaatgacatttaaaatggaggccttttattattgtttctttttatcaaagtcttttagtgtactgtaccagcgctatactgtagttatttttttaaatgaacttcacatatttttgtattctttcaaattgtttgctatatataaaagaagctcactgcaaaatgcttgaaggaaaaaaggaaacaaaagaaattcagaacttcccagaaatgtacagcttttacatttaaaaaaggttctgaaatatacatacaagcatgctgggacaatcccacccttttcccctccccatttcccctttttttgttcaacct

SEQ ID NO: 10898 - DNA, 289 bp, Homo sapiens
aaattttattactgggctgtttacatgatactttctttcttattaaatataacctgacaatctttattaaatgaaaatatttttgtatcatcaacaacaacaaaagaactaggatgaagaatttcccacattcttaatatttatagggtttctctccagtatacattctcatgtgtgctcaaaaggctgtgtgaaggctttcccaaatgtcttacatttatagactttcaccccactctgactcctttcatatattcacactctagaggacagttggaagattttccca

SEQ ID NO: 10899 - DNA, 565 bp, Homo sapiens
gcagccgcctactactactaaattcgcggccgcgtcgacttttttttttttttttcaaattcagagcgtttttattaaaagaacaaaatattaaggcacaaaatacatcaatttttcaaatgaaaacccttcaaacggttatgtcctacattcaacgaaacttcttccaaattacggaataatttaactttttaaaatagaaaaatacaagttcttaaatgcctaaaatttctccccaaataaatgttttcttagttttaatgaagtctcttcatgcagtactgagctccaatattataatgtacacttccttaaaaatctaggttttgccacttatatacattcaatatgtttaaccagtatattaaccagtatattaaccaatatgttaaacttcttttaagtataaggcttggtattttgtattgcttattgcatgctttgatcatacaaagacacaagtaccagaactagtgattataaatctagcatagcatctgtcaactttagtcatgtacagcctagtgcaacagactcgaacttttttttaaaaaaaggatacata

SEQ ID NO: 10900 - DNA, 993 bp, Homo sapiens
  misc_feature (1)...(993): n = a,t,c or g
tttgaacattcacaacctttattatgggtgagagcttcactacaactttagaaataaaaagtaaaattacaacataggtcctaggccttggcgagcctgaaaaagaagattgggaaggagggcacagggtccttccacctccctggaaaggtgcagaatgagccaggcctaactacagggccatgagcctctagaagcttaggggggaataagaaacactgtgaacttagatatataaatagagagagacccaagcaataggccgggcctgactcccagacccctgcagatcatggctaaggccttacatcctcctctgtcatactggagtaggaggcaggggaagtcatctttggagtattttggtttttcttatttatgtacaaaaaagtccacatccacaatccaaaataaagttctctgtccatctctgaaactgcctgtctcagtttttccacctgtctgtttggccgaagggaatggaatagacatgaagagacaatggatgtgaagaagaaatagagccatgggtttgggtaataagaagagagagcatttggggttcaagagaggtgccccttccccaagaggctctagacatagtcaaggctgagggttcagcccttctcctagctcacataccatcccatttgcctcccactgcctaggttaacatacccaaaggaatgtgccaaccatctaaagaacatttccagaaacagaccccagtgtccttaaaaagaggttaaatattaaccctttgggtgctggccttgtcaggcagagatgaggccaaaagtaggcatctgtgaaggtctgntctggcccttggccagagcccccagagggatcagagtagctggggttgggactccacagcatacttgctcagtgttgggggacagcgaagtttccataatccagggaactcagtccagggaaatgatgtctgaccgacagccagtcaaagagggacctgagggcaggggtcct

SEQ ID NO: 10901 - DNA, 462 bp, Homo sapiens
atttttttttctgtctctctcacagggtttggttttcagataggagttaggtatgagaacaagaagagagaaaacttggcgctgaccctgttatagtggttatagtggtgtccctaaagggaggaaatgatttcaggtaaccacagtgaaatgttaagctgaatgaagagttttatatgtatgggtttaaacagagttgaaaagtgagattcctgaagtgttctttggctgtttaacaattatttgtatgagtgttttattaaaataacggctgctgtctttggtaacatagatgagggtggatttttaaatggctttgtatcgacccctttctacaataatggagtagtctatgttgctccatataaattacagaatgaaaatagatggggcaaaagtttgactaaactttacctttttatagtttcactttttaagttatatttagaatatattgataga

SEQ ID NO: 10902 - DNA, 831 bp, Homo sapiens
  misc_feature (1)...(831): n = a,t,c or g
tttttttttttttttactttatttcaacttttattaaaccaaatccagtaacttttacaatgccttactagagggttgcctcataactgaaccttcatttctggcagggaagaaaccatggcttcaggatcatgactgaagtttggccatgttccatcattaatgttccaacatcaccagggacacaaagctcagcatgagggcttctacccaaatctccctacgacaggtacttcttcaactcttccaccacctcttgaggctcagggaatttgagtttgcgtgggggccccttcttaatcccagtccagagctccgcactgctgccgtccgggcgcagcagcgtcacctcgaagctgcccctccgcgttacgtcgggttcacctttactggaagctctggggcctccaggcgcagcgccctggctcagggccgcggcgttgcgcccatagacgcgtcagctagtgcaatgctcgataacaacggtcgcctcctccattccctccccgccgttcgccagcttctctcgcttctcggctacggcgaccaccagcggcctcagccttacgcttcctcccgcggggagccatggcgcctagagcccggccgagaatgcagcgggactggtgggtggggggcggagacgcgaccactgagcggaaactgggcaacgaagagcgcagcccggaagctctgctcctacagcggaaacctctctcaaaggaagggaaagcttggcccgcagcacccacgtgnctggaggcggaccttggggcacaaccactttgcaagcagggagcgggaaggtgcgggaagcgctgacggaaccac

SEQ ID NO: 10903 - DNA, 592 bp, Homo sapiens
  misc_feature (1)...(592): n = a,t,c or g
tttttttttttttttttttgcaatgtttgataaagtccttttaatggaaaatgtaaaacccctttcaactttaatgtagcaaagccatatgtaacacttgcactttaacaaaagcaagccaatgttttaaaaaaatacatcattaaatgtatatatgtatatatttacatagcatattaagtttaatatttagctttaaaagttcacataaattttaccaaaatgagacaattttaaataaattacaccttttgaaaatgtttaattgtacagtcaatagcttcaacaaaatattgaagtgtctgtatttagtatctactttatatactttatactttacaaattttacaattatttggcagtaattttctgattatgacatgactgctgtgcgattcagcaatttcccagatgcaggcaatagctggtgtttgtgtcctattctcacagtaactgtctcaatgtagtgaaaaatatcagtaattttagtaaactgtacaaggtcacatttacacttgntcaacaatatagcatagaattttttattttttaccanaaataaatacatcattttaaatctgncattttcaca

SEQ ID NO: 10904 - DNA, 724 bp, Homo sapiens
  misc_feature (1)...(724): n = a,t,c or g
ccctgccctcctggcccagtatgctgatgtgacagatgaagaggattctgttccgaaacaccaatgtggaagatgtccttaatgcccgaaaactggagcgagactcacttcgggatgaatcccaaaggaagaaggaacaggacaagctgcagagggagagagacaaactagccaagcaggagcgcaaggaaaaggaaaaaaaaaggacacagagaggggagcgaaagcgataaccttggcctactctattctttccccccatgaacttatcaaagggagaactggttgtgtatttaagagaaatgagagtgcattgcaaagtagtttcccaaggcatttcccctattgtttacatggtcaaaaggaaaatcaaaatcacttctaattacaaaatgtgctgttttggtggggtgggcaatcagattattatagttgatgactgtaccaaagatctggaatgggggccacctttatattttaatactcaagtcctgtgctccttttggccactttaaaaagtcttccctcaccttgggataaatagggattcagaaagctaacagttttcattctgaaggaggcaggaaacattaatcaatccctccctggggattaaaatgtgggggcatggcacattggctttggggagttcagtatttcagctgttaagtgttagtattgttttangggcnggaattaggaaggcntattgagggnggcccac

SEQ ID NO: 10905 - DNA, 792 bp, Homo sapiens
gcaggaattctacaatcggcaagtaagacattttatttctgtaattgaacataagcaattccaaatgcttttctaggcaagacatgccagcgattagaaaatgagacagcttaaagacagaggtacatttaacagagaaaacacgcctggaagctcggccggccccgcccatgctggctcagttcctgcccctggagggaaggggccgaggggcttcccgtcccaggggaactcccaccacaggagtctgcagacgggctggcctgggcagtcagtcccaggaacactgaccatccccttaggggaggcaccacgccctggggagcacagttccaggccagggccatgggtcttgccctgaagaccctccctcagggaccacgcgccctgaccctcattgcctcaccatattataaaacactaaaaccgcttaagttcttccccacagagttggggaactaattgtaaacagaatacacgtctacatatcagccctgagacagctggccccgctgcacacgcagcctgctggccccagcaagacacggtcagagctggtaagtgctctacagcattcagaaatctgaccacagcgtacacacagctcacaagtcagtgcaaacagaagctaatgacatcctccaagaaaattccatacagttatgacaatggaaaacctgttatacattgtaaccatacatcattagcaatgtttaatacatcttactataaacactgaatttctaagtacatgatactcctagcagcttaatccagaaaataacgatgtgc

SEQ ID NO: 10906 - DNA, 1439 bp, Homo sapiens
aagctcaaatttttattaaccttggaacaaatgcaataattccttacagtcatatagcattttacaattctgaaagaattttcacatataccaattgaaccctcacaacagccctgtgaggtaggcagggtaggtgttactttcctactgctagtgaggagaacaaggctaagaggtgaagtaaggtcacacagttggtaaatgatggagctaggactagaacctaggccttctgacttgctgcctccctgaggaacattcaagtaataatatcctatgctatataatgaatatttatctcctatgatgttgatcaggtctatttttatacattttacctgtttttatattacctttccctaatactgaaaaacactaaaactgatacgagacatttgagacatttcttctctgttactggactttcttagatatatcaaacactatcctaagatgaaacttctgttttgaggatcttggctataattctccattatgatatgacatttattttacaaattctacaaaagatgttgaacttaagaaaacaaaacaggtgtgtttatattctcaaaagctttgccatctttcccaatatgactttaatatgtgtataaatggaaaacagggaaaggtgttcagcaacattacagtattattgggaaacctatgcagagtgcacataaatgcaagttacatcacattaatttgttttctttgttggccttatagaggatgaaccattagtgtctttcaggtttgatcctgtcttatatgtgacatcctcagcaacaagctaaaatgatctgaattataccaatagcggggctcaagcagcagtgatcaaaacataatatgtatgtggtaaaaaggaacacttgttcttcagtggttttgcctaggtccagtgtaattacttatcaaaacatgttttaagctacagcatctctgttaaatttagaaatgtgaaacatggaagagttatcaacttggaatacaatactaaaactgaatataactgacccaaaactacctgtcaaaagcacagtaaagcttaacaggcataaaaactaaggggtaaaacccaactgctctgacataagagtgaaaaacagcaaatgcaaaccatcaggttaaagtgaatcacaaaacattaggcatgtagagcatgttttaaaaataggaaaatgacactgagctgtattaccaggaataatatttttaaaattccaggtatggccttctacatttaatagcaatggagagaaacaagcctatgggggaggtgcagaaaatgaatgggatctagaaagggagttgagtttggaagttaaggaagtcaaagaaacaaatacatccaaaatggatttagaatctctcctctaaatccatcctttccaaaaaatgtttcctatattgagagatttggtaaaaaaaaa

SEQ ID NO: 10907 - DNA, 819 bp, Homo sapiens
tttttttcacatttcagataatttaaattggagcagtattagtcatttccaaccaaagagttttgaatagtaaaagaaatgcgagacttttagaaaccttgtttagtcggtaacaacattcagtagataattaagggaacacactgcacaaattcatttcccacttagcctgaataagcagtttgactacttaatggtttcttattgtaagttttcctatggccagggaaaacagctttgtaagtagtccatctttctaaaactgaggtaactttcctaaacattaaaagtctttagtaacataggggaaaaattaaggcttaattacttagaaaacaaaatatcacaattacagaagcacatttaattacaaaaattataaaattatattaactatatgtagtttttaatatctagtatcaaaataccttttctactttggtaactaaatttttgagattaagaacaaactagttcaatcattctcacatacaaaaatttcatgtttatatttattaaaaacaaaataatgcaagttctgttaaagtaacaatatatacaccaagataaatatttggaattgtggaaacagaaatagtaaaaatttcaaattttttctcaatatcttaatgacttaaataatttagcttttttcaggcattttttgttaaaaataaacttacttaattttcaacttaggtcaatgtgcttttttgctttttttaaagacaaaaattagtaaaaatggcaggtactaggtttgcactagctaaaaaaataatgtttacagttgtctagatgtaacaattttaaaaacat

SEQ ID NO: 10908 - DNA, 692 bp, Homo sapiens
tttttttttaattttacttaatttatttcactagaaatatttcataaaactgtacttaaattcatcttaagttagcttatgcagacacactgaagatcgcacactcacatttgcatattaaaaagaaacaaaaagtgagagaggaaccaagctgcacatcactcaaggaggtcatagtgcaatcgagtgcttcatcattagagtacctcaagttaattgggataaagaataaaaatggcttgtgttttcagatatattatcatcactgggtacctgtccttacagatgtttgatctccttcagattatgttgtgaaccagttccccaccccctccccacacacatgttctttagtaggatgtaaaacaatgaatttgtcaataatcaaggtacagaaactcttgagagtctgacttattatcagctattttaccatacctattaagtcagtaattattggactatatatgtgagtagttctagtaggtcatatcttcagggggaacaaatattgttatctgggtatctaagcacagctattatttatgaagtttctgcttttctattaagaaaaaaaagagcccaatcccaaaacactgtaattatgtattcttttaatcccataatcacttctgtagtacaaatggccagggtcaaaatttaaattttgctaacactcctcaaggaccagt

SEQ ID NO: 10909 - DNA, 576 bp, Homo sapiens
ttttttttttcttgaaacaattcttaatcatttattttcaacacgtgtactataaagaacctaagaaatcagacaattttaataacccataaacatgttgaatccatttgcagatttaaattttgtaaaaatagctgtcactgcctccatatatcaagtgtactatgtttataatcacatttatgctaccgatactcctcagaaaaaaacagattctgcttggttctagcttcagtattatgaactccaataatgctttgaggacctccaaaggaaaaaaacagattctactaggttctagctgaaatattatcaactccaaattgaagctgaagtattatcaactccaaataatgcttcgaggacctccaaaaaaaagagattctgcttggttgtagctgaagtattatcaactccaaataatgcctggaggacctccacaggcaaaccactaatccctttggccatttactgagacagacagagagagagagagagagttttgaagcaacaatgtaccattagtaaagttgctgtgcagaattacctcagtcctattctaagcttacagttcag

SEQ ID NO: 10910 - DNA, 265 bp, Homo sapiens
ctttcaacccttgttaacaagtgcctaaaaatggaagtacctgttcagattaatcaaagcaataggatttgatttgattaggtatctttttacaccagtatgttatttttaaccaaaatgtaaagttcttattaaactcattacctgccattgtgattgtcccatcatggcccacctggtttcctgatgttgtaaataacatcaatgcatctgctgtgggtcctttgctgagatgtcttcgaaggaattttgtttttagccatat

SEQ ID NO: 10911 - DNA, 409 bp, Homo sapiens
gccttattagttcttttggacgaagaagcagctaatgctcctaccaaaaacaaagcagagcttttatatgatgaggaaaacacaatccatcatcatggaacgtctattcttacactttttaggtctcccacacaggtgaataattcgataaaacccctaagagaacgcatctgtgtgtcaatgcaagagaaaaaaattaagatgaagcaaactttaattagatcccaatttgcttgtacttataaagatgactacatgataagcaaggataattggaataatggtaatttagcatcaaagcctttgtgtgttctttacatggaaaatgacctttctgagggtgtaaatccatctgttggaagatcaacaattggaacgagttttggaaatgtcatctggacagaagtaa

SEQ ID NO: 10912 - DNA, 988 bp, Homo sapiens
ttttttttacttaggaaataaaattttattgtacaaaatttacatttggtgcatatgatgaaaagcatggcaaagagacccttaatcttttttctttgatatttactgtgaaagtaatttcctaataccagatcatacaatttttttgtatagaatgtttaacagctgtgttggtagtaagtgttttgggtataaggtataaaacagaaattagatcagaaaagtgcagggggaagaccactgccaaagagtaatctccaagaacttggtattttccaccgtgaggcagatactgtggggtcatcgctaagtggtttgagtatctgaagccactcattaagatactcaacaagacctaatgcatctgggatgttgtccccttctgaaacaaatttcagcagaactgccatttggatttctttagaacagctttcatcatagagtgtttttgtgatacctcctcccggaatgcggatacaaaactcggaatcatctatttcaggaatgcaccggcttttttccatttcttcccagttaaggctctttattttattttgaacacttttttgcatggaaggtgtaagtaggtaccggaagggagtactacgaagctgcagatcattacgctgatatgaatgactgcttgaaagaacaatgacttctgcacagccactgcttttcacccaggaaagcagtttttcacagaatggctttgatttatacttaataaaaatggatcttaactgtagagccaccagctttcttgaaggcaatgaatacacttcagcatttatgctaagttctgttgaatttccttctgtggtcgcatatggattgtttccaaccattggcacaagacaatcggtatagaagtaaccaatcttagacatattcagtgtagaaataatcagatccattgcaagctggccaacatttccaacagatactgctggcctgaagatgggagtggagagggaggtattcaacc

SEQ ID NO: 10913 - DNA, 830 bp, Homo sapiens
ttttttctcatttatgcattcaaattcaacaggtgagcttctggaggcttctttcagttttgtcatggtggtctgaaatgttccaatgagatcatgtgacccatcattgtcataatcataacactccaccttaatggttttgtccatatctccgtaacacagtgagttaagagagatcttgaaaggcctccaaacaggattcaagttgtttttaacaacctctgtccgatgaaccattagccagtttccatcagatgtctgcttgtggaattccaggtatgggtctgactttccaaatagatccttattatccagttttctggcttccatttcaaacaagaccactctattatcttttatttcttcagctgaaatcgtaatgctcccttttcctgcaggtctgccagttttcatcaccagtggtcgagttagcttcttgctgcgaacaatttgtccaagggtacattcacattcccctaagaagtcatcatcactcagctcaatagttttgttgtcgatgtcataaaccccaaatttcaatttctgaaccacttcaaagtagtaatcaataataaatgtcttggaaaattggggattcaagcaattcttaatcctttctgtgcgctcaacctcataccactgttgaccacttgtattcaaaaacaacacacataaagggtctgactttgaccctatatctttatccaaaagattggcacaggaaacattcagcgccacctttgtgacacactgggcagccatgtcttgagttgtgggagtcttagaggtggaagtcgagcgacggtggagaacaggttggcagcgtccgg

SEQ ID NO: 10914 - DNA, 852 bp, Homo sapiens
gttagatatattctcccaagcatgctttttgtggaaggttttcagccattgccactgaatcagatgttaaaaatgaagggaaaattgagtgtgcacacacacaactgttgtacactcatgattgcagtttttagcttaagaaacttttctaccagttactgtgaatctgacttaaaatgtaaagtttcctcatgataaaataggaacaacatagaaatggattgatggggtgatctgagttattgtatataaaagtttttaaagaatagaatgaacatcaagctagataggcaaaaattgacacattcagaacagcttttttgactgcgaagccaaaagttgtcagaaacagcaaaagatcccttattattacagagtattttacgtagtctctattttaaggagagaaattaaatagaagggcttcatgcatttaggggagggtgctaaaacttctcaagttcgtcaaacttacaggaatacccaccatgatcattttctctctaattatgtataccacaaaattttcatctggccataggaattcactggtgggtgtaaaattaatgactaaagaaattaagtggacaaatacataaaagaaacagacttgtggggatattgttttaaggtgtattaattactcagtgatgataccactcaatagggcatgccactacttttcttaagatgctaattatgaagcagtgctcacaggcattttttaactagcaaattagtagatggacttttggggtctgtcactttttaaaagtatttaagacttaaattctattagcaccacagtctgccttcagtaatacacctaaaatatttttcaggaccagaagc

SEQ ID NO: 10915 - DNA, 1079 bp, Homo sapiens
ggtagcatggaaactgagatagcctcgtgggtgttggaaggcttttcagcaaggggaggtgaatgttattaggtccaacctgaaaggtgcatatttcaggcagatagataggtgtttggcatcttataactgctcactttccttttccttagtaatctgaaagtaattcactgtactgaatagttaatggttcccttaatagactcttgtccttggaaaaataaaatgaaatgactggggttctattagtaactgaaaaattgtcaacaattaaaactctaaaacctactcatgagaaaataaagctcttttgtttaggaataataaaagccgacttaatgacttctgaaagaagtaagtgtccctgtaaaggccaggtgaaactgccattctttaacctgttactcggtgtacttgactgcggaaagaacccagaaacagaaaaggccaggcccaaaggatagaagtgtaggtttcctctggaagcttactgttctgctaaatgacctaaaaattgcctagaacactcccagataagtcaatttctgctataaaaatcattgcagaaagagattatttttagttgtctttatttaaaaaatgaaacacattagttacaaaaaccgttgctccaaatagataccgtgtatcttacaaatgttttttgcttggttttgagtgtttactgtagaaattttcaatatcataaataaatgattatttctttctcagaaagctgatttttgtagtgtagtatttacaaataccgtaagtgaaaaatgatagtttataaatttgtaccatttaggaaaaaatgttttatgtagtgttgtttgtgtaacagcaaataaaaccatttaagattatagtttttacaagggtggtaaaacctttaaaacagagcataatgtgcatcgtatgcctttctgacattagcatgcaaaaacaaagctatttgttaaaatagacttatttttgctccaactaagtaaacatgtaaaattatttttaataagctcaatagcttagaaggcatcttgtttaaaatgaaaataatttaaaacaatatctagcactgc

SEQ ID NO: 10916 - DNA, 492 bp, Homo sapiens
  misc_feature (1)...(492): n = a,t,c or g
taaaaatccactctttttacaaaggtgtgaatttaaataacgttattgattggaatatgaaaatagaccaatcatttaagagctttttagcaaatgattcaattcttactctttttctcccaagattgaaaagcataatgtatttctctaaagtaggaatctagagagcccctgtgagtggacaaatgtcagtaacacttgaacacatgagaagataagtgttatgttgtgataatttaaagttaaatttgctttttgggtaggatccctaaatagatgggatttttaaatagatgatatatagatgacaattgcaattgtcattttaattattttccctacagtaaagaacctagctctgagcagtgaaattgtaatggcactttaaaggaagtaagccgttaactgttctctagtggagcgatctnnnnnnnnnnnnnnnnnnnnnnnnnnnnnnnnnnnnnnnnnnnnnnnnnnaggactgggggttta

SEQ ID NO: 10917 - DNA, 713 bp, Homo sapiens
cttaattttgttttgcaagagtaagggatgtatttcctgagccaatagcagactattaagatgttgagtaacaagggaaatcaacatggaattgaaggcctaaaccactggtttataaccagattatgggcccctttaagaatctgataagaattacgcattttctttatccccagaatagacatacataaaaataatgcatactaagttcctggcattcatagactttccctaaatccattaatcacaaattaacaactcctgctgttaaagatactacaggctcttgaaaatttccctcttagttctggtctgaatcactaacagtgggttaattttcaacccattgattataagcatgagccagtgaatttttaaaaattaaatgaatattcataattacaaaagaaatcacatgttcccttagagtatttctgtaatttgacctgtatttctgtaatttcatgattttatataaggtaaatagatgcctctgcctaagttctccattggcaaagtacagacggcaccaactgctacctctaatcacaaaagtaaagatgtgatattaaggaagactgaaaccgaagcaacatacaattgcaaggtgttctgtatatagttacacacagtttatcatgtatcaactaggccctaaggtgaagccaggcactaaagacaggaatgaaagtagacttcacatacagtaagta

SEQ ID NO: 10918 - DNA, 359 bp, Homo sapiens
ctctatttctatattaaaaacatgaccacaagccaacacttttaattccactgcagcactgctgggttatttcttgctttccaaattcccttgtctgtagctatctttcatcacttgcaaaaatagcacgtgctcaatcctagattaaaatataagctactctcagaattgataactcataccactctttttaaaaatcaactaaccagaattcagtttttattcacagttcttatctttagctcagggcgtaatataaaagcactaggtttaaaacttacttggtcagcagcaatccacttctaggtacatgtccaaaggaactgaagaaagcatctcaatgtgtgaatgcctacctg

SEQ ID NO: 10919 - DNA, 435 bp, Homo sapiens
caagagaggtcattctcgatcccgatctccccagtggcgtaggtccaggtctgcacagaggtggggaagatctagaagcccccagcgacgtggccgctctaggtctcctcagcgaccaggctggtctaggagcagaaatacccagagaagaggcaggtctaggtcagcaaggcgagggaggtcccactctagatccccagccactaggggtagatctcgttctagaacacacagcccgccggggcaggtcccgctctagaacacctgccaggcggagatcacgatccagaactcccaccaggcgtaggtctcggtctagaacaccagcccggaggggcaggtctcggtctagaacacctgctaggcgcagatctaggacccgatcaccagtacgacgcaggtctcgtagtagatcaccagccaggagaagtgcgc

SEQ ID NO: 10920 - DNA, 588 bp, Homo sapiens
tttttttttaaaaataaagagacatatttatttgtaataactctctttttttggtaataactatctttaacaatgctattatttatttttacccatggggaatgcataagtacaaacattgttagcttatttaacatttattaaaaatacagactctttatactaatgcagaaggataagcctcttcttcccactctaaaaatctcttctttgctgtaaagaattctcagtgcatgtgagctaagactctggagcactcagtagagaggtgtgtgggatgaccagacagaatcactaggttttctctgttttcaactagctgaaaataggaactctagttctaaatattcaaagtctaaatattagaaaaataaggagaggggatatgacaaaatgcttttcaaaatacatgcctgaggtgagactgcttgtatgtttgcatgtggtagcttccagaggaaatcttcagttttaatcttcaggttcatattgtgccagtcttttcctcagatctttgatttggtcattcttcttggtaagaatctctttcatgtttcgataagctgctgtttgctgaaatttcttttc

SEQ ID NO: 10921 - DNA, 835 bp, Homo sapiens
tcagtaaagctggggaaaaaaggaggaggcatttcaggtaggagatatgatttgaactgatttgaacaaagacagaaataggactacacatgaaatattcaagaaatgctgcttagaaggccaggtaggagttgggtggggataaaatatttacatcaagggaaaaggaggtaagaactattttctggaaggcccagaacatcagataggagaaagaaattagataccagatacaggttacatgctatccgggtaggattattatctcatttatttcttacagcattagggattgaattaggtatcactagctagaattttatatatgagcaaaccaagctggctgagtgatatatatatgactccacccaggtctatcctataatgaaagcctgacctacttttttcgaaaccatactctttccccaaggagtctgaatatcttaataggaataggtggcccagtgaaatccttcctcattacctaaatcattgcttaaggagattaatctgacagtgcaatatagaatatgattatgtattttgtgtccttatatgaaacctaaggacgggagctggaatacatttgacctgtatatcctaaatgtctaggtgcactgattagcatgtaatattgtctccgtatatgtactgactgaagtgaaaattagtttattatcaacttggtaaaaattttcgtctatattttatgttctatccgaggtgctacttattgatagaagtttgcaacaaaatatgtttctaattccaattcaatctgatgaaaagatatcttcctcttatccaatcctcctcatacctaaaaatttctgcc

SEQ ID NO: 10922 - DNA, 91 bp, Homo sapiens
aataagaaagcaagacaaaaacttctagcagctatagatgatatagacagacctaaaagataatgaacacagctctctttcctcaatggca

SEQ ID NO: 10923 - DNA, 387 bp, Homo sapiens
tcttttgggaacttgatgtttattatttaggactcgtcgtagacaagccagagaacaaaccggtaagatggcagatcaccttgaaggcctttccagtgatgatgaagaaacttctacagatattactaatttcaatctggaaaaagatcgaatttcaaaagaatccggcaaagtttttgaagatgtccttgaaagtttctattcaattgactgtattaaatcacagtttgaagcatggcgttcaaaatactacacatcctacaaagatgcttacattggcctttgtttgccaaaattattcaaccccctcatacgacttcagctcctcacttggactcctcttgaggcaaaatgtcgtgactttgagaatatgctgtggtttgaatc

SEQ ID NO: 10924 - DNA, 685 bp, Homo sapiens
tttttttttttttgtgttaaaattacttttattcaggatgaaaaatacaatatgtaaccagattagatgatagtctgtgattagttctttaccacatatttcaaaagaactacatacttacttcccattgttactgcaatatatttctttttatttattattacttagaaggttacaatgtagtgttttacgtagcttttctttaatagcagatagaggacattttgcatacaaatacaggcagaaaaaaaattaacacatgactttttaaagtaagaacaaggaagacaccaaatctacaacttggagttgagagctcagggaattgttttttctttaaataggtgctttcttgggtatgacatggcctgataaaagctctagactttgcagactgcagcagcataaagcagtttccaatgcaatggatgaagatggatctgaggtagaaaggtggtcatggctttcctttttatataaaacaattttcttcttttcaaaatatctctgctgcaaatagacacccttgccccccaacccacccaacctattctaaaataatagcaatttctaactttaagcctccttctggccagatcccagctaaagagaacccaaagttaaaatgtctttatgtttttatgtctttaggtttgaatcaaaacatattattttcacctttttt

SEQ ID NO: 10925 - DNA, 382 bp, Homo sapiens
  misc_feature (1)...(382): n = a,t,c or g
caggaaatgacccgaactgccagcctgcgcctttgcagccggccctcgctttgctgaagacgagcagctcccaccaaagtcttgcctccccttaccccgaaagccccgctcagttcaatatttcaagtgaaaatctgcctgttcgaaaagaaaatattcacaaatgagcagtgtattagaagacaactgaattgcttctaagaatgggtctcactctgnnnnnnnnnnnnnnnnnnnnnnnnnnnnnnnnnnnnnnnnnnnnnnnnnnnnnnnnnnnnnnnnnnnnnnnnnnnnnnnnnnnnnnnnnnnnnnnnnnnnnnnnnnnnnnnnnnnnnnnnnnnnnnnnnnnnnnnnnnnntttaaattttttatagagaccgag

SEQ ID NO: 10926 - DNA, 816 bp, Homo sapiens
tttttttttataacacttgaaagtataaaatgctacatttccaaaaatatatatatttttttctgcaccagcacccttgtatagtaaaagtatctactttttgttcatttgtttcaatgcactacactttatctacaatttcattacatgtatacagcaaataggcaagcatggcttttacatccttaatgatttttttctatacagggaggtttaaaaaaaaatacttgaacagtttgcccagtaatgtgacacataatgcatgtaccttgttctcatatttttttaggtgtaaaataaagattcagtaattttaactcagatatttatctttttaaaaatagtgttgcagttttgttatttgcattacttttcaaaactccttaagtttttctctcatggcacactttcttctaatacttcaaattttggcaggcaatataaaaaaggctgcaacttctgccctttgagggcactgtagtgactaaacagcatatcaaattttgaatactttttgaaatcacttcaccaatgatatccctgaccgaaggttcatgcatgatgcatcatcacacagtacattcagagagagctttgacttcgctatgagaagaaaaagattcctagaagtctctcacagtaactgcctctgtcattgagtagttaaggaccatctgtctccccttcttaagagaggccttcttaccgttcgcttagggtgggatattaaaagatgatcagtgctgtgggatgaattgggccttattgctttactactattcagtgcagtttctagaaccactttcacccaaacag

SEQ ID NO: 10927 - DNA, 834 bp, Homo sapiens
tttttatgtctcagaccatcttgtgagattgtttgcctatctcataatacagttttatgcagaaaggttgaaactatgtaaatggtttttatggaaattatcagttacaatattttaaaggtgtagaaatttaactttatttacaaatgttctcctataaacaaagatgccattctacacctttaaaatattgtaactgataatttccataaaaaccatttacatagtttcaacctttctgcataaaactgtattatgagataggcaaacaatctcacaagatggtctgagacataaaaacaaaagacaacctatccagcatcaatgtcctattgacaaactcaatgaagaattaagaatcacactccacaatgtgctgctccaccaagaaatagaaatgtaatgattttttgaaaggtaaatgcttcacaataaacagtcttcttgggtagtacagtgtaattgtgattgtttaggactgctcttgtgggctaatatttacgctgttgttttttttaaatcatcattgtaaaaagggcagacttatagatttttctgacaatgaaaatctgtagacactggtctggtctcatcattcaggcaaattaataaaataacaagtgcatggaaagaatgttaaacaaaaacataatcatcatgtgactgacagaattctccctgaaatcagagaatattaatactcaatagtatgtataaatttgaatttatagctgagacaatagacaaaataattaaccaaggagcttaaaataaaattattcaaattacctatttatcattttatgtgcagtaattactttttaaaaatccttt

SEQ ID NO: 10928 - DNA, 200 bp, Homo sapiens
gaggcttcaagaagaaaggaatccgattggttctgtgtctgtctcttttggtattctcagacttatgtagtcatccatatagaaaggtgattaggaaaacagcacaagaatagcagaaatctacataaaaatgtaggaaattaaaattagttaccagcatacaaaaaactactatatgttatagttacatactataactc

SEQ ID NO: 10929 - DNA, 724 bp, Homo sapiens
tctactgcgagtaacaaaacctaggtcgttccatgttctcatgtacagtgatataagcctccgcaatataaaatacaatgtacaggaatctctatcaagtaaactaaagaaacacacttgatttttacatttgtgtatttaaattagaaaaatttgctttatatgttaaacaaacaaaaccttctcatcgtactagatgttggaacgtgacacctactttaatgtaatttaacctatggacacttggctttcaacaccaaacatctcaaactgatacattctcaatgttttcttaacttaaaaaatctgtgctataaagtgaaaaatctgtagtgacgtacaatggaataacagactccaaagaacaagtgaagttctttaattttacatctgtaaaagtttatgaaaatataaaaaattatcaaagtgtatttgtacaaataaattagccagatttttttacttcacacttcagaagtactcgaaaaatacacgacaagcaagagactgtttcacagtgaacagcttcctgtctcatttgcagttcttgagctagtgatcactagttcccgtctcagactttacacaagtcttgttccacgttcaaggacaaacttttacatgtatcgtctgacaaataccagtttggggccgagcgtacttttcccgggatacagaagaactgctcagaaggcgaaactggaccaacaaaactcctgattat

SEQ ID NO: 10930 - DNA, 664 bp, Homo sapiens
cctaatgacctaatatgcaatttctgtcctcgtgtctttttctctaacacacagtcatgggtgaaacatttcagacacctcaggcagcacttatggtttctaattgtgagaactacccttccatcaaacaaaaagggcaagggtgggagccccggctacttggttaaacattttttactacaaattcgcccagaaaaggtgaaatattttgttataaaactgtattaagcatggcctaagtatttattaggtatatgatctgtgtagtatgttccatcagaaatatttcttactagtgctttaagctccagagtaaacagtcatttaaaatggagttcactgggcaggtttcccctttaatctagatagaaatactctttatcagagatttaaggcactgttttgctaactggtaaataaaaccaaatgtaaatatgtaagaatgtttatttgttgcacataacttttttggtataaaataaatgtagaagttacctgtggaagttgtgctcccattattcttaaactgcagggttgcattccaaaagaactgaaacgaagtctttttagactcagtaggagccttatattcttgaagtcaatactgtaacctcatttctaaggtatacagggttgattctttttctcttaaatcatatgtaac

SEQ ID NO: 10931 - DNA, 402 bp, Homo sapiens
gagacttttaggcactttcttcagagttgccttttatggccaatctttttttgaagaagaagatggaaaggagtacatctataaagaaccaaagctcactggcctctcagaaatttccttgagacttgttaaactttatggtgaaaagtttggtacggagaatgtcaaaataattcaggattcagacaaggtaaatgccaaagagcttgatccaaaatatgctcatatacaagttacttatgtgaagccttactttgatgacaaagaactcacagaaaggaagaccgagtttgaaagaaatcataatatcagcagatttgtttttgaggccccttacactttattcaggcaaaaaaccagggctgtatagaggaccagttgcaaacggccgtacaatcttgg

SEQ ID NO: 10932 - DNA, 1586 bp, Homo sapiens
ttcctgggaatcagtccgcattttattttatagtacattcatataagttcctgcatttccaaggtaaccaggtcacattcaggttagcactgctggtaacaaaatcatacaactaccctggcttcaaaaacaagatagggtaatgcacattaatacccctttccctttaatactgcagaagacaatacatcacaaaataaaatctcaaaaatcacatgccttttacaatccagtgtgaaggcatattatttatgttaaaattagaccatgtgggaacatgaggaataaagagtttgaaagctctctaaaatttctcccaatgccatctttcgcttctaacttgccagttggcacattcagcttcaatgcccttgggaagggaggggcagaggaaagcagggggtcactgaactccaaaactcatggttttccaggctacttctatagacatcacttaacctaaaattctaaagagttaatatgcacgagggatggtaatataggaagcacctgaaaaaaattcctccagtcactgatgggaaatttaagctgtgaatttttgtgaaattttcaatttcacagaaagcaaaatctgtatcacatccagtaatattggttaagttctgaagatacgttttcattttgctgaataaaaaccctatgacccatgttctggtcttgaaccaggtcagaaaaacactgtaatctccatatgcaatatttcctataggccaaccctaaaagtgcagctgcccccaacccttgaaaagtttgagaagtcaaactgagctataataaagacacaaacaaattaggtaggagaaaattcaaataggtgagaaagcaagaagttagatttgtttgggtctttttcctagattaaaaaaaaatattataaaatgctttggaccctagtccaacatagctggaatgataagttatttaaaatacaagtccccatccagaaagacagtgtgcttacgtagcacctgtctcttagaagttcaatgtgctttaggtatgattatcaattaattgcataattacattattcagaatatactcagacttactgttaactccagtgactaaagagcccctgccacttgctgccaagaaaatgagtcctgaacttacaaggttaggagtgaaactgatatgtgtatttgttgaccccaaaagaaataccaccccttttcaaggcagaaaaaaatgagagaagagggagtaagacacttctttaaaaagccacaaaacatcttatgaaaaaccacagccagtgcatattttataatacaacccctgaaaaaagccccccagcagcagggtgagcagagggagccgtgaagattttgaaaccagagtgacttgcagtaactgcctaacaataaattcacggagtaaaatgcagaatagttgacatataaccaaggtttatgttgtatctagaaatatgttttatgctttaaaaaaaattgcaatgcactccaaaaaatttttttctgataattcatgtacaacagaaggcactgttatccgcataaatccattgattctgcatggcaaaaacctgagacgtgcaagtc

SEQ ID NO: 10933 - DNA, 991 bp, Homo sapiens
attggacagatgctgcgtactcatttcacacattctcagttcattgtggtgtcactaaaagaaggtatgttcaacaatgcaaacgttcttttcaaaaccaagtttgtggatggtgtttctacagtagccagatttactcaatgtcaaaatggaaagatttcaaaggaagcaaaatccaaggcaaaaccacccaaaggagcacatgtggaagtttaaactacaaagttatttcttcatcttgacctgtttttttaaatgtaaacttttaaggacttgagataactaatttgtttatatacaaaaattaatgttactgtgttacttaacccatgttttctctttatataatcacttatcgcttacaaatgagcatatattcctcatctcttaactagtctaattatggtccaattattgtggttgtgattttatgcatatcatcaaatgtttttttcttatgcgggtcttttatatattagggatcctgagatacccgattctatatgtaaaagctaatatacaaaaaagcagattaaattacatgataaatgtagctgatcatcagtgtttaattgatttaattcctaaggcaatattaatgtgttttctaaagtcattcaggtaaggaagaattataaatcaggtaactgggaccaacaaagggaacacatataaagctattatgcatgcatgggagccgtttgaggctagttttttaaggccacaactccagacccctggatttagactgagataggaaacagatcttgaaagaatccttattttaatgatacatgaatatcatgttcctatacgcttaataattggtctctacgttttaatgatacatgaatatcatgttcctatacgcttaataattggtctctacgactttaatggttttgtttttttaagctgtgtaagtatttttaaatcaaagcttaggaggtgtgttgcgtggtactatctgctgcaaatttatctgaggttt

SEQ ID NO: 10934 - DNA, 552 bp, Homo sapiens
gatgaagatggtaaaattataggagaactcagtaaagaaaatgacagaattttggtagctcaaggaggtcttggtggtaaattacttacagatttcgtaccattgaaaggccagagacgaataattcaccttgatctaaaacttatagctgatgtaggcctagtaggttacaacattaaagcctgaacttggaaagataatgtacagtgatttcaaacagatatcagtagctgatcttccgggtttaatagaaggagcacatatgaacaaaggaatgggccacaaattcctcgggcatatagaaagaactagacaactactttttgttgttgatatttctggatttcagctttcttctcacactcaatacaggacagcttttgaaaccataatactgcttacaaaagagttggaattgtacaaagaggaacttcagacaaaacctgcactcttggcagttaataaaatggacttgccagatgcccaagataagttccatgaattgatgagccagctccagaatcctaaagattttctgcatttatttgaaaa

SEQ ID NO: 10935 - DNA, 974 bp, Homo sapiens
  misc_feature (1)...(974): n = a,t,c or g
gctttcccattatccattcttattgcctcaaggctctcctcttataaatctagtggtatgcattactttgggggtaaggacaaatttatccagaacagagaagatttagttcagtctttagttttaaaataagcatttttaagtaatagcagagacaaaagtctgaaagccaacatagttttaatttaaaagaaatttgattttggctacagctttttggccaggagtaagtgaggatgctgtttcgaaagctggtcttgcatcttaagcagtacggtgtgggtcttaggggctggagtgtatcttgcaggaaacacagagtaggcaagaatgtgaggtggtgtaagactagtttgtctggttcaaaaagtaaaaaagaagactgaaaaaagtaggaaatctaacccaaagcaatcaatctttgagaagagcccagcacacttcccttccaattgatttgtcctacacccctccatgaggcctaagcattagagcagaaatgactgagggtagcatccaagccactgggcccaaggggcactggtacgatgagtataccgtgtcccacaattccagggtagtctgggaaaaacaaagcagagttcctgagaagaatgcagtagtgggctgacagaacccagaaaggggtgtttgtagtgatatgtggccatgacatcagaagactaaaatgaggctattgatattccctagcaaatgtctggggaacagaggccaaagccgaaagctcaagaattaatggaatgactacacctcaacgaaggttatagattagtgaggactgatgagtacaaaccagactcacacatccatcctcatcctcactccccacccccagggctacaatattacatattatgtcccctactcctgaggggatgggnaaagaggatgggtagggttaagtttcaaactgcttttaatgggctaaccaaaattcacctttatttcntttt

SEQ ID NO: 10936 - DNA, 895 bp, Homo sapiens
  misc_feature (1)...(895): n = a,t,c or g
tttgcaattcatttgggaatttatttttttctaaagcggaacaaaacctaattatgaataagaaacatttaaatggcaactcttaacctatagtgcaaacaccagattccacaaaactgaattcctttgtcagtaatccaatatttagtagtagctgctgcttttgtggttgttggttagttaaaattaagtaatgattccagtttagaagataaagtttcagtgtgaattttagtagaagtcataaaaatacctgagacatactagaaaataagattttccctcctatttaaaaaaaactctgcagacttttatttgaagcccatcttttgaaaatcactaacatttcataatcatttcctagtgttttgtttcactttctcgatgaataatatttccccatttaagtttctcaaggcattgattgctggaaaatttcccacgtgccctctaaacgtcccccgtggacatgagtaaattaaacttcgtgcatgtcagctacacgttcatcgtctcctttctcagctgaggccatgagtggacccatcagtggctccaaagtcgtagaagtactaacatgttaagaaaaatacatttttaagggtcaaaacaaagttacacagaagcaaatatcagggaaggacttcaaaaggcctcctcagcattgagtgtccgtgtcttcctgagattcttcagtttatcaatggcagaagttactaaaatctctccatgaattttgttgtctcttgttcgcacgtttacagcattatctatcttttccnnnnnnnnnnnnnnnnnnnnnnnnnnnnnnnnnnnnnnnnnnnnnnnnnnnnnnnnnnnnnnnnnnnnnnnnnnnnnnnnnnnnnnnnnnnnnnnnnnnnnnccttcttcaaac

SEQ ID NO: 10937 - DNA, 591 bp, Homo sapiens
gaaatctgggctgtagtgctcctgctttatttctacctcagttttgttacatttctcttggaaagtaaagtagaaaattggaagtggacacacacactgcaatgtagcttgccaaacatgttactttgttttcttccatctttcaccgtaaatctagtttccaaagacatcagcatttgtgcttacttccacctcagtctaccagccccacccctacccatggcataagtggcatttttcttaatttcctatttttctcctgctctctgtcaagttgttctttgtatcctttaatgctttatgtgcaacctttcattgatagtggggctggatgtttgggcaatgcttctgaactgtcacagaggcagggctgtagctttccacagccactgccccatggcataagcaggaacagccggggccttttggaatggtattttcccggggtttttttcccctttttctttttttagtttaggaggatggcagtaacaaaactgttgcaaagcactgggcatttttatggtatttcaattaaataagtggatgtacatttttaaaaaaatttaaataaatgcaatgagaagcccc

SEQ ID NO: 10938 - DNA, 1398 bp, Homo sapiens
  misc_feature (1)...(1398): n = a,t,c or g
tttttttttgaacagaaacatagcttgtaagcacttaaactattaatggtcagttcatcatacaccagtatgaaagttatttgagggcagggatggcctctttctgaaccttgtatcttcaggccaaaaaaatgtctgttgaatgaaaccaatgttgatgtacagcaatgtggctggaatttagaaagcttaataaaaattgggtgagggggcatctaattcagaacatgtttttgggtgtaaggctagtatcatctacttttgaaaacataatttttatgattagcaggtaaaggtagcatgaaactgcaatacactggctccagacctttcctctctgccttgccacaggcatgcttggtggtctgattacaaaagtacggatctcaacactatattttttattctaaaatctcaaccaaaatgatgggatcatgggtgcaaagtgggtttttcctttaaattgtgagaaaccatttccacatttcagatctaatggtgttctcatgacattgcaaagtagtattttatgccctcaaaactgaaccttaaggtagagacaattgctccccgggccaaacacagatccctccaacccctcactgtaccttaggaaagctggggtaaactacagattcaacaaaatctcaataagaaaatcccaaaaaccttccccaatgccctgtggtttggcctgaacatagggaaaatggactgctgggtggctacagaacaggaatgaagagttaagaataataaatgcctaagttacagggacagaacccaatctttcattaatgacacaaagtagaatgcacaaagtagtatgcagtatggctgggggacagtcaaggaccatctagacttttaattgttagaagcaccacaggtccaaatgctccccagagtggaccaaaactggattttgtccatggcaacactgttctccactattctgtctataatgagaatatatcaatagcaggaaatctactttcacacatggcaaaccgcgaagaaaaacaaggataacctcagaccacttttacttgctgtaagtgggaaaaacaaacaaacaaacaaaaaaccccagcaaataaaggattttccatgaacagaaaagcaaatataaatgcagttgataaactagaaagcaatcatcaactaattgcagactataaagntacccaaaaatccttctcaaaatagcaccccagtggatggtagtcaagctttccagcaaccagttattgatgattcatggcctacatcaaatgantaagacttcgntttttgataccaacaatgtccccaaaccaaacttaacaaaggctaatgactgcttctcagtanttcagggaaattttnggaattttggncttgtggggcaaaaaacag

SEQ ID NO: 10939 - DNA, 306 bp, Homo sapiens
tttacccatgccacattttcattaccccaaatgacacagttcttttaagtttacatatatagccatttcaatttctcatatacaatattgtttatttgtcatccttatttcacctctggaatcactaaactttgtctcattttttttctcttccatcaaatatcaattttggattcagatccagtttttttctttcattatttcggcttttaaaataatactactccttcctccccaattcattcagctggttagttcctgggttctaatttttcttccaggattcaaaatgcacatatagggtat

SEQ ID NO: 10940 - DNA, 1653 bp, Homo sapiens
cacgaggcggattcttggcgccggagaagaggcagggtcaccctctctccacgtcagagacctgactgtggagatggcggctcagaagataaacgaggggctggaacacctcgccaaagcagagaaatacctgaaaactggttttttaaaatggaagccagattatgacagtgccgcttctgaatatggaaaagcagctgttgcttttaaaaatgccaaacagtttgagcaagcaaaagatgcctgcctgagggaagctgttgcccatgaaaataatagggctctttttcatgctgccaaagcttatgagcaagctggaatgatgttgaaggagatgcagaaactaccagaggccgttcagctaattgagaaggccagcatgatgtatctagaaaacggcaccccagacacagcagccatggctttggagccgagctggaaagcttatagaaaatgttgatccagagaaggctgtacagttatatcaacagacagctaatgtgtttgaaaatgaagaacgcttacgacaggcagttgaattactaggaaaagcctccagactactagtacgaggacgtaggtttgatgaggcggcactctctattcagaaagaaaaaaatatttataaggaaattgagaattatccaacttgttataagaaaacaattgctcaagtcttagttcatctacacagaaatgactatgtagctgcagaaagatgtgtccgggagagctatagcatccctgggttcaatggcagtgaagactgtgctgccctggaacagcttcttgaaggttatgaccagcaagaccaagatcaggtgtcagatgtctgcaactcaccgcttttcaagtacatggacaatgattatgctaagctgggcctgagtttggtggttccaggagggggaatcaagaagaaatcacctgcaacaccaacaggccaagcctgatggtgtcactgccacggctgctgatgaagaggaagatgaatactcaggaggactatgctagtattttgcttgctgaaaagaaaagggaaacaaaggtaaaatcctgacatgccatttcaaggacttgggaatagattagggatatccgtacttcattacagtcatgattttggatcctaataaagactagtttttagttaccatcttcccaaatcactcattgtatggcattacctgtgaagcatatctttttctttccataagagcttttctaagacaccagcaggaattaacagaaaatgtactgtcatgttttaatacattgattaaaaaatttgcaagccaaattatacataaattatgttctaaacaaaaggggtaataagcataggtattctctcttggacacttgtaagttactgttagtgaattgttttttacgtttcatttaataattgctgctaaaggtgatgtttactgataaatcattttaaaatttttttgttttgaaaagtaaatttatcccccatgatgttagatacatttaaattattaagtcttttcagagatgagatggggacaggaagttattttgagccttacaatattatttagcccaataaaaggtggcattgaagctcttattatattatgagtttggaaaaattttggagggtagcctattgaagtggtccctaaa

SEQ ID NO: 10941 - DNA, 719 bp, Homo sapiens
  misc_feature (1)...(719): n = a,t,c or g
gccattttcagaatttcctggcattgatttatattttgaagcatacaggaaacttctcgtttcctcgtttagccccacccagatcaggtgaaagggcagctttaatggtggtttttatggaccacattatcagagagcactgtgcaagccaaatggttcaataatgaatgaaaattctgggtgtaaagagtaaatatgccctggctctttctaccaatgtttgctcctggttggaaagaaaccaaagatttaagacgggctgctcttccagactggctgtgcctgcctgtgcccagcaacctgtgcagccggcagtgtgcctggtgtcacgccaggaggctggtggctgctgtgggccctctggaattgtgctcctcacaaagtttccccaaaaggttcttctaagcctttattgtccctggtaaatgtttcccggctgggcgcggtggctcacgcctgtgaatcccagcactttggggaggccgaggcgggtggatcaactcaaggtcaggagtttnagatcagcctgcccaacatgggtgaaaacttcgtnttttattaaaantacacaatttaggccatcttgttgggcgcancttgtcaantttcagttattaggggaanttganggaggagantcgtntgaaanccaagaggttgaagtttcngttaccaaggattgcggcattnatttcagcnggggaaacaaagggagattc

SEQ ID NO: 10942 - DNA, 394 bp, Homo sapiens
gagctgggtgttgcatcctggggcgccacatgctcatggccagaatcttaaacctatttggtaggaaagggtcagtttctcacttgacagattgccatatttttttttctgggagatgtcattttccatctcccgattacttcctttacgtctagcagtatgtgccgagaagaggcttactctcttcgtaggtgactgtgaattttgtactacgtgggctttgtacatgtgatgctctgttaaaacataagtgggtatgaaggtccttgcatacaccttgtctgtgtggataagtggacacatgcccttaagaggcttgctttctcaaaaagtggccgaggatgtggagtgggcatgtgctggcaggtgggatatgtcctcagcctttgggggc

SEQ ID NO: 10943 - DNA, 234 bp, Homo sapiens
cacacacattttgacaatgtgggtcctggacccaaacccctgaggatgcggagggactgactattttacttcttacagcctgggtaaggttcaacatgtggtatatcatttgaaaggtgtagaaacagccattaagagtttaagtgaccttcctaaggcctgtggtctttccactagacctcataactgataccattacattctcgttaatgtaatttgcaaaaaaaaaaaaaa

SEQ ID NO: 10944 - DNA, 913 bp, Homo sapiens
atctcaaataaacaaacaaataaataacaaaaaacaaaaatgttgcattaaacttagttcttgtctctcctttccactcttattcttaaatctgaagctcatcgactaagtgaaatatttaaagaagtgcccacacagattagttcatgataggccagcaagaagaagtattatgtagtaccatagttagtaaattcgtaaaaccttggaagccattatttggtcccacttgcaatttagtgtttttgaagtgtgtagcttcattcagatagctctttaaataattaaaatataaaagcaaacaacccaaactacctgactataaacaggaaaagttaaccctcaaagagagttcttgtgaattctctttatgctggcaaatagctctaggattaaaggcacattagggtttccttcagtttgtttattctaagcttttactgtgctttttactgaacaagtttctgatgtataaaacttgcatctgatttctttggaaatattttcacaaaagttattttaatcagtatttttacattgcctttccagtgtccagaagtgtttctaaacttagaaagtgacctatagttttttaaaattatgttttcctagaacgtgccaaattttgatttactctaacaatcagtacttttcttcagatgctttgttctgtttagaacaaaaatgcactatagtttttaaagaatcatgcatctttgggttggcccaggatcaaatttgatattgaataatttattccagggcagctttcataaacatacttcatagatgttgttttgaaatgtttctaaatatctaaaatcatttcaacagcagaaatgatttttattttaacaaaagattatgatagcccttgtagtgtttaaaagtggtcatatttattactgacttg

SEQ ID NO: 10945 - DNA, 1413 bp, Homo sapiens
tttttttttttttttttgccatttaacatatatttattgaaatctacttgatgcaaggcactgtgctagatttggtaggggatcagacatgaaaggccacccctgtcttctaagagctcacaatttaatgggtgggggaccgctgaggaggagggggtgaagccaagtccacaaacagctctagtgcaaggctgattatagtgagtgccagaaaacagacaaggtaatgagatgggggaatgagaaaaaagtgccaacaaccaacggaaatacaaactggggtgggacatagctattgttctcagaggtacgcaaatgacattgagggccaagtttaaagagacagtttctgcttttcaaagtaaacatccaaagtgatgcaatgagaactacagaatgtaagtacatgagtaagagagaagttagcaatccccccatctgatggacatgctggaaatcgtgaaacacttcaaaaataagagaacagggtgcactgtgatttcactcattttatggcccgcatgtggtgggttcagtaaaggaacaatatacgtagacataaaatcacaggttaaattcactgagactagaaggcatcgactttcacccatcttagagaacagagaacacacgtttgaacaggtgttcatgcagtcaggtgcgacttggccaggaagcagccaagtggcaaaacacaatagaaaagagtagagacccactcaagctggctcaagtcaaggagtctgtagtggggacgcacgtggaccaatgagggctgctgccagaaatccaagaacataccatggccaggccttcctcccagcaggcgccacgctcctcactcctctgagtactgtgctgctccccacaccttctgatgcctagaagcttctgtttccttgtttgcatttcagatctggaaggtctggtggtgtccgtggtccatcatgttctgtcagctctatgctctgatgattgcttgctgcccttgggtcaggtgttcagttctggctgaattaatatggcctagaagcggggtggcaaatcacatggtacgcaacagggccacaacccagggctgcaggtagggcaggcgctgtgcccagttctaggacaaaatcaagcacatggaatgcaacaccactcaaaaacatgcccgctgcaattgggtagggactattctggaaatgcaagagtggggtgacacagctaatggacacagctcatcgtaataagcagcaaaaatggtaatcaattactttcttttgaaaattttcacaagtattcaaaactctaataaaagcaatggaggatttttttcaaatggtaggaaaagaacatatttcttttttttttttctttttccatgccaggcagttaatgtgctgacatagtaacaaggtttgaaggagg

SEQ ID NO: 10946 - DNA, 388 bp, Homo sapiens
gagggagctccactcaggcctgtgccagactccgagggggagttcaaagacctaaggtcttgtctttgccccgccatgtccacaataacataacacatgtaccatctactttccctgaagttgtggttttctgttcaggttcctgattccctaattggcctgtagctcccagagcaggcagatctgggctcctccccctcttctctggtgtgtaggcagtgcattgaagaacacaggtgcattggtgttagttctcagctcgtttctaatgtttaacatatacagtgtttcttgaggctattactatgtgtccttacggatggcataccctggctctggatggattccatgcattttaattttccactggctaatttcacagatgagg

SEQ ID NO: 10947 - DNA, 522 bp, Homo sapiens
  misc_feature (1)...(522): n = a,t,c or g
tcacttgatagaatcagatatgttatcgaaatgttagcagcagcttcatcctccttctgattaaagtaagtagaaatgggatgttttgtttaataacagccatagtgtgtgtttagaccacagcggatgttgtagaccaggaccatagatgatacatgtcagtgctgtggaatgtgcattctctgagtgttgttttgtggtatcattgtctttcctgaatgactttctaactgtgcagaaaggcagaaaagtcatcatatgtatatgtcatatgactttataaaatatttaatgtgacaaaaagtggaaagaatctttacaaaccctgcaattacttttttaaaggcacttttactctttggttttatcattccattttgctaatatttactagctttataaattacagtaaggtacaaaaactccatcttgtaattattttccatttttggaagtggaaaaagtacatattattttgcacaggttttatactgctaagtgcntggttggggtggtgaggta

SEQ ID NO: 10948 - DNA, 448 bp, Homo sapiens
tttttttttgataatacaattttctttattaaaaataatttacagcatcagtaacatatacacaattgtcatcaactgaactttgcctccaatatatttctatacaatacttaacattattgaacttaaaactgttacactgttttgttggctttaaataatagacaatgatttttgtctattacttagtgatagacaaagtgattactttgttacttaagtgagatatatggtttcatagccacatattatgtgtaaaattgatagaaacgtcagcaatatcactctttaggggaaaaaacactgaaaagccaaagtccaccctcttcttctctcttattactccaaccaaactaaggataggggtaaacatccagtatcttagtatctcctcctaaacctaaagacaaaagaaaggtgtcttctattcaaccacagaaaaatgtca

SEQ ID NO: 10949 - DNA, 217 bp, Homo sapiens
tgttccaagccccagtctggcccaaaatggtgaaaccccccaccctctactaaaccatgggccccaatgatgaccactggtggcgtttgagtcatggacgatgaatactacgtgtctgaaactctgaggtccaacagaaaacataattggatagatatcagaaatgtgcaaagatcatattcttactttggattaatagattgaggttcatcatcaa

SEQ ID NO: 10950 - DNA, 556 bp, Homo sapiens
aattcggcaaagggggattataggtgtgagccaccacacccggcctactcaagacttttgagcaaagagttagagcctcagcctttgagatgccctattagaagtcccttaaaaaaaaaattgtaggaatttggtttgtttgcccccaggatatatattcttccagaaagttattaggaagaaatttgtttttttaatgagaaataaagcaaaataaatttctagttggttactgggttttgacaaatttcggctgggatgagaataaatgtgaagcgttagaaacattcttcccatgctggaatggtagaaattatgaaacctacatagaatttaccataaaatgcagataatccttgagttttctgtcagggaaatgtgagtgctaaaaatacaatagcctaaaataaagtttcactgtaatgggtttaatagccaattagatacactaaagatagaattagtaagttggagaataggttagaagaaaatatctaccctgagacagggaaaaacaagaaaatgacatatacagaaaagagcatatgagacacag

SEQ ID NO: 10951 - DNA, 187 bp, Homo sapiens
taaagcttaatgaacaaatgattataagcataaaatgtaggttatgtgctggcatttgggtatttaagaattggctaacttttatggcaagattttcagactcttaatcagaggaatactgtggttctagtaagtgcatctgcattgcagctaggtagttaacaaagtatcttgaaaccttttagtt

SEQ ID NO: 10952 - DNA, 231 bp, Homo sapiens
gggaggtcccaagggatcccaggggaagggagtggtcaggaggtttgggacagcagctatttaccaggtagtactagagtatttcagtattttaatagtcaatgttataactgataacagtcaattgatacatataagcctaatattagtccttgctatagtctttattatcaatagcctctgcccttccctttctaaagccgttgctatcttggcctgtcccctaggagg

SEQ ID NO: 10953 - DNA, 354 bp, Homo sapiens
ctgcaagtaaatggacctctggaaggggcacatgcaaaagggccactggccccttcaattctaaccctcacagaaagcttgcagaagagcaatagggtccccctgcacagatggagggcctaagaagcattagactagctcggggcccaactctgggacccccaaatccaccagtttcccctgcagttccatctgcagccagccattctgctaggtgtaattccatggctgacacatctccatcctataacagtttcccattctctgtgctctggttgggattcttttaagcaggcactttccttgtgaactgtataatgaaatgttctatgtctcaatggacatctgtgtgtg

SEQ ID NO: 10954 - DNA, 503 bp, Homo sapiens
tcccaaagtgctgagattaccaggcatgagccactgtgacttgccccagatcaccatttctactacccttatagaatggatgtaaattacctgcttgtgccaaacattaactcactagacttcacactgctggagaaaatgtttacattttatttgacatcttcagagacttcttttcaatctaagaataccatgctcagagtaaacgtaacaactgatgcactttgctgcagagtccaaaggatatacacggaggcttcaagatgtcagagggaaagcctagttgataaggtgttggacttcacacaccaaacttaatagaaactgcaggttcaaatcccagcagggtcaactgagagtattacgatctgctagaaaaactgagcgtgagacactttactgctctttgacaaatttaagagggccttccagactgtctctggagtttatgaggagacataaaaggggaaaaagctttgcgtttaaataaatatactgtcttt

SEQ ID NO: 10955 - DNA, 660 bp, Homo sapiens
  misc_feature (1)...(660): n = a,t,c or g
tgggtgtcatctacaacaagggatttttgcacaagaatttttatatctttggctatctaagcccagctgtggtagttggattttcggcagcactaggatacagatattatggcacaaccaaagtatgttggcttagcaccgaaaacaactttatttggagttttataggaccagcatgcctaatcattcttgntaatctcttggcttttggagtcatcatatacaaagtttttcgtcacactgcagggttgaaaccagaagttagttgctttgagaacataaggtcttgtgcaagaggaaccctcgctcttctgttccttctcggcaccacctggatctttggggttctccatgttgtgcacgcatcagtggttacagcttacctcttcacagtcagcaatgctttccaggggatgttcatttttttattcctgtgtgttttatctagaaagattcaagaagaatattacagattgttcaaaaatgtcccctgttgttttggatgtttaaggtaaacatagagaatggtggataattacaactgcacaaaaataaaaattccaagctgtggatgaccaatgtataaaaatgactcatcaaattatccaattattaactactagacaaaaagtattttaaatcagtttttctgtttatgct

SEQ ID NO: 10956 - DNA, 199 bp, Homo sapiens
tccaccgtactaggtgccaaggaaatggtattctagtcctcaagatattcagagtctcgtagtgggaaatgacatgtaaacaattattctcaaataatcaacgtgctgtgttcactgtgtcctatagtgataaaaacagatttggtgtcctttctctttttctttctttttttgagacagagtaaaaatgtataataca

SEQ ID NO: 10957 - DNA, 2531 bp, Homo sapiens
gaattccggaaaacaggccgcgcgggcggcagaggagccgggcgccgcaatggacgtgcgggcgctgccgtggctgccgtggctgctgtggctgctgtgccggggcggcggcgatgcggactcccgcgcccccttcaccccgacctggccgcggagccgcgagcgtgaagccgccgccttccgggaaagtcttaatagacatcgatacttgaattctttatttcccagtgaaaactccaccgccttctatggaataaatcagttttcctatttgtttcctgaagagtttaaagccatttatttaagaagcaaaccttccaagtttcccagatactcagcagaagtacatatgtccatccccaatgtgtctttgccgttaagatttgactggagggacaagcaggttgtgacacaagtgagaaaccagcagatgtgtggaggatgctgggccttcagcgtggtgggggcagtggaatctgcttatgcaataaaggggaagcccctggaagacctaagtgtccagcaggtcattgactgttcgtataataattatggctgcaatggaggctctactctcaatgctttgaactggttaaacaagatgcaagtaaaactggtgaaagattcagaatatccttttaaagcacaaaatggtctgtgccattacttttctggttcacattctggattttcaatcaaaggttattctgcatatgacttcagtgaccaagaagatgaaatggcaaaagcacttcttacctttggccctttggtagtcatagtagatgcagtgagctggcaagattatctgggaggcattatacagcatcactgctctagtggagaagcaaatcatgcagttctcataactgggtttgataaaacaggaagcactccatattggattgtgcggaattcctggggaagttcttggggagtagatggttatgcccatgtcaaaatgggaagtaatgtttgtggtattgcagattccgtttcttctatatttgtgtgacatgttgggcagatcaagagacagctacaaaaatgaaggttttcataatgcaatgtaacatagtacttcaaagtattattcaacttcaagtttcagcaactacctacaaaagattctaaggcctagtagtatttaaactaagtttcagaatgttcccttcttgtagagagatggacaaccaaagtcagtgggacaaactccagcacagaagcctgcgaggaagcctatggaatagtttcctgtcctgagacgaaattcagattaggagatattttaggcccctgcaactggggaaggctactgtttgtttttgtttgcttattatttatttgtttgtttattgtgagatatttcaggtgggatcaaagaggtcataagaatttattttcttttgtggggtgtaactactagctttagattacccctatacacaagaatggccaacctaaaattatgtgtgtcttgtacagttagttatattagcagccctctgagatggcgtatctatcggaaggatttcaaacaccaattgctttacctgaacaaatggtgcttaccctttgaacagcagagtgaccacgtagaaggaaggaaaagggcaaaatcgcttcagttaaactgaaattaaatgaacaataaggcaactatataagtaacttctagtagcattgcctgagagacaaattattgtttgataattttcattggtggaataggaatcccaatagatccatattgcttactttgttctttttatactataggaataatattttggttcccctagttataccaaaataccaaaatattatctcatattttctccctctttctcttactctttaccaagttttcctggtggcttggcttccctgactaaagaattaagtctcatttttactttccatttctattttcttaccacttggttggctccctttgtctctgtacctttaccaacattaaggatctcacctctttcttcctcccttaattcataagcaccactcctatcaaagtcccatctcttaaccctgggtatcaaacaaactgtgagttttccagaatctgtttcccagttttcccctcagctttcctggtctcccatccgaactgcttctttgtgcacctcttgttctttctcttggctcccagtcttgattcctgtgatcactcttgcatcactaattgcacaagtgatttcaggtgcaattctgattagcctgcgtccacacagtgatcgatgatcctatgtgcctagaaaggacactgtgtgctgctcatgacctgcaacaggaaaaaagccatttcttgttagcagtgtaagaaccttagagcaaaggagttgaccttctgattgaatataagcacaaccatattaaatgaatcaatacaagaaaattatttctgatactatgtatgtacatatttcttctctaaaatgtatcattcttttctaatgtatatgatctaacaaaaatgaaacatgaaatgcagtagcaaccactaaaaaaaa

SEQ ID NO: 10958 - DNA, 219 bp, Homo sapiens
cttaactcatttgaaaagcaattctataaaacaatatgtattcatgtattgttgggtctataacatataggaatgtaatttgctaataattgcacaaaggaaggcagtaggggcaaagctgtactggataaaggaaatgaatccagataattcatttctggattcttgaatctacaggaagaaagagaaatagcattttttttttttaaggttaacata

SEQ ID NO: 10959 - DNA, 908 bp, Homo sapiens
  misc_feature (1)...(908): n = a,t,c or g
tgttcatagcagttttattcataataggaaaaactggaaacattcaaatatctatcaatacaagaatggatcaataaactgtgatacattcattccatggaatggctaaaggaacaaacttttgacacacaaaacaacatggatcgaatctcaaaaacattttgagtgcaataggagccatacgcaaaacagtgtgagaaaaatgataaataataatggtttcaagaaatgcagagcagacgagcccagaggcaaagacccacaggacagagggtcagtcccaggctgtggatcctaactaagaaactcctgctggattttgcccagctccatttccaaactattttgggttattggacttcttttatcccctccatggtnccctcattttgaactagaatcactgtagtggttattctatgtctgtcccatcatttcacattaggggcagataagctgtttgttcagtttcacaggtcgacagaggtaagggaattatgtcaaggatctgcacttaatggacactctcgggaagcctcatttcacacctggtgtggatgttttagatgggattttaaacttttgatctgatgtggtctacatgacatttttcatgttgaactaatgctttaatgacatgaaatctggaaacctcaggggagagggtaaatgcactttgcagatgggggaatgtgagtgtcctactgtggtaaatggaatttctgaaatggtccccaaacatgccacacccttgtctctaaagcctcttaaggtgatgagacaccattcctgtgactatgttgttatatgccagttatatgactttaagatggtgaggttaccgcatgaactggatctaatcacatcactccatacatgacagagctttgtgtggctctgtgccgaat

SEQ ID NO: 10960 - DNA, 67 bp, Homo sapiens
gctaaaagttgattctagtggtctagtccaaattcttagctactgaaaaaaacccttttccataatt

SEQ ID NO: 10961 - DNA, 352 bp, Homo sapiens
gtattttttaatgagcaggaagtctagaaatgataactagactgtatgtttcatgtgtgtgatttttcagaattcccagagtttactcattcttgttattaaactctagccagttgacatcttcgcaatttcaaggactgatagtgctgtattttctcacgttttctaagtttccgttttgcaaggcctaggtgactttttcatggtgtttgtatgtttagctcttttgaaaaggaattttgaaatctccatcaactgaagtaaatgatgtctgagtgttacagtaaaggtgaccaagtctctttcttaaagtcacaatgactaaagtattagttgaatttttttttttttt

SEQ ID NO: 10962 - DNA, 375 bp, Homo sapiens
aattctaggattacaggcatgagccactgcgcctggccttcaagcttcattttacaatcagtagacactgtcactaattattgagaaaatttatacaaatcaagggaaattcagagaaaagtcaaacagaagaaaaataatgagtctggaagaaaatatagcccagccattccttctctccaggcaggacctaagaagtgctctctgtggacacggcccaaaccagacaggccccttcctgcctgtgcccgatttccaagctggcccaaccaggctattccctcatagcctgtgtagtttacagtgttctacagattttttaaatcatattttaaacaagcttcactttcttcttctaagaatcatgagctgcac

SEQ ID NO: 10963 - DNA, 414 bp, Homo sapiens
gcagaggcgagcttgtcaaaatacacattcctgggctcctccctagacttcccaggtccgtatctctgggggctggaggggaggcctgggaatcagtattttagcaagcactcccagatggctattatgcaaactcacacttcagggatgaggcactccaagggaagccagaagttggaaggagctaagcggggaaaacctcctgatatggcgattctgggcatatcagatgtcttgtagcactttctactccactgtaagatttcccaaccaaacattttcaagagaatgcgactggagcctccagactgacagctaagtgcgcatctcagtaaagtcctggctgttcttccatcaagtagtaaaaactgaagaaagtggctgcctagcattatctccttctcgccttttgca

SEQ ID NO: 10964 - DNA, 428 bp, Homo sapiens
ggtctgttgggagagagagagccaggggtgatggtctggctttcagacctgagatcagacaggcagatagctgaactcccaggcagttcgttggttggtggttggttttttgctaggttttagttgtttttttgttctgaatctcatttcaaagagagcagattgactccacacctaatgcacatcctcagtttcacaaagcagctaagagcgaagtcaggtttcatagtccaaatgatgctattgcttggagtgtaattgtgcaccagccattagcccacatttcttggtagagcctcggtgcccttgggattatgaaccttggcacacagtggaatccgcaacaatttgttttatcagttcctgtccctttgagggagtgacatttcttcccaaggtctcagctcctttaatcctataaaatggga

SEQ ID NO: 10965 - DNA, 125 bp, Homo sapiens
caatataggaagtaacttactacctaggaggtggtgaaacatgacatagttatatatagtaaaaagaacaaaaaccatgcaatcagaggattttaaaaatattaagtccatttaagttttctatg

SEQ ID NO: 10966 - DNA, 570 bp, Homo sapiens
cagtagaataactaaggccccgacacttcagacattacactaaatcagagcattgaatataaaaactaatccacaactgcagtttttaggtaaatgatttctatttaactttaaaaggagtagatttttggaagcattgtaattacgttgaaagtatacttgtttccttgaataaaattttttgaaagctgaataatgatgtaatacagctttcaaattactttatgctgttattttattcttattgtattcacatgtgaaagcatgtgatcaatttttgctgcatcagagatattagagatagttttttattaattgggcattctttatgaccttttcctataaaagaataaggacattaaaatgtaagatgcatgacaaaaatataagtggagaggctcattgtaattaacctatattaagtaatgtttaaggtaggtgttcagagtaatacttttctacattatactgagagaaagaaattataaattaaagtatatcaattattttactaattttactgttacgtaataaaatgcaatatatttaaaaattgttaaaaaaaaaaaa

SEQ ID NO: 10967 - DNA, 88 bp, Homo sapiens
gaattatagaatggtctattaatttttcctttagtttgttgtgctttctgtggtcacagaaaatgctttagaaaaaataaaattattc

SEQ ID NO: 10968 - DNA, 1030 bp, Homo sapiens
  misc_feature (1)...(1030): n = a,t,c or g
aacagccacaataaccattagtgattttattgaagacttattcacagtattttgacctgagaaatggtgattttaacatacccttttaggtgcccacattgatcttagttaacagtcttgtagttccctctttaggcttcaagataattgtgatttcatcgcaccccagatacttccaagtggagccaggcctcagactgttctcagtcactgctctcccacagctgattacagacattgcctgtgcttcctaccccagcagctgtctagtgcacttgaaccacaaaatgggccctcacttctttcctaacccagctccatcttggtaaactgtaacagacagacaggagtccccaagggcacaaaatagtttctttccagatgattttaaaggaaggggggaaaaggaagcatatgtgctaatggagcttctatggctgaaacaatttatctgcagatgcctagccactcactgatcaatttgttatgcgccgtgactgaaatctgtgattccatctgaaggcagtgagaagtggtgttaccatctgaagtgggtcagggctcttacctgactaagctggtactttagcccataagtgaaacaaaatggcactttttaggactacctcagattcggttgaatttctaacttcctgaaatactttctctcacagattctctgctggtctctaagacttaaaaggagagaaaataaaaatatcaaattaaagtgacaagttaactaagggagctgactactgggagaaaaataggaaagttgcgtgatcccaaaactggatttaaaaaaaaaaaaagttatttcagggacactcatgagtggccacagcacaaaatcctgcagtaggacttacctgggctcgacagtgtggtagcagcatcggcacaacctnaagtggaacccagaggggacaaattcccttgaaatttcattcaaaattttcccagggccagtttttaagagtacctggaccttcgtcagccagaatttgttaaggaagcaagagggttt

SEQ ID NO: 10969 - DNA, 413 bp, Homo sapiens
gaggaaatatacataaataagataaagctgacctgtagatataggcaggttataagagcttagagttgtctaagttgagtgcaaattttcctctgatctttctgatgccgagacaaaaaaggcagctcatgtctgttatgtgattggaatggaacccgagaagagagcatgctgtgttcttgtgggacaggaaagcttgtgtgcaccaagtctgaaccaccaccttcattggtgacatagattatgtgctggaacatatttcacaccggcctggcagtaaacacttgtagtgttgtgcagtggaaacggtcatcttccgctaaatcacggcgtgttgtgcagccggaaatggtcatctgctgctaaagcacagcttccatcgtaatgtatgctccttgctcaaagagtgtggc

SEQ ID NO: 10970 - DNA, 215 bp, Homo sapiens
  misc_feature (1)...(215): n = a,t,c or g
gaacattctgaggaacgtactaagtgactgatgggaaaagaaagctaggctagaaggaaaaacaggaaagagaagaacagagaagctaaaagaaaaaggaataagaaagaaataagctgnnnnnnnnnnnnnnnnnnnnnnnnnnnnnnnnnnnnnnnnnnnnnnnnnnnnnnnnnnnnnnnnnnnnnnnnnnnnnnctgggcaacacagcgaaa

SEQ ID NO: 10971 - DNA, 198 bp, Homo sapiens
gaactcccttcgttgcgttcctctttttctggaggggaatgttagaagagagatagagcttccttttataaccttcctcattctgctgcacgtctagagtgggtgtgggggctggcaggtgggaggggcggtggacaaatggctgatggtggacgggaacagcacacaaaggcagcctcccctggcctctagccctta

SEQ ID NO: 10972 - DNA, 2925 bp, Homo sapiens
  misc_feature (1)...(2925): n = a,t,c or g
ccgcggcggagccagaggctgcaggaagagcccgcgggggcccggagggtgcgattcctcggcccccgcaaaacaatgtgtgttgtgagccaggacgcaacttgccggagcggcgggggcgcgccgagcccgcctgagaccgcgctgaccttctccccccgccgtccgttgggcccgagcgcccagctcctcgctccccagttcgcgggggccgggccgagccgcggggcggggccgcccctccgtcgccgctgcctcctcccccacccccagccgcggaggatgcggacggcccccggcggcgtctagcggccccgggcccaggcgcgatggtgcagcagcggggcgcgagggccaagcgggacggcgggccgccgcccccgggacccgggccggccgaggagggggcgcgcgagcccggctggtgcaagaccccgagcggccacatcaagaggccgatgaacgcattcatggtgtggtcgcagcacgaacggcggaagatcatggaccagtggcccgacatgcacaacgccgagatctccaagcgcctgggccgccgctggcagctgctgcaggactcggagaagatcccgttcgtgcgggaggcggagcggctgcggctcaagcacatggcggattacccggactacaagtaccggccgcgcaaaaagagcaagggggcgcccgccaaggcgcggccccgcccccccggtggtagcggtggcggcagcggctcaagcccgggccgcagctgcctggccgcgggggccgccgagcagcgggagggcctttggggggcggggcggcggcgcccgaggacgacgatgaagacgacgacgaggagctgctggaagtgcgcctggtcgagaccccggggcgggagctgtggaggatggtcccggcgggacgggccgctcggggacaagcggagccgcgcccaagggccgtcgggcgagggggcggccgccgccgccgccgcctccccgacaccgtcggaggacgaggagccggaggaagaggaggaggaggcggcagcggctgaggaaggtgaagaggagacggtggcgtcgggggaggagtcgctgggctttctgtccaggctgccccctggcccggccggcctggactgcagcgccctggatcgcgacccggacctgcagcctccctcgggcacgtcgcacttcgagttcccggactactgcacccccgaggttaccgagatgatcgcgggggactggcgcccgtctagcatcgcagacctggttttcacctactgagcccaccgtcagcggggcgcgcacgcccccaaaccagctgtttacatacaggaatcaggtattggggcccctcggaggccgaggctggcaccccatctcccgcgcagcctcccccctcctggacgtgcccatcccccctcagatccagacatcccctcccccgcagacacaccccaaggcagtccaacccccaccccttccccgacacccaagcccctccccacgtcgccccctcctgcacagccaccagcagccagccccctccgatacacctcccgtcctctcctacagacctgcacccctccccccttttgcacacgcccctcctcgtggccggaggaccgccccctcctttgctccggaatctctcctccctcgcccggcccgccttctctgggttaggggggcgatgcggccgggtggcaacgcacgcgcctcctgcgcccctcccttccctggggggaggggcgcaccccttttatccccggagcgctagggcccgcccctccgctggggcccacccccttcgtgcgcatgcttaatgcttctggggaggagggggctggtcccagcggagccgcactcttcgcccgctccgggcaaaagcgggggcgagtgtagagcgatcctgggaaatcctttgatccgggagccctaggtttcctctccacccagcggggcgtcgctgccttaatgggaggagcactcggaagggttggtttgggcctgaaactctcccaagtggcatagccccttttccggtatggggtctcctacacccacgcgcaccacctctccggtcgcgtggctgcctctacagcctacctatacgtccctttttccccccaactgggaattgagaggtaaggtctttctctggaaatccagcagtagaggaagggaccacccaagaaaactaaaaaccaaggcaccttaccagtctgtctggggacaggatccctgctgcaccttccccaccccctcctgggaagtgccccctcacctcagggcacccgcaacctgggctcctccctgagcccaccggcccttcctgtcacccaggtccaccctcagtactcaagctgcagtatacagcgggaaaaactgaggcactttggtgctaggggtttgggactgaggcgtggagagcagatctgatggcaggaagactctcgcttttaaacatctgggtttggggagagacatcgacttggccagtgagactggagaatggattccgagtagtgatgggccgtttgcacctcggtttttccacgtgagaaantngggagaacgcctgctgttaggnggnagttgtgtccagttcagggtgccctcgggagccctgtccctgttgctgtggcccctctcacgccgccatctctcttccccgccccgcccctccggcctccccacaccccccttgccctcactacctgtatctcaccggcgtgtgttcaccctcccgggtggctcacacactctcattcacacacacaaatctcaggaacaaacggtcccagagtcctccggacccctgcccagggtctctgcaggtctctgccccacgcgttcccgtcgctgacaaagccaccagctgcctcctttaagcttggtgctccggctctgggcctttcttgcgctctat

SEQ ID NO: 10973 - DNA, 1234 bp, Homo sapiens
tgggggaggagccaagccctcaccccacaagggccaggttggggctttgttgctgacccggcccaagtccccacagagcaccttctgtagctccagcttgtctccctggcttctctttgaaggagaaaaatgtaaaatatgcactgagaaagcccagcccccgcctgcttagtcagccccggcagcagggcagccatgggaactcaggaaaagcaggaaccctttccaaaaagcccagagatgccctgggctcagatctgtaattctcccaggagctgtgatagagcaggccacacaaagtccctacgcctccctgctgcctcccccagatgcatgtgatggcatcaccattccccaaattgaatatcagcatgcggcctgaccagggactctttagatgcatgaatttatttatatgaaggctctcacagagacacacacagcacttcagtagcatttgcattcctggttaaagaatcaccaatatttaaaataaaaactttcctgaaattgggactgtcatgttatccagaagggctggtacatccgcccaccatgtccccctgctgggtcaggagccaacacaggaccctgcgtgtgagcgtgcctgacatctcacgcacggccactccagagccggtccctgtccttggaaagctgtgaagccttgcgttgagttccttctcgatactgacggctccgtgctgacattctgagctctggagtcacaccagcgcaggggcgtggaggaactgaggtttggaaggaatgccaggtctcgcacagcttggcctcgagaaggtgagaggaaggcaaaggccagggaggggacccagagaggcctggcacacaaggcccaagcaccaccgtcaacacagcccagtccatacagaaatgggtttcatgcctgaaaagctttttacagaaagatgccgcctgtagccagtgacagccgcaaccctacaggcctcagttccttgcagaggtgaggggtagagagtcagcctccctcccttccagcagcgacccagcttccctccacttccaggtggtgctgggctcaccaagggagcactggtgggtgctctgaaaacccacaggatcccacctccaggcccacctgggtcccatctcactctcttcttctttcaccaattgctaacatagaccttgttgggatcacgatggcttcacaagccagctgttgggtttgctatgttactgtggctcagtc

SEQ ID NO: 10974 - DNA, 155 bp, Homo sapiens
gctggaagtctaccatcatgacggaggcaaagcgggaagcagacgcgcggtctcacagggccagagcagcaggaagacagagggggaggggccacacactttcaaacagccagatctcacgacaactctatcacagttacagcactagtcgacta

SEQ ID NO: 10975 - DNA, 473 bp, Homo sapiens
cagaggtccggaaaatcccagggcaataatggtgcggtcagctgagtcccggggtggaagcgtctgtgctgctcaggaactcggagccttcccggaggaacaggatgtccaaggtctgctggatggtcgccttgtagcttctcatcaccttgccagtccttatatcccaagctttcatttcagagctgaagcctccacataaaaagatgttgtggtcttttggatggaatttcaaggtagtgattctaaagtcacttcgaccactaaatagctgggttcctgtttcaaggtctgttaggtgcagcgcgaagtcaaagccaccactgaggatgcgccggccacagggagcccaccgggcggcccgcactgcctctgtgtgcagggagtaggtctgcaggcagtgcccggagtccacggcgttccataccttgaaagttttatccatagaagtggagagaagcatgtggctcttc

SEQ ID NO: 10976 - DNA, 270 bp, Homo sapiens
ggggtgatgagcaaaagacacttgagaaggcatatccagacatataggcaacctaattaatggtggctgtgtgtgtggtttaactttccttttaagagttagatggaaggaatcttaagctacatttagtctgtctcattttgtgaattagatttttaaaaaaggtcatgtggacagactagtggaatagaactaaggtatagacctaagagcatattgaaccagtgtatggtaaacttggcatctcagagcactgggggtaaaaggtgg

SEQ ID NO: 10977 - DNA, 629 bp, Homo sapiens
  misc_feature (1)...(629): n = a,t,c or g
gatggcaaactccgctccaagggtaggctgtgtccaggactgtactcccgtgtgctttgacagaggtgcttcattttttgttctttcaaccccctgtgaatgtatttatcagcttctctcgctcccgctcgccgttttacaccgttgagccggcgaccaaagcagcagctccaccacctcccaccaaccagagcccacccccccgcacgcccgccgcccacccttcgttttggtttaatttttgttcttttaagctgcttctgcgcttctccatgtgctgtgatctataacctgcctctactgtctggcctcacagggtcctccggggttcacagccctcgccgcacgcacagcctccacctcacaatcctagcagcatgatgggaccccacagtcagccttttatgtcaccgcgatacgcaggcggccccaggcccccgatcagaatgggaaaccagcctccgggaggagttcctgggacacagccattgctgcccaattctatggatcccacacgacaacaaggccaccccaacatgggaggatcaatgcagagaatgaaccctccccggaggcatggggcccatggggtcncggccccacagaattacgggcagcggcattgaaga

SEQ ID NO: 10978 - DNA, 447 bp, Homo sapiens
gttagcttcgatggcaaccatatgggaatctaaattgcgttttgaattacagggagatggtaggaagaaagctaaatatggttatgaaagtgtcatatgggaaaagtgtaagaaaggtataaagtggggaaagtaattgaatataggcttgcttagtgtggccactccctctgtggggcagtatgaaggcgcagaagcattctcacttgatatactccgcagattgaaatgaagccaagtggggagaagttggaaaaccaaatcatgtttcaaccaccataaacttgccaaaatgttgcactcatttagatgggtcactttgttttaagtgtccacaggtaataaggtagtccctggcaaaaggtgaaagcaatctgcatttttaacagaacttttcactaaatgatgtttttcttgttaagcaccccaaagagtcttcccaagaat

SEQ ID NO: 10979 - DNA, 405 bp, Homo sapiens
gcaaccctatgaagcagacaccagtaacagcccagtttacaagtgaggaacctgagaaagagtgctcagttacttactcaagtttacatggtgggaagtagcatggccaggcagtgtctctgctgacgctactccgtgttaggatatgtacaggaataggaaagtgcgtgtctattttcacttcctggagcacaggaccagccacaccagcaggtttctggcactctggagtgtagttcagaaatggaaatctcaccaggccccactggggtctgaagcctcactatctcctagccgctggtgttggcacatcggtgttactcagccacattcagtctgcttctcctgctgccagcaccctgcttctctctgctctcctccaatcctcactacttctgcctagca

SEQ ID NO: 10980 - DNA, 249 bp, Homo sapiens
ggcaagtcaagttgattgaattgttggcaattagctggcttttgtgatggttccttggataagtctatgaaatcgcccaggatcttaaagtgtcaaagagtttgaattagataatctctaagatttgtttagcccttcctttgttccccaaatttcatacacttaatttctagttgcttaaagaaaaatactttgttgtgaggttatagttgtgaggttataggtgagaaattaaaaagaaatatttgt

SEQ ID NO: 10981 - DNA, 407 bp, Homo sapiens
  misc_feature (1)...(407): n = a,t,c or g
gaggatagggagcctggggtcaggagtgtgggagacacagcgagactctgtctccaaaaaaaaaagtgctttttgaaaatgttgaggttgaaatgatgggaaccaacattctttggatttagtggggagcataatagcaaacacccccttggttcgcacatgtacaggaatgggacccagttggggcacagccatggacttccccgccctgggaatgtgtggtgcaaagtggggccagggccaggacccaagaggagagggtggtccgcagacaccccgggatgttcagcatcccccgaccttgcctttctggcgggcacctcccgggtcttgtgtttgagttcagcaggcttggggttgagagcntggtgtnttgcttngggaacagggttncaggggccaagctt

SEQ ID NO: 10982 - DNA, 389 bp, Homo sapiens
gcttgaaaagcacttgctgttgatctgtcacatagctggccaaaggtgacttgattcagatgaaaatagttagttagtagttcaggttattcttggttcattacttctgtttctctcagtctttcttgaatgttctgttttacttgtagaactgacacatgagtttctacagattttggagaaaactcccaacaggctcaaacgcatttggaattggagggcatgtgaggctgccaagaaaacaaaagcagatgaccgaggaacagatgaaaagacttcagaggcagacaatcctcaatatggatttcccagagctctttcaggacacaaccattgcaggtttaatgagcatgttcaacttctaccacaagtggcagtgcttccctgcc

SEQ ID NO: 10983 - DNA, 614 bp, Homo sapiens
  misc_feature (1)...(614): n = a,t,c or g
ctgggcccaccacgacgcctgaagtcacagctccttccaaggtttttctggagaagacagcaggagcctctcagttcttttccaggaaggaacgagggtgggagcgagatggagatcctgggtgtgtgcccagtgagccctggggccttgagttacatggaatcacccacagggttttggaggccccgagaagcgtcttcccttgagttggccaagggaataagcaagaggagacatttcctccctgccccagcactctgtcccaatccgagaagttccgaggctttcccaggggcagtctgtgtcacgctggccatttgacataaaggagacagcccctggtcccagcttgtcagctctgctgccgacttgctgacttatcaacttcctctaggtgtttccactccaccctggcctgctcagagcctcagtttacccctgcattaaaatggtggggggactggtcaaaggactcttatgtcactgcagtgtcccattctaggattgtctgaaggccagagtaggggttggggggagtgtggacaaaccccgcaaatcagagtggggaaggtgagtggtagagaaggggtctctgnaagcccttgngacngaca

SEQ ID NO: 10984 - DNA, 663 bp, Homo sapiens
acaagtagctacgactgacaagcacctgccaccataaagggctgcattttgccaccataaagggctgcatttttttaaaaagcctaggcagctctaacatcatctgatatggacacaaggccaacagtttccttatttacatccttacctctaaaagatacttcaaagtgacaaaaacgtgttccttccccacttagagacaatgattaacagggccctatatgttcttaccacatacagaggatgcatttatttttgctctatgacacttgcaaaaatctctactgtaattaatttgggtctattaactctctgttccatcatagaatgtgggccaggccttacaatgggagagccagagttaaaacttcaagttgcatctgtttttggggctgagtcaccacctttgcctcatgctcctttgtctggcaaaggcctaggattctttctttaaatgaaatgcttaggactttttgtggcttgttacatttgtcatttaactgcagtgctattctttgaaagctgctatgtgtattttctctgaagtctgcattttactaaaatttacaacagtctgattgattgattactgtccaggtacattttagaaaaaagtgttcttcttccagtttgttttactaaggcaaactttgaagttaaaaa

SEQ ID NO: 10985 - DNA, 411 bp, Homo sapiens
  misc_feature (1)...(411): n = a,t,c or g
tgtccatcatgtattgtccatggcaacaaattacattaggttgaacctttccttgattttatgtatttaatattnagaatttgttggactcaactagatatattttttaatttatattttttccattttactttgaagatttgaaatgttcatacctgagcaaagtctacacaggagtaatggactgtttaacaagtttcccaaaacagcattttcctgctccttcgtatgtaggtgagacacttagctggaaagacatacaaatttagactctcgttgacattgtcgttttaaaaggaagttgctaaggcgntcaatctcaatattagtcttgtttacttcttcttaatgtcaaaattaacatttacaacatccaattataaaagtaatgctttatgtttatacactgct

SEQ ID NO: 10986 - DNA, 93 bp, Homo sapiens
tgcagacagagctcagaactcggctcctgcaatacccatcctggctcatctacaccatcgaggatgaagagcagccgctctggcctagacagg

SEQ ID NO: 10987 - DNA, 357 bp, Homo sapiens
  misc_feature (1)...(357): n = a,t,c or g
ggccttatgaatggccctatagagatacctcatcctctccacagtgtgagcttcaaggggaagtatgagacttctctgaggaaccagacccttcacaagcgcactgcttnttncntttgnnctgggacttcnatntnacnntgntnnagnnnnnnnnnnnnnnnnnnnnnnnnnnnnnnnnnnnnnnnnnnnnnnnnnnnnnnnnnnnnnnnnnnnnnnnnnnnnnnnnnnnnnnnncgtcnntattggctcanctttctnctatctnnntcttctgccanctattattttactttnnatnccnnacntgnctttgtcttgnaagccgcntgcctgatactgctttnangtagatgt

SEQ ID NO: 10988 - DNA, 1992 bp, Homo sapiens
cacagctcagaacaccaactgctgaggctgccttgggaagaagatgatcctaaacaaagctctgctgctgggggccctcgccctgaccaccgtgatgagcccctgtggaggtgaagacattgtggctgaccatgttgcctcttacggtgtaaacttgtaccagtcttacggtccctctggccagtacacccatgaatttgatggagacgaggagttctacgtggacctggagaggaaggagactgtctggcagttgcctctgttccgcagatttagaagatttgacccgcaatttgcactgacaaacatcgctgtggcaaaaacataacttgaacatcgtgattaaacgctccaactctaccgctgctaccaatgcaggttcctgaggtcacagtgttttccaagtctcccgtgacactgggtcagcccaacaccctcatctgtcttgtggacaacatctttcctcctgtggtcaacatcacctggctgagcaatgggcactcagtcacagaaggtgtttctgagaccagcttcctctccaagagtgatcattccttcttcaagatcagttacctcaccttcctccccttctgatgatgagatttatgactgcaaggtggagcactggggcctggacgagcctcttctgaaacactggggtaaggatgagttccaccacttcatgggtttctaataatagacttcactcttctccctagcctggggccttgagtcttgcagagccagccctccaccccatcccatcccacacacatgcacatgagcacactgcacattctgacctcaacaagctccactttcacagagcctgagattccagcccctatgtcagagctcacagagactttggtctgcgccctggggttgtctgtgggcctcatgggcattgtggtgggcactgtcttcatcatccaaggcctgcgttcagttggtgcttccagacaccaagggctcttatgaatcccatcctgaaaaggaaggtaagattgagatttgttggagctgaaacctcagtatgagagggaggaaagtgggagggggttgtggacatgaatgtggttgaaagttgtaggcgaattgggaagtggcatgatgatcacacaggaggcccctcagacccatcgatctcatgtctgtcctgttgcaggtgcatcaccatctacaggagaagaagaatggacttgctaaatgacctagcactattctctggcctgatttatcatatcccttttctcctccaaatgtttcttctctcacctcttctctgcgacttaaggtgctatattccctcagagctcacaaatgcctttcaattctttccctgacctcctttcctgaatttttttattttctcaaatgttacctactaagggatgcctgggtaagccactcagctacctaattcctcaatgacctttatctaaaatctccatggaagcaataaattcccttttcatgcctctattgaatttttttcccatctttcatctcagggctgactgagagcataacttagaatgggcgactcttatgttttaggccaatttcatatcattcccagatcatatttcaagttcagtaacacaggagcaaccaagtacagtgtatcctgataatttgttgatttcttaactggtgttaatatttctttcttccttttgttcctacccttggccactgccagccacccctcaattcaggtaccaacgaaccctctgcccttggctcagaatggttatagcagaaatacaaaaaaaaaaaaaaaagtctgtactaatttcaatatggctcttaaaaggaatgacagagaaataggatacaagaattttgaatctcaaaagttatcaaaagtaaaaaattttgttaccaaaagtcaaactgcattctcaaaactttaaatttgtgaagaatgacaacagtagaagctttcctctcccctcctcgcctttagggaataaaaattctttaggt

SEQ ID NO: 10989 - DNA, 527 bp, Homo sapiens
  misc_feature (1)...(527): n = a,t,c or g
tttttgaccattctcttttagtctatgggaattacagggttgccgctaaaatattcacttgttcatatcgtgtcagagatttcctcttctctggagcttaggtggctcttcacaatccataggcttgaatctgcaacctagtgtaaactgccttgctttccccggttctttcccctgctagcacctgctttctcatccctatctccagtcaaagatgggattgcttaatccaactctggagagggaccaagtcttttctgcccacatctcacacaattgaggtgtctgaacaagcttggggagggtctataaggggtaggctcaaaaaaaaaaaaacccatttggcagaggcagttttgccaacacaagggctctttcaagccgactttcacaaagagagccggacttgttagttggcttctgtctcttttaggagcccaagaaaatagtaatttaagtggcctagggttttaggggaggggncagattaaggcacttacttccccctggccttcccaggttgaagg

SEQ ID NO: 10990 - DNA, 409 bp, Homo sapiens
ctccgggacaaggagcggcagattatcaaggagcgttttaagggcttcaatgatggcctcgaagaactgtgcaaaatccagaaggcctgggctattccagacacagagcagagggacaggattcgccaggcccagaagaccattgtcaaggagacctacggggcctttctacagaagtttggcagcgtgcccttcaccaagaacccggagaagtacatcaagtacggggtggagcaggtgggcgacatgatcgatcgccttttcgacacctctgcctgagcctgctgctagccctgcctggttccaccagactggcgtgtcattggacagataaaccagtgttagcttgcaaaaaaaaagataatagtattaagtattaattagtgaaatgttaaaaaaaaaatttttg

SEQ ID NO: 10991 - DNA, 370 bp, Homo sapiens
ggtaaaaaaaccctgtaaaaaaacccattggggtcctaggggaagcttttgccccctttgtgatcaggaagtaattcgccttccttagaaagcctaactaatctccctgcatcgagctctgatcccatcaattcctccgtgaagtctgggtattaaaccagccccaaagaagaacagaaaaggggattatcctcttccactaggacacatgccttttctggcatgggaagataaagctctctgatgataaatttccaagtacattttaatgagaaatgacatggattaagaaagagatagagaaaataagagatgaaaggcattctatttgttggacatttttagccacagttctccttgtacacccctc

SEQ ID NO: 10992 - DNA, 388 bp, Homo sapiens
gggttcttctgcctcggttgcaagcacctcctccatcaaatgtcttcaaattcctgagaaactagaacttactaatgagacttcagaaaaccctactcagtcaccatggtgttcacagtatcgcagacagctactgaagtccctaccagagttaagtgcctctgcagagttgtgtatagaagacagaccaatgcctaagttggaaattgagaaggaaattgaattaggtaatgaggattactgcattaaacgagaatacctaatatgtgaagattacaagttattctgggtggcgccaagaaactctgcagaattaacagtaataaaggtatcttctcaacctgtcccatgggacttttatatcaacctcaagttaaaggaacgttta

SEQ ID NO: 10993 - DNA, 369 bp, Homo sapiens
gactggaagtcacactgcggcggtgagttttactctgtgttgtattgaggctgtgcctccaggtccccggcaattctgtacctgggatgtggggtctccacagacctggaaattctcgcccttcttccttcaacaagagcaaatggagacattcccctaggagtccggaagtcacttccttttgggtttaaagtcgccctgaggctgccctgtcctcggtctttttgctatagggcaatgtatacagtttgtatcgcgtagttttcccgttcacaaccgtttgttgactcctcccaccccgcgctttttaaagtcctcacccgagaggtggatccctgctctggcgcttccagcctcaccctcgtcggc

SEQ ID NO: 10994 - DNA, 1865 bp, Homo sapiens
ggcgctcgctgaggcaaaaggaggcgctcggcccgcggcctgcacagggacttagcccgcagagatcgaccccgcgcgcgtgaccccacacccacccactcatccatctatccactccctgcgccgcctcctcccaccctgagcagagccgccgaggatgataaacacccaggacagtagtattttgcctttgagtaactgtccccagctccagtgctgcaggcacattgttccagggcctctgtggtgctcctgatgcccctcacccactgtcgaagatccccggtggggcgagggggcggcagggatccttctctctcagctctaatatataaggacgagaagctcactgtggacccaggggacctccctgtgaatgatggaaaacctcacatcgtccacttccagtatgaggtcaccgaggtgaaggtctcttcttgggatgcagtcctgtccagccagagcctgtttgtagaaatcccagatggattattagctgatgggagcaaagaaggattgttagcactgctagagtttgctgaagagaagatgaaagtgaactatgtcttcatctgcttcaggaagggccgagaagacagagctccactcctgaagaccttcagcttcttgggctttgagattgtacgtccaggccatccctgtgtcccctctcggccagatgtgatgttcatggtttatcccctggaccagaacttgtccgatgaggactaatagtcatagaggatgctttacccaagagccacagtgggggaagaggggaagttaggcagccctgggacagacgagagggctcctcgctgtctagggaaggacactgaggggctcagggtgagggttgcctattgtgttctcggagttgactcgttgaaattgttttccataaagaacagtataaacatattattcacatgtaatcaccaatagtaaatgaagatgtttatgaactggcattagaagctttctaaactgcgctgtgtgatgtgttctatctagcctaggggaggacattgcctagagggggagggactgtctgggttcaggggcatggcctggagggctggtgggcagcactgtcaggctcaggtttccctgctgttggctttctgttttggttattaagacttgtgtattttctttctttgcttcctgtcaccccaggggctcctgagtataggcttttcagtccctgggcagtgtccttgagttgttttttgacactcttacctgggcttctctgtgtgcatttgcgtctggcctggagtaagcaggtccgacccctccttctttacagcttagtgttattctggcatttggttaagctggcttaatctgtttaatgttatcagtacattttaaataggggcattgaaatttactcccaccaccagggcttttttgggggatgcctgggcctttaaaacactagccaaactctaattaattctcaaatcactgccaggagttcttgctcctggctgcaggcccaggccccaaggtctccttcttggggtcacaaacagcagtaaggaagaggaatatatagcaactcagggcctgggaattgtggggcaatccgttcttagggactggatacttctggctggctgagtatagtactagctgcctccccaccaggttccgagtagtgtctgagactctgctctgcagggcctagggtagcgctgggagtgtagaagtggcctgcccttaactgttttcactaaacagctttttctaaggggagagcaagggggagagatctagattgggtgagggggacggggatgtcagggaggcaagtgtgttgtgttactgtgtcaataaactgatttaaagttgtgaaa

SEQ ID NO: 10995 - DNA, 291 bp, Homo sapiens
  misc_feature (1)...(291): n = a,t,c or g
gcggcagtgccctgggcactatggttttgagcttgtacccagcgctgcttttgccttgctctgtgaccccaggcaagctgcctcacctctctgggccagtttccccatcgtacagtggtgctgcacaccctggccctgtccccgaggtggctgggaggtggctcctcaaacagccgctgtctcatcagtgcccggtgctgggtcagggatcgactgaggctctnagctaactgggaaacacagtggccttngagggctggggagtgtcatgggggtggggacagggagtca

SEQ ID NO: 10996 - DNA, 516 bp, Homo sapiens
ggaagcggaaccagaatgggccattttgcggtacggaagctacacagcaacacgtataggagactctccccgagatcttctagggagtgacccatctatttttgtttgggaagaggaaactccgaaatgggatcgcggaagacttaaagggccaggctgatttttttttcctactgcaggtctctgaggctgtggttgctacagggtcaccacgagcttggcttacttgtctcatccttcccttgcctggtatcattttctcagttctcccaaaagccatgtcccggcccttgctcatcaccttcaccccagccactgaccccagcgacctctggaaggatgggcagcagcagccacagcccgagaagccagagtccaccctggatggggctgcagcccgagctttctatgaggccctgattggggatgagagcagcgctcctgactcccagagatctcagactgaacctgccagagatcttctagggagtgacccatctatttttgtttgggaag

SEQ ID NO: 10997 - DNA, 212 bp, Homo sapiens
gctggggacagaacaagttagatataaaaatcaagatttctacgtagaattgttaatgtgagatgcccatcaaacatccaggtggataactgcggggcagtggcatgtgagtctcttggagctcagtggtcaggtagaactggagataccattttggagtcactagtctcaccccagatgagatccacgagggcaaagtttttttttttttt

SEQ ID NO: 10998 - DNA, 195 bp, Homo sapiens
ggttacacaggagcttccgcccatgtggcctcggagtgggaccctgcgggtcatcaatctgtacattgcctgagagcagccgtgtatgctctggaagggacaagaccaggtacctgtcgggggatgcggccgtggtaccaggcatggctgcgcaggtcctcgctgctcaggagcagcttccagctacttcttcag

SEQ ID NO: 10999 - DNA, 367 bp, Homo sapiens
gagagctaagcctggaagctctttcatccatccgtttgtccatctatccatccatctgctcatccatccctccatctgctcaacaaacgttagagaatcaatccttgtgtcagatactggggctgccctcaaggagcttttatagagttcagggtacagccaggtgggggagacagatcactataaaaacctaccactataatccaaaggacaagagcaaaaatagtaaagaggagagaagacccaaatttgcctggtgggttcagagagggctttctagaagaggtaaaaaatctttcggggctatcacttcaccttgcctggtggataaagggaggactttccagattacagtggacagaatgtt

SEQ ID NO: 11000 - DNA, 132 bp, Homo sapiens
ggaaaagatcaatagctttagccacatggaagtgtgaacatcctgatggggaaaataccacaaagtctaatttaataactagggacacctgtgtgccacagctgtggcacagactcccactaaagaagtagg

SEQ ID NO: 11001 - DNA, 767 bp, Homo sapiens
tttttttttaacatcgtagagggcaatgctggcaaacaggggctcaatttcaatctcgaacttcaaggtcagcaacttgaccaatattctgttgcccaggtgttccttgggacattctggtactggacgtatttccacagcatcctcctcgtccactgatgggtaaagggcaaagagctcggcctgcctattggtcctccgggcctcctcgttctgcttctcaaagtcctcggcactcacttgctgcaggaggttttctagccgcttgtcaggctgcaggctgcggaggtcaaagtcacaggcagtgacggggcctttcccagacacgtcgcacagcacgtttaagtggcgggggcctgcctgagcagcgggttcactgcactccaaggtttccgactcaaacgtctgtttcggaagcgtcttgtgaaaatcttttcgagatccagtctttttaaagccacagatttctggacttccttggtttttccggttcacgattagccactcacggatgtaggtctgaacacagtccctgacatgagggtccagttcaaccccttactccggcaaagagggctgcaaagtcctacattcctttgtcgtgaacaccacgtccaagtcgtcatcagtgaagtccccgagctcctgggcaagctgcacatccaggctgttcaggtgtgtcatcagaagtccttcaaagtccactggctccacagggtcataaaactgaggctttgaaagattcacagttacacggcgcgtaaatt

SEQ ID NO: 11002 - DNA, 510 bp, Homo sapiens
acggagcctaaaataagcattttatttaataaaaaatggcttctacatctcaaatcatgtccataacttacaatctaaatgaaagccagttacataaataagaaggtcattctggaagaatcaaattcctaggacaggagggaaataagtgcgtccagaaacttgctccgatcctcagctttcagctcaattactgagaggtcaaaatggttgtgcagcatccgggagctggtgctttccgctgccttctcaaacgccctcccaaaaaagttcttcctgtccgagctgtcggtctcaggggggatgcccaccacggtcactgtgccatgctccatgctcaggggggcagccatcaccaggggcagcagtttgcagcgccggttctttgtcgaacacacaaaggacttgagcaggtgtttgctgagcaggcttagggatgccggcctagagaacagcatgacatctggagtgccctccatgagagagcagtacaggaaaggcccctgggag

SEQ ID NO: 11003 - DNA, 387 bp, Homo sapiens
gcagaaccacacacttctcagacctaaggacagagtaggtctgattcatgatgtgtttcagctagttggtgcagggagactgaccctagacaaagctcttgacatgacttactacctccaacatgaaacaagcagccccgcacttctcgaaggtctgagttacttggaatcgttttaccacatgatggacagaaggaatatttcagatatctctgaaaacctcaagcggttaccttcttcaagtattttaagccagtgattgacaggcaaaagcttggagtgacaagggctcagtctgggacaggatgctccgctcggctctcttgaagctggcctgtgacctgaaccatgctccttgcatccagaaagctgctgaactcttctccc

SEQ ID NO: 11004 - DNA, 385 bp, Homo sapiens
gctctaagtggaaaagcctcctagagaatgaccagctcttgtcccatggcggacaggacctctcagcagatgcctttcacaggttgatatgggaagtctggatgccttttgttcgaaatattgtcacccagtggcagccaaggaactgtgacccgatggtggactttttggatagttgggtgcacattattcctgtgtggatcttagataacatactggaccaactcatcttccccaagctgcaaaaggaggtggaaaactggaacccgctcacagacactgttcccatccactcttggatccacccatggctgccccttatgcaggcacggctggagccactctattcccccatccgtagtaagctgtccagcgccctgcaaaa

SEQ ID NO: 11005 - DNA, 477 bp, Homo sapiens
cttttaagcaaataagaatctcagagactcgcagcatagccatacacctcagcctgtgaaatgaacgatccggaccctcaccaactttccccacctcaggcagccctgtgtgtttaccgttcatcaccactcgggggcaccgggccgcccacccactcccaaaatccgtcagtattcactggacctcaggccctgtgcaggagtgcgatccgggctgggccgctgggcaggctgaccccctgcccttcctgcggccatcctgagttggggtgaggcctgggcagccggagggcagggctcagggagcaggaggctgcatccgttccacccccagggcgtgggggacaaaagccaaaggtgctaggccttagagcagacaagggctctcagccctggcatgccccctaaagggaccaaggtcctcctatttcccagaaccccgttggggcagatgttactgaacctgtgaatcagacc

SEQ ID NO: 11006 - DNA, 89 bp, Homo sapiens
gagagctcagccaggggtctaaaactggaccctatggactccacagatttatttagtctgcacagtgtttaaaaatgtttttagttagg

SEQ ID NO: 11007 - DNA, 347 bp, Homo sapiens
ggttcaaaggactttatgatcttacagataggaactaaggaataataacataagaaataaaaaatgtggaaataaaaacgttcaatcataatatgattaaaaggtaaggcaccaggtggggggtcgaagtaagttcaaatccaaaatagagaccactgggctagtagacacttcacattagaagcatggctaggtgtctactccctgagaaccaaaattccaccagatacaatgaacaaagctttagagagagaaaacatttgaacattttacgggcagaaaatggcccacatactctatagacaatacaatttccttcaaggcaaactagaactataaggcttttg

SEQ ID NO: 11008 - DNA, 308 bp, Homo sapiens
ggcgaggaggcctgaactggagatgaacagcggcagagcctcaccttctcagagcctccatttgatcatttgaaaaatggggtggtgaaagatacatcacggggctgtttgttagttcacttcagtaacgttcgctgtgcgcttccacgtgcctggatttgagagatgtgcttggtggatgtagctcttttcattgagtgtttcccaggcagaaggtggtggtgggaggggacgaggccagcttgggtttgtcacctgccttgtgctccttaacccttgtttcttgggccttgtcttcccttttcacc

SEQ ID NO: 11009 - DNA, 365 bp, Homo sapiens
gggtggtcttctctccagtctacacctttctgaggcactgcaatcggggataccccagttaccacctcttttggtgaccccaaggtttcagctttgcctgagctctccaggctccagctctgggccaaggtgattttggtggagtcatcccagcggggagctaggaggaagaggggattaggaactcccgctcaggcttccttgctgcacgtacacatgtcacatcaaatgatggtgtttcactctggggacatagttgcttttgataaaatgacttttctgcagtttggttaagctgaatgaaacatatttgagctcctatttttgcttcagaggctattgaatagcagtacctgaagatgaag

SEQ ID NO: 11010 - DNA, 69 bp, Homo sapiens
taggggtggggaggagagaggcaggattgtccccgttgagaagtactggtctaaaggcattcaaactca

SEQ ID NO: 11011 - DNA, 634 bp, Homo sapiens
attaactttctggaaactaacaaaactcttttgtacaagagcttaatagaattggaccctgatcccaactcaacacaatggcactgctgaggtcactacaacttcttacatgaaaagaagctacctatactagcttgccacacacaaagtggtctattgtctctaatgtacatggtaatgggacaataacacattacccagggacttcctgctggtcagtcaagggcagggatatgtgcaactgtcaggcatcccttactggcaccggggttaatgaaatatttaactgggcttggctccagttggggagcctaggctgcagtgtgtatcctccaagtgggcctaattagagactcattcttgtatatgttgcccaaaacaatcagaatgtatttggttaaggcccctataagcacagttaattagagtaatttgatggggtggcctatgctcctgagaattcttagctagctatttgaaaagtgagggatggagctgtagagagtggatctgccatggtgcccttgtgacctggcatgcatatatctatgcaagctaggcttgaattgcaacttatctgagtcttggcaggatgtatcatgatcctcccagaacacaagaggatgggagggtg

SEQ ID NO: 11012 - DNA, 725 bp, Homo sapiens
tgtatgtctgtgtatgtaagtttgtcttgtggcattaagactattttgctcttctggaatgcaccactccttccccagggtttaagagattgggggcagacagggactttcctctgccggctgcgtggagaaggaagcggctaaaaggtttgggccggggagttccccattcgttctccggggagggagggactttacacctacccctcaccggaaagctagacccgcttcagggccaggagtggcgtttccgcacaggatttcctaagacgagagggatttagccaagagcacagacttggattccttctgtccctccccacctttctctcccaatgaagaaacgtttatatcctgtgattactctaggaaaggggcgtattaacggtcctttgcttccccgcaggggagaaaaagcttgacgaacttcacagaagagttcaagcttggaaataatggagtttatagagaaaagatatatttttaaaagctctaggtcagaagtactacacagtgcttttaaaaagtgtttaatgagagtttacagacagaagcccgaagtggaaagaccttatggttttgtagatatggtgactccagtctttgttgtataaaggttgggggagctgataaggtttttgtacagtattttctccttcgttgtattgatttttgtataaaaatgtaacttctacgtgtctaacacgtattaaatattttgaagc

SEQ ID NO: 11013 - DNA, 1686 bp, Homo sapiens
atgataaatttaatcccgtttcagaccttgaaggaagtaattttgaagttattggcaacatacatcaatattctaatttattagttgatgacaccgaccgtatcagtcctgatgacatcggcaatgatattcatgagtttttacacggaggagataagtgatggctgttgaatatgaaaatggtggtcatggttacgtggaacatgcatctataggaggcgttattgtacacgtgttttatgcagacgataaggaagaggaggataaataatgttagataactttgttgaattgaaaaataagtatgccgatgaacttggaaaccgtggtagaaagtgtgatgagatgaaattcaccagcgaaaaagttaatgaattgatcggtgttgatgaagcgtttaaagttccaaacaagttaatgtcaatcatgatgaatcgtgaacaacgtgagcaaacgtttaaagcatttttggaagttgagcgtgatacatcattcgattggttccatgaatattttgaagagcacccaggcagctacggcttcctcccggaactcctgtgcagctgacgacaaagccactgagcctctgcccaaggactgccctgtctcttcttacaacgaatgggaccccttagaggaagtgatagtgggcagagcagaaaacgcctgtgttccaccgttcaccatcgaggtgaaggccaacacatatgaaaagtactggccattttaccagaagcaaggagggcattattttcccaaagatcatttgaaaaaggctgttgctgaaattgaagaaatgtgcaatattttaaaaacggaaggagtgacagtaaggaggcctgaccccattgactggtcattgaagtataaaactcctgattttgagtctacgggtttatacagtgcaatgcctcgagacatcctgatagttgtgggcaatgagattatcgaggctcccatggcatggcgttcacgcttctttgagtaccgagcgtacaggtcaattatcaaagactacttccaccgtggcgccaagtggacaacagctcctaagcccacaatggctgatgagctttataaccaggattatcccatccactctgtagaagacagacacaaattggctgctcagggaaaatttgtgacaactgagtttgagccatgctttgatgctgctgacttcattcgagctggaagagatatttttgcacagagaagccaggttacaaactacctaggcattgaatggatgcgtaggcatcttgctccagactacagagtgcatatcatctcctttaaagatcccaatcccatgcatattgatgctaccttcaacgtcattggacctggtattgtgctttccaaccctgaccgaccatgtcaccagattgatcttttcaagaaagcaggatggactatcattactcctccaacaccaatcatcccagacgatcatccactctggatgtcatccaaatggctttccatgaatgtcttaatgctagatgaaaaacgtgttatggtggatgccaatgaagttccaattcaaaagatgtttgaaaagctgggtatcacttaccatttaaagtttaacattcgtaatgccaattcccgggggagggaggctttccatttgctgggacctggcggatgttccgggcggccgagggcacccttacagttcct

SEQ ID NO: 11014 - DNA, 227 bp, Homo sapiens
caaatactactgaatagaagataaaacaggaactacctactaatacatgtaacaatatcagtatctcaaaagtattacattaagtgaaagaagctggacacaaaagactggttatttgaaattctagaaaaggcaaaacgaaaagtgacaaaacgcagatcaatgggtttcgaggggatagaagtgggggtgagggattgactacaaaggggtaaaagggaaatttt

SEQ ID NO: 11015 - DNA, 1050 bp, Homo sapiens
cccacaagttcataactggaaagctggtagaagatgaacgcagtgaccgggaagaaacagagagctcagagggggaggaggctgcagctgggggaggagcaaagagccggcccctagccaatggccaccccatcctcaataacaaccatcgtaagaatgactgaaccattattccagctgcctcccagattaatgcataaagccaaggaactaccccgctccctgcgctatagggtcactttaagctctggggaaaaaggagaaagtgagaggagagttctctgcatcctccctccttgcttgtcacccagttgcctttaaaccaaattctaaccagcctatccccaggtagggggacgttggttatattctgttagagggggacggtcgtattttcctccctacccgccaagtcatcctttctactgcttttgaggccctccctcagctctctgtgggtaggggttacaattcacattccttattctgagaatttggccccagctgtttgcctttgactccctgacctccagagccagggttgtgccttattgtcccatctgtgggcctcattctgccaaagctggaccaaggctaacctttctaagctccctaacttgggccagaaaccaaagctgagcttttaactttctccctctatgacacaaatgaattgagggtaggaggagggtgcacataaccccttaccctacctctgccaaaaagtgggggctgtactggggactgctcggatgatctttcttagtgctacttctttcagctgtccctgtagcgacaggtctaagatctgactgcctcctcctttctctggcctcttcccccttccctcttctcttcagctaggctagctggtttggagtagaatggcaactaattctaatttttatttattaaatatttggggttttggttttaaagccagaattacggctagcacctagcatttcagcagagggaccattttagaccaaaatgtactgttaatgggtttttttttaaaattaaaagattaaataaaaaatattaaat

SEQ ID NO: 11016 - DNA, 119 bp, Homo sapiens
ggagtcatgcctagaattttgttcacactcaagaaaaacttgatagacctaatcaaaattcagattagatatttaaccaagctctctggataaatgtttctactcctccattcccattc

SEQ ID NO: 11017 - DNA, 1422 bp, Homo sapiens
ctctctggctgctccggcatatttgagaaggtctgtttccctggtccttctgggtttccaccaattggcaagaagggatcagcctgtcctagagatcactcctctgccaaagatcccaacaagacaacatggctcccaagaagcctgagcctaagaaggaggcagccaagccagctccagctccagctccagcccgctgcaccagcccctgccccagctcctgaggctcccaaggaacctgcctttgaccccaagagtgtaaagatagacttcactgccgaccagattgaagagttcaaagaggccttttcattgtttgaccggaccccgactggagagatgaagatcacctacggccagtgcggggatgtactgcgggccctgggccagaaaccctaccaaatgccgaggtgctgcgtgttgcctggcaagcccaagcctgaagagatgaatgtcaagatgctggactttgagacgttcttgcccatcctgcagcacatttcccgcaacaaggagcagggcacctatgaggacttcgtggagggcctgcgtgtctttgacaaggagagcaatggcacggtcatgggtgctgagcttcggcacgtccttgccaccctgggagagaagatgactgaggctgaagtggagcagctgttagctgggcaagaggatgccaatggctgcatcaattatgaagcctttgtcaagcacatcatgtcagggtgaagcagagtcttccaggtgagtgcagcctctccctcctggtcccttccggggtcacatagggccttaagaataacaccatgtgccctagaaggcatctgccccagccctgaccccttaagaggaaacctcttgggatcaggaagtgaggacagccctgctcactcaccatctcctgtctcctgcctgcccttgcctgttcaccctgtcttgaccctatcagtcacatcctcttgcctctcccaggatctctcaaggcaatgcccttccctcaggcctggggcctcctgtacaggctcctgggagtgagaaagccgatcccaagtggaagagaaggtccctggcctgtgctcttgaccccgttcttcctcacttctttccctaggttttccctgggatccccctgggtgtggtaaggggctgggtctaggagggtgaaatgccctttcctcctagcactttctttcaggtgcctggcccttggctttagccataccagggtgagttaaagagaggccccggctgggtgagctgagatggagtcctcgacttatcaccacaccactgccccaaggaccttacaggccctccctgttaataaacagctctaacacggccaggctgggctctgggattctgaccagtctctgttttgtttgtttttttaaaactaattaacgaattgcattggtttgcgtt

SEQ ID NO: 11018 - DNA, 464 bp, Homo sapiens
  misc_feature (1)...(464): n = a,t,c or g
cagaactgaatcagccagtgcccgagcctgctgcaaccccgacccggcagagcaagcggctctgctacctcagccacgtagctgatggcatccttcaggttcagctcgtggaagacattcaggatccggtctcgagacttctgggccgaccgtctcatgaggaccctgctgaggaacttcctgtcgaagtgggaccacctgtagggacagaccttgggtgtgagcctcagtgaccctgtaggcgcgtttaaaatgagggaagcagcccctgccacacgcccaggccgtccgccgttctcccgcctgtcctgttggatggaggccgttagacgcatatgaaactgcatgccgcctcctccagagggtggctcaggacacggtgggtgtcaggcctgggtcaggcaagggggctttggccacatggggggcaccttcaggnacgaggtaggaagggcaggggcgga

SEQ ID NO: 11019 - DNA, 281 bp, Homo sapiens
attttccatcctccatacaatctcaagaatgcctctagatattttatttacctggtctagatggtcctgaactatcacagccacgactgaacaaatcagaataagcagaaccttggaaaatgttttagcaacgacttttttctctctgaatattcaaaacattgcaatacagtctttaaagagttgagatgatacaaggtttgtaaataatctagttgaatgcttagcacacaatagctaatacacattagtttctccccttcctcattctggaactggga

SEQ ID NO: 11020 - DNA, 74 bp, Homo sapiens
aggagttcgagaccaggcaggagaatcactagcagagaatatgtctccccaacccctctcaaaaaaaaaaaaaa

SEQ ID NO: 11021 - DNA, 507 bp, Homo sapiens
ccggggtggggtggtgaggggaggagggataaatcgaggaacagatgttgccgtgagcccacccacatcacttagtctttgagtgcccaagggcgatttagagggactgagaagtgcaaggatcaaaggctcacattgagcaggatatacacagggaaaaacatttcttggctggacatggccccagcaggtcatccttaagctgacattcaacaaatctgaacagtgaacaatgaacagtggaggtctcaacactccgtgaacctgagggccactcatcaaaacctcagggcatgtctgtagaatagcagctaccatttaacaagctctgactctgtgccaggcgatgggctaagtgcttaaccactgttgggccagttactccttcaacagccactgttcccaaggcagtccatcatgactgtgctctagaaggcaccattcatactgtcctttacaacaattcttgatgactgtgtccaacctgcatggctggcctggggggca

SEQ ID NO: 11022 - DNA, 133 bp, Homo sapiens
  misc_feature (1)...(133): n = a,t,c or g
gcgtcgacatgaaaacattgttaatcttacatggggtcccacatgctggtcttgcatcagtgttccttagatattcacgtttactttataggcntgctgtggnggctcgcacctgtaaactcagcactttggc

SEQ ID NO: 11023 - DNA, 668 bp, Homo sapiens
tttttttatttctaccactcttatggcgattatttattttaccctattatttgtgaagaagcctagaatattttatatttacacggttaaatggtcacaacatttaaaaagccgtagaacagttatagttcatatattaagtttagaattaaaagaaaaggcaatgtttattagctatttcataaatcttctctgaaaagttctcaattcttctcactgaaacttgtaagcaactgagcagcttctgtctgtatctgtttatcctcctctgtgtgtgctggatagtccttggctttcattagccagaaagcagcaagctttttgttgtgtagtttcaagtatgtctttcctaaaagaagtaagtttttgctgtagaagtttggatccacttgttctgccctgtgaaagtagcctaaggccttctcataggtggaactaggaggagttgcaaacagcattttagcaattcttctttgataccaaggcatttcggcaaatgtatagcaccaaatacccataaggtgaattgaagtagcatctttagggttcagttcaattgctttctcaaaatgctccttgatgatatatgcatttgcaattttagccttgatgccttcataatctccaacatcactaaggcagattgcataccacttatgagatgcaaa

SEQ ID NO: 11024 - DNA, 71 bp, Homo sapiens
  misc_feature (1)...(71): n = a,t,c or g
caataaatggcactccagctaagttaggttaaaaaaaattagatttcattanaattttanancnnncttga

SEQ ID NO: 11025 - DNA, 226 bp, Homo sapiens
  misc_feature (1)...(226): n = a,t,c or g
ccccccaccctaagtaaataaaaccaagaaaatggaataaacaggaagaacactgtgtcacagatgacacagctctatctgtgtaagagaaaggaaaggatctagtccacttcttcctttagcatcaaaagagaagacagaagacaaactcaaagaaagaacagaaatggtagcccgaaagcagaatgcagaaagtagaaattggctttgtctcatccctnngctg

SEQ ID NO: 11026 - DNA, 635 bp, Homo sapiens
attttataggctagaatacaatctctaaaaggccctttctgattatcttaacccaattcattgcaaatattcaccattaagataagagtcactctgtagaacctgtcaattttctcagtcttaaggctttgagaacactttaatttttctataaatccgagttgaatgtactgccgggaaggaaaagctggagccccagggcctatggttcactccaccatcattaatgtttacatccacctttcagatctcatttttgatgaagaggaaggagcggtttccacaaggggcacctccgttcagagcattgaactggtcctcccaccccatgcaaaccatcacggaaatacattttggtggccagattatggcgtggatggagacagtggctactatttctgcaagccgcctgtgttgggctcatccctttctgaagtccatagatatgtttaagttccggggaccatctacagttggagatcgtcttgtcttcactgccattgtcaacaatacatttcagacctggtaaagtgagcccttaggctgctatgaagaaatttaaacttgcacaaatgtaatttttaatttcagcctggagtgttgaagttggagttcgcgtggaggcctttgactgt

SEQ ID NO: 11027 - DNA, 302 bp, Homo sapiens
ccagtgtatagaaatacaattgatgttgaacttatttattagctctgttagttttcttgtggattctttaggatgatctacatacaacaccatgccatttgcaaacagagatagttttacttcctttctaatctgaatggcttttttatttctttttcttgcctaactgccctggctagtacatcctggacaatgatgaatagaagtggcaagaacagacatccttgtcttgttcttaatcttaaagggaaagctttcagtctttcaccattgagtatgatgttagctgtgggtctggtcga

SEQ ID NO: 11028 - DNA, 1392 bp, Homo sapiens
tgtgactctgggattggcaggtgcaacttggagccacttaatttcctggggacgtaagttcttcccaagcttagagcaagctgccctgccaaaggagaccaaaccatgccaaccacgctggcaactgctgctgtccagtccctgtgttttctgaccaccgtcactgtgcaactcatcgcctctgccacttaggaccaggaaagaggctggttttgctcccactcttagttgctgataaagtgggggaaggaaaatgggacactctacagagtttggggaagggagagtaggggagcccatcttgtccagaaagattcatctgtggtctgtctgttaaacatagctgatttcagtgggctttcccctggccctgggggagcagacactgactgggttgtgggcagaggagccatcctggcggagccctgctgcaggggagctccttcaggagccccatccggacctcttgcactgggctgcctttgcctccatttgccttcctgtatctgcaacaaaccttttaaaagtgttcactcttgctttttccagtatttcggtaatcagcccatcttgcctgtagtacaggatgacattgtcgaatgctctttgtatgtgtgcacacccccttactcccttactgccttcatacacctccacaagtggtacagtattttgtgtcattgtaaaaatcaaaattggctttggatctttgtaatacacctgtacctgaaaaagtaaacaacattcttcaattactagccttcagcttgaaaagacatgctggagaagaaggaagggggaacccataggtgtggcgtggagccaagatgtactattcaactatgtgtttctgtttataaaaaacacataccatggaaccatggtgcttttgttcttagtttttgccgttagatcccttcaaactggaagttccttacaatatctttctcaggaaatattttgggaaatggggtaagagatggcaagtgtgagacgggctgtgtcagaggttgctacgtcatggatacagtgcagttccaagttgccttaggtgtatgtacatatagttaataatgacactgttcatcaccattctaaaatactgttcttccaaccctatcttcaatgaccagtccagaaggggttaagctggattcatttgctctggcatgtgcattcccagcagggtgaagaaaggtttaaattaaagaatttattttctctctcccccttcctctttctcccagtctttgcataggagaatgttagacattcagaaattactgtttctgttttaaattgagtattgatttttttatattgactttgtattgagttctttttgaaagaataacaaaataaaatgcaggatctttgtaaaaaaaaaaaaaa

SEQ ID NO: 11029 - DNA, 343 bp, Homo sapiens
  misc_feature (1)...(343): n = a,t,c or g
atgggtacaaaactannnnnnnnnnnnnnnnnnnnnnnnnnnnnnnnnnnnnnnnnnnnnnnnnnnnnnnnnnnnnnnnnnnnnnnnnnnnnnnnncattgaaagtgtataattggattttttgtaatgccaagnnnnnnnnnnnnnnnnnnnnnnnnnnnnnnnnnnnnnnnnnnnnnnnnnnnnnnnnnnnnnnnnnnnnnnnnnnnnnnnnnnnnnnnnnnnnnnnnnnnnnnnnnnnnnnnnnnnnnnnnnnaaaaggaaataagaggcatccaaattggaaagaaaaacgtaaaactatctctgtttacagaagacacgtcatatatttagaaaatgc

SEQ ID NO: 11030 - DNA, 319 bp, Homo sapiens
gtggagatggtaaatgcaggggattttattgccaatgaaagtggctctcagtggcaaagggagctgaaaaggggatggagcaagaaggtaatcttcccctgaagtccagccgtccctggctggactcctcttcaaagctacaccatgaagctgtccctctgaagtcaagccacttatttctgccgtccaaccgtagtctccaatatccagctgcttctcctctctgctggctgagctctggggcctttatagacacaggatggcggggggcagggtgggaccatggtggtttaggaacaggcaacatgagggcaggaaa

SEQ ID NO: 11031 - DNA, 376 bp, Homo sapiens
ggacttcagcacccactacgatgcattagccagagtggagctagagtacaggttacagaagaggccaaccctctgtccctgcattcatgaactcggctctgaggaatcttctgttatttccaaatttgcagaaagaaaccttgggcaaactgcttcttttccaccttaccattccaacaccagccttaggtattaccgtaattagtcaagaacatgtcttggttagtcaagaacacttcatgtgttaagctgggaatgaggatgctacttaggcaaaggactagtgatcaggaacctcttctacctgtgtggctcctctgggggatggcattaggtttacctttccaggatttcttttttttttctaatttttaag

SEQ ID NO: 11032 - DNA, 279 bp, Homo sapiens
gaagcactctaccccaccatatccagtcctctttgcatgcctgttgtgtgcagggtggagggtgtcccacgtgccagagcagctgggagccctgtccgctgagttacactaagcactgtattttattcatttatattatttttttttttctgggcattagagcagactccatctcataataataatacataataagctattattttctacctgatgtcatcaggtgttaatccacctctatatctgttggccagtgaaatactttgggctgggacgttg

SEQ ID NO: 11033 - DNA, 479 bp, Homo sapiens
atctttctgataaaggtactttttaaaaacttacattagcagagttctttgtgtagtttattaggcactttcatgtttatgatagcatttgatcacatgtaaacttggtaacattgacaaaatcactttcattttcttttacagatatggaaattgatctcagagaggctgagatctgctcagggtcagcaagctctcaaaactgttactagtactttttcttcaaaatatgtgtgtcgagcgtttttggctgagcctggatggattgccattttgtatgtgactttttgaagtctggacagcagaagaacgtgtttgggtggttgcagtcagtaactttttctattcaactttatttctgaaattaaggccagcaagtactgctgactggtcttatcatttattctctgccaggccctcctagctgtggaagtgacaagaaagcccagagaattaaatctctctctctctctcttttg

SEQ ID NO: 11034 - DNA, 406 bp, Homo sapiens
  misc_feature (1)...(406): n = a,t,c or g
gggcatctatgccatatatttcaaaacagaagtttatactagaaaatttattacaacttcagtgctaccaggatagagattatttgactgctaggaataatacaaaaatcttcaataggatcatctttatttttatgtgcggtttaggaaatgttagacagctttctaaagttagactaagagacagtgaggcctagtatccaggaatccttggcttgcctgcccatttctaccactgatgagcagtggtcttgtttttccttggctatatggggttggttggaagctcctttagttctaccaaagttggtattggggataaagtgaaataatggaaaaacatatgggaaattggtggaaantggttngtggaatggcaaagnctttccagtcgtnagtgggagac

SEQ ID NO: 11035 - DNA, 450 bp, Homo sapiens
gtgcttggagggtgaaggaaaggtcactttgaaagtgtctgcagctgcattcatttttttttagagccactttaaatcagtatgttactaaaccagaattctgagcctgattggttttaaaaattcaaatctcgtatcacctttattgcttatctacaaaaaactgggcatcaggaaaatgaggatctagccctaggtctgctgctcactagatctgaaggccctgggttaaagcttcccttcttcagcagggccccatgtattcatctaaaatttgaactgggatgggattattcccatctggtatgattctgggtcaagcttgctcagtgcagatatgggaagatggaacaactgacttgtaaaaaaaaagagatttaaatcaaggtgtggaaagaaatctaaaggggaaaatgtcacgtaggcaagtgacaccgtggatacagtccc

SEQ ID NO: 11036 - DNA, 1565 bp, Homo sapiens
ttttttttttttttaacaagaatgcagatgccatttatttggtccataagtatagtcgttatttgagttttacaaaacatcgaatataaataacctgaaactgtaacaatacacaaaaattggcttcttacacagacataccaggcggtacaaactgaaaacttgagtaaattaacattgttttacattaatatacatagtgccatctaacatttaaaaacaagtttcaatgcatagcactcgatacttctttgaatctgtttcaatcagttaagagtatgaaaatggttagatctaggctaaaaataattcttcttctagccaaaaataaaggcataatatttataaccaggtatcaactttactaaaccacaatattttgaaactattaatgatacctaagggtatttacattaaaaaggcaacatgcattgtgttgttttatctcatgactggttatgcacacactttgttccaagggtttttaaaactatattccctactttcaatacagcatactgcaatgtgtctaacagttctagcaaaatgaatgctttcaaagggagcagaatcattttcaagtcactgctgtcaattttttccctttggaacaaaggacataacaatctggttctgcccagataaactaaatagtaagagggttctgtttagaggcatttctgttcaatctaatgctatgacatcatcaagctcttccttctgttctatacgtgacctctttgcactgagattctctttctcatctaatttcctcttgcggcttctctcttcttcactgacgtcggcattatttgaagaatcttcttcatccgaatcaactatgagaacgtcatcttgctcttgagctgtggaggtggagggctgagctccatcatcactgccattggttatgcttttggcagcatcttcagcttgtttgggccccactttttccggggcatcaccaacaacttcaaattcaacgtcctttcctaggtcttcactatgaaggatgttgatcaataaagtatagtcctggaggaagtcatctgcttgaagccggctgccatttctaattccaaattctgacaacttcttgtgattattagcttccgtctctccctcttcggaagatattaggattgttcctttcccatcttcaatttggacatctggtgctaccatagcaaatttttctttcactatcttgtcttgtaaggtgagaacagtcactttatggacattcagccgcacagtcacctctggcttgctggcacatacataacaattggggttgggaggatccagtgcacaaggcacaagaagcttctttcttgggtttggttgtttattcaaaaaaattgttctgcactggtctatttttcctgataaaatcttcaatccttccaatactatcaacccagcaattactgcattagtagtagcaatagcaggaataatgttccctgccattgatttgatatcaaatctactcttcatattcatactgaaaatatgcatcctgaggtttgcatgcatgaggtgacaaaatccattgcagatgg

SEQ ID NO: 11037 - DNA, 591 bp, Homo sapiens
  misc_feature (1)...(591): n = a,t,c or g
ggccaaggaaagtgccttgttctgtgcatcttcagaatcccccaggccctctcttgatccttttcatgaagtccagagcattccttctattacaggctgaagatgcattgtaaaaggtaatgctataatagtattccctcttctcaataaatgtgcaaaactggagaatctggtgctgatctgcagcatacttgacaacacagggaataccgtggatgttccacgccagccttacatccgtccccattgcctgcccatgtccagtggccctgcgcaacaaaagtaagggcttgtcttaccacactctccccagcatctagctcaaggtagatgactgactgggaaattccggttggataaaatggcttttccacattgcaactttgcatctctattagggaaaatttagattgaacctttcctctacttgatgcttagtttgagaacagtttttcacaactttaggaggggtctcttctcagagtatggttattactgttaaccttggaagtttgaggttgaaacagggtgttcagagggttttgnattctttccaagggattgcccttttacagatttttngtttttatt

SEQ ID NO: 11038 - DNA, 543 bp, Homo sapiens
  misc_feature (1)...(543): n = a,t,c or g
ttttttttttttttggcagaacaaattcagactttattgtcagggagaggaaaaaggggaggaccgtgggtggggggcctgggttgctacattgtcaagcagaaagagttgatgggaaggggaagaccagtgtaggccagacccctcccgggtcggcggctgaagggttgacgatacggaaaccacggagtcgggggtgggggagaggtgtcacacccccgcccgagttgtgcagtggaggtgactggtgggaggggacagccatgaggtctaggaacttggatcggggaggctacagactcggcgaatcctgcgaaggggaagggcgggggcgaggcttctattgctttttgctcacagttttgcggaaggcgaggcgggggtgggcttggactggacaccccttgcccccctcggtaccccttgggcgatgggtgctggtgaaaagaatggaacccggactaagggaggaaagaaggcnaaagggaaaaggtctattggtggcatctccttggtcccacccaaantgcccggaaaatgccc

SEQ ID NO: 11039 - DNA, 248 bp, Homo sapiens
aactaagttgtatatctattttgagcatatcattcttccacctattttttgaaaacttttaaacctcaggaaatttgaaagaattgtatgatatatccaatgtaactaagttgtatatttattttgagcatatcattcccctacctattttttgaaaagttttaaacctcaggaaatttgaaagaattgtatgatatatccagaaactgcactctagcctggacaacaagagcaaaactctgtttcaa

SEQ ID NO: 11040 - DNA, 5643 bp, Homo sapiens
aacacatcattcagaagtttttaataaacaacttcattataaaaacctttttttgaaaatgtaattctgtaaaacattgaaaaatctactttaacaaagatatgccctgtgcattttctaatggcacttatactttacaattaaaaaccttgttttatataaagccaaaaatactccaagaggttattcactgtgtttacaaagtgctagaagatttctgtcttgtacttttctctttaaataatctggagttacaaaaggagtgggctccaaagccttgaccgctggtagggagggagaagcatgagaagtggtgtctcaggagttctagtgccaaaggtggagaggtgcaagtgggaacaatcagctaaggaagtcagctgacacacaaagaaatcggactggaatttttccaaacccctctatggagggcactaggttatcatggtgaacacccttttccctcgccatagaccctactctccagaggtgaaggtcatggccaattccttccacagcaggttcagagttccaggagaggccagggtgggatcccagaggaatctggacttttctggccaacacctgcctaaggcaaagtttcttattacataaatatccttgttaaaaagcaaaatattgatcctgtacaatataacctgttaaaaaaatcgtgcttacaaacagctcctagataagagggcaggtggagagaggacggagaaacagctaccaaaaagggaggggggagtttaaaggactactagggaaagttttagggcagtgggagaattcccaacttaggacaatatctacgagcaaaaaagtaatcacacctgcttcccggattttcaattaagaaaatgccatttgtaaaaggctgggcggtgggctggagggcgggggttgcagggaacctcattggcgctcctttccctgcctcccacctcaagatgatgcagagatcctttgagctgacacctgggcatgtcatccccttacccccaggactgtactcagccctgaccagctactgtgtagggtgggagggggacagctcattgctggcagaggctggaggtggcagggaaaggggacatcactttttttcctggtccctcattggtctttgtcatatgccatggcttctgtcctgggcagatgccccctcaggttctcatggcctcagtaagcatactgaagtgagttcgggtactgagtgcaggataaagctattcttatcctttgaacaaccaggccactaaggctttttttttctttccccccgaccccccagattttaggaagggaggtttaagaaatgactggctagctatggtccaaaaaaaaaaaggtgaaggcagatattattcctctgtaccagcaaagttcacagtgataggaaaattccttgtgggtgctgaggacactgagaggaggaaaggaaagacaggatagatgggaggacacaggagtggggaaggcaaggagaaaagacaggaggtgggggcaaggccccggttacaaagggtttaaacagttgctttgccagtcctatgacttttccagcatcacttacggggagagagaattcgagggagggacaggaaagggcaggcagagaggaaaggactcctctaacagcccgggactttgtattctgcagccagaggcccagtggcctctgtaaactgagagtgtagggaaggtggcagttaaggtgagaagggttgctgagtctagtgatgaaaaccagatacaacaaagaggatggcaacagcgagtcccaactggattctcacataccatcgcctataatacaagtcccaataacatgcacagcatgcaggaggtggctgcgtaccaaggtagacactttttaaaataaaccttaattagtccctgggactcactgaaactaatttttagaagcaaatcatctagtctgattctaaccttgccagacattttaatatctggtgtttttaaaaaggtatcccaagctaccctgcctaaatcaaaacacacttactccaaattgcttctaatcaagagctagggagctaaattttaaggcttttacctcaaacaaggagtactggcttaggctgaagcagaaagctgagtcctggacctgctcagttcctgatgacaaaccaagtgaacctagacagaaggtgggtgagggaggactggtaggaggctgaggcaattccttggtagtttgtcctgaaaccctagtggagaagtcagcatgaggcacctactgagagaagtgcccagaaactgctgactgcatctgttaagagttaacagtaaagaggtagaagtgtgtttctgaatcagagtggaagcatctcaagggtcccacagtggaggtccctgagctacctcccttccgtgagtgggaagagtgaagcccatgaagaactgagatgaagcaaggatggggttcctgggctccaggcaagggctgtgctctctgcagcagggagccccacgagtcagaagaaaagaactaatcatttgttgcaagaaaccttgccggatactagcggaaaactggaggcgggggtgggggcacaggaaagtggaagtgatttgatggagagcagagaagcctatgcacagtggccgagtccactgtaaagtggaagagacagaagggacattgtggataaggaaaattttggtttgggacacaacaatgtacccatagattaggacttagctatctacccattcctaaccttctgcaaactcttcttccaacaattccacaacttcccggaaaagggacaggtgggaggaagaccaatgaggggctcagacttcctcctttgctatccacaccaacccagactctgcttccaagactaataacaacagctcatgatgttcaaggtggggactaggggatggggaggtgacggacgtgggcatgcctttcatttcttcccctctccagttcaagagaaggatgagggggtcataatgtacttggagaaaaacagaattgcagacctgtgagaaaactgctccaatcctcttgcctgtcttctgtggataccgccgaggcaggcaggaacaaatgcagtcatggaagatggcagagactgaagcagtccaaagtcagtttatttccccacgggggaaaaatgtgacctcaaatgaagagaagtcagcaagccccgactccaccttgtaaacaggactccagttaacaccaggtaccaaatggttcaggctggtgccaactggaatggactgatgggaatggattcacggtgtgtaaacagtgttcactgcaatcactctaaggctaacagcttggcaagggaggtgaaatggtgtgtctgaggtgactgtgtaaacggtaccgttgctggacaacactgactgaaaacggaggtgctggtacaggaggaatgggtgggcgagaaataaaggccttctctcctgcccattggttggaagcaggcaatggagccaagtgaccttctacagcagggcctgaccaactgactgctgtggggtctgcaggttgggaccagaaggtgggcttcttgggcaatttctctagaggtcatccaaggtgaaaccctctgtgtctccaagaggcctccccattctccaaagagaaggaggttctggcgctttggagaggaagagggccaagtgtggctcccgattcaggtcaaaaaaataaaagtaaataatacctgaagtcctacggtatgagatcttttcacggggttggggctcaaggctccttctggaatcgatcctagagcctgaacccccaaaccaagtgctcctgtatacagacactggaatttttttttttgaacccagctctgaaagctcagctgccttcatgggggacacagacggggtgggtactaaggctccataacagagccaaaaactgagctgagggcctctgtgggggctactggaatgcttgatggaaacgaggcagggtggtgctactcaggccagacgtgaagacaggaggcaaggagtgcagaggcccaaagttcagtggtcccccagctcctggggaatcttgaggctgagcttgcaaagtggtaagcaggggctgtgcctcagcctgggagtagcccatgaccaggcctcctgtggccccaggtgggttacacgggggcaggttgagtggaagaaagcccagtaggtgggagaagtccacattagcagcgcagagggcctcagagaggttggcggggctcttggcaagcagtgcttcatctaggagggccgcagctgccgccggctgaggtgaggcgggctggggttcagcggatgagagagacaggcttccaggaagctccgccagaaaactatccacctccactttgggcaatttgtcgggcaagtatgaggtagatccaagctggtattttggagggagctgagctggggaagagataggtgaggattccagagggtagctcatacccatgggcagcgtgttgtgcaccagggagtgtggcacgcccgtgctgggcatggtagggatgtgggcaccatacatgcccatgggcaacatgccagggaaggccttggtccccattacgtcccgagaggccatgcacagcacagggctcagctcttccttcacactgactgtggagctgcagctgagtaggcctaacatgtccacgggctctgtcttgatcttgagcagctcctgcgagtggctcttcttgacatgacgcgtcaggtggtccttacggccaaaccgctgggcacagtactggcacaggaagtccttacggcctgtgtgcaccactaggtgccgccgtacatccttacgagtatagaaccgccggtcgcagtggtcacaggggtgcttcttctccttggcaccgcctgctacccggcgtgagtgggccttcaggtgctctagcagggcctgggtactctcaaaggtctgcaggcacaccttgcagctgaggtcaccgctgctggcagcatgcatggccaggtggcgccggtagcccagcttcgtattgtaattcttaccgcactcagagcagtggagggcctctttgttaggatcatgggtctgcagatggttccgcagatggtccttgcggtgaaacatcttatcacagtacatacactggtggggtttctgggctgagtgggtggccatgtgcctatacagcttgtatttggaagcaaaagccttgccacagtgcagctgagggcagctatatggtctctgctctggttgcgggaggctgtgaggcctcagcttctccccatttgagaaaggtgttcccgaaatttcacattggcacttcacttgactctccgcctcccggccccgaggcctgggaactagtttccagcccacttcctcctcctgctttgcatcttgaatccagggggggacgctggtgaaaaatgtggtcatggcaaggctaatggcaaagggccatgttattgagaaagcctccccatccgctccacacaggctctcagctctgtcacagcctccaacgcagctttcagaaaacaatctcttcaccgcgctcggggccccacgctgcgggccgggccgcgctcgggctccgccaggccccctcaggccccggtagtggcggcggtcgggcc

SEQ ID NO: 11041 - DNA, 54 bp, Homo sapiens
ggcttggcaagagagattatttggagaaagcaggagaattaataaagctggctt

SEQ ID NO: 11042 - DNA, 838 bp, Homo sapiens
  misc_feature (1)...(838): n = a,t,c or g
gaagtggtcaacacagtaccctggctccggtcaaagtagtcacagggctgtggattccacttcatgcaagtgaggaggcctgaccagttcactttgcttttggtacattctggaaaaataccccagagtgaacctggatgtgtgtgtgggagtgggggcacagatgattctcactctcaaataggcatctcaggagaattagagaatctgttattttgacctattcctgagctactattaaatagttacacaagctctctgcattaattttcttttccaaatgaccatctgtgaagtgtagcagtttctgggctcttccccaagtctgaattcagctgctaaatagtagacattccactgcaagtctatttctgtaagggttgaaaatacactattatggaaaatgtccaactgtggctttgtaccttccattccgtaatgtgctttcatttattcggcatatttattaggtattgactgtgtgcctagtactgtgctaggtgctagaaatactaagatgagtaagacatgtttcttgtccacggggattttatgtttcagtatgggagacaatacaggcaaatatacaactgacaagtagcccaagtcagtacagataaaagtgcaatgggacaccagaggagaggcttttagagaagatttcatagctggatggatagaatggctctacaaaaaagagaaaagaattttcagggcagagagaacaagggacacaaaggggaaaaagcaagtggcatgtttgtacagtagcaaattttctttggctggaggatattaaaggggaacaagcaggtatgaggctggnaaaatatgttaa

SEQ ID NO: 11043 - DNA, 397 bp, Homo sapiens
  misc_feature (1)...(397): n = a,t,c or g
ggtatagaggaaataaaaacaacccagaatatattacctgggagagaacttacattgtatacctttacatgtatgcctttacatgtataccttttgaacaaaatcactcttttaaagtgatttcattaaatttataggctaactttaatgtaatctcataactccaaatttttgtccataccacagtgtggaaatcctaactgtatttttgaactaagtgacccctgtgctttttctcttgtgaaataaataccttttgaaaagctctctgaaagtttaactcaggttttggttttgtagttaaaagcagcacacaccatttctcctaccttcactgaaggctctcggcagcacctgatggcttgtgagtgtgttgtctttggtgnatataggtttg

SEQ ID NO: 11044 - DNA, 1160 bp, Homo sapiens
  misc_feature (1)...(1160): n = a,t,c or g
ttttttttttgaaaacagaagctctttatgccaaatcacaaggacagacaggggaatgtgggggatggacaggagggagggcctgggcaggctgcctgccttttggcaccttgtgcccaggcgagttcccggacccatccaggagctcttagttcgttcagtcaattccttgacatttgatgtgcctggctcagaactgggtgctggggacatctaggtgcataaagccaggttgcattctgacaggagagagtcaagccaaccggccaggacaggcctgctgctttattcacagatttagatgtcgttccatctgctctcgaagtttgaatttctggatctttcctgaaatggtgagggggtagtttgtgacaaacacgatgtacttcggaatcttgaagtgagagatcttccctttgcagaaagcttttatctcctccaccgtggtctcctccccgtccttcagccgaatgcaggcacaaatctcttcccccatccgatcgtccttcactcccaccacctgcacttcctgcaccttcgggtgtgtgtgaaagaagtcctcgagctctgcggggtagatgttctcaccaccccggatgatcatatccttagagcggcccacgatcttgcagaagccctgctcattcattgtggcgacatctcctgtccaataccacttgtcctgatccactgcttcctctgtcttctgaggctcaccccagtagcccagcatgacgcagtaccctcggatgcacagctccccgggcgtgttcagctttgccagcgtccctgcctccatgttcatgatccgggcctccgtgtgaggcataattctgcccacgctttctgccttctgctccacagtgtcctcagggaagtgcgcgaatgtcacgggactgttctctgtggttccataagcaacctggagaccctctggctggacaacaccaacctggagaaggtgagctcctggctgtggcnctgccctggttccttctncccttcctggangccccaggagccagggccacagctggcaccatcccccgtccccaggttccctgtccctctggctatctccaaggtgagcagctctgccacctcccttcctcaccttgtcacatccctaccctaatccctgtctgctgccagtctcgacc

SEQ ID NO: 11045 - DNA, 494 bp, Homo sapiens
cggaagaattagctgaaaagacgaagaatgctgttcaagctttgattgataagcaccaaagaataccaggaaacattatgagtgctttgttagaacgttttcattgataacaaagggtcaactagaagatgatttagtacatttatattaaatgtttgtatctaaggtactgtcttctgaattttgtaggtcctataattagtattttttaaaaaaatcatgttaataagcatctttcacagaattcgtttctttaaaatagtcaattttgtttttgcaattgtgtcaaatactaacaaattacacacctagtaattcagaaaaagatgtcttatttgtaaattcctaacaatttatgctaaacatatagattcttaagtttattaataacagcagtttaggttaaacaaacattcctggataatgcgttaaatttctgtatctgtcgccctgagctgattttgaaagatggtataagctaggggttagtatag

SEQ ID NO: 11046 - DNA, 242 bp, Homo sapiens
ggaatattattaataatttttgaatgaatattatttctctttatgttaatgaatattaagatattattcatttaatcttaaccatgaaacatttttgaaaaatgagcttggttcttatttagatctattgtggaacttaccacctaatgtatgttttctcctaaacacaccaattttttactaattatttatgggcaggaaaccaaaataaacaggtaatcaactaaaaaaatactgtttcc

SEQ ID NO: 11047 - DNA, 234 bp, Homo sapiens
ggatatcctctccctcatcaaacttttctccaccaactttagcatctggttgccaccctccaaaatggccccagtgatcccatctcctaataagtacatgtctgtgtggtcctctcccacactgcataggaatggcttacgtaaccaataggtaagttgaggatgtgatgcaagtctgacttttgaggctaagttgtaaagaaagacactgtgtcttcctccttgttgcttgga

SEQ ID NO: 11048 - DNA, 338 bp, Homo sapiens
ggttaactgaagcaactggaaaactgataagaacatcccatattggaaagcctcaccctcagtcctttcaaccagcagcagccacacaaaaactaagacctgcttctcagcaaggagtccagatgaagacacaaggtggggcttcaaatccagctctccaaatagggtcccatcccatgtgcaagagctctcagttcaaatccgatcagtccaacccatccacagtcaaacactcccagcctaaacccttccattctgtgccctctcaacctaaatcctctcagacaaaatcctgtcagtcccagccctcccaaactaaaccttctccatgcaaatct

SEQ ID NO: 11049 - DNA, 548 bp, Homo sapiens
atggtgatcagctctgatgacccagctatgtttggtgccaaaggcttgtcctatgatttctatgaggtcttcatgggcattggggggatgaaggctgacctgaggaccctcaaacagctggccatgaactctatcaagtacagtaccctgttggagagtgagaaaaatactttcatggaaatctggaagaagagatgggataagttcatagcagatgtggctacaaagtgaggagaagctagccagccctctacaagctgtcttcttgcacacgctgtcacttcctctcactcgttcttgaatcagctccatgtgcccatgaaatcaatggcctctgtatggagcgaccctgtgagaagcacttggctggctgagcaaattcatcctctggaaatattctctctcagccacagtgacattgaccctcttggttttctcctctctctggccatttcttccagtttccctatttcagagtcttctcctctctctgatctctgtgctgtttcctcaggactcagtcctgggctctcttctattctggtctc

SEQ ID NO: 11050 - DNA, 473 bp, Homo sapiens
caggcaagctgatttattgtcagtcctgccgggctacctcctgacaaaagcagaggaggcagccccacttataggctggagcaacgtcttacagggcgtagaactgggtcatggtgaaggaaaaggaaaagcggggaggggggagtcctttgtgccgtgtatctgaccgcttcctggagatgtttttcttgccagttctgttgtgcaaggtagacatcttaaccgcatcctgggacagctggcctctggtcaaacagttataggcaggtttggggtagggggttttatttttggcctttggggcttagtctatggaagggggaaacagtccagttgggtggaccttagcaatggtgtatctgtaagtggctggtggcagtgacaacattcttacgctgcatgtgtattgttcagttgtcatctgtgttggggaatctagccactggcccacagagagttaaccagagcttggg

SEQ ID NO: 11051 - DNA, 446 bp, Homo sapiens
ttcggcacagggcaaaatccatagtgtttggtatgaaaggggcagaaaaataacaagattaaatagaccctaatactgtaattcaagtaagaaataattttgcagttttaatttgcacctgaagcgaactgtatgcattttcttccttccttgccctgtcacatgcctgcgtgggcacgtgtgtgcacgtatgtcggtggaacatgatgtggcctggcttggtgtatccttcagctctgtgtttcctccttcacaagtgtggttttggggagaagtggttgaatgttgcagaggagggagctgctgacctttgtgcctgtaaatggctgtcctctctgcccccagtgtatcgcattaagttcaaggagagctttgctgagatgaacaggggctcgaacgagttggaagacggttgtggggcggtgcattgtttcttcatcggtttc

SEQ ID NO: 11052 - DNA, 971 bp, Homo sapiens
caggtgtggattccgccggtgaaggctgaaggcagctaccttaaagatgccgggatccgcagcgaagggctcggagttgtcagagaggatcgagagcttcgtggagaccctgaagcggggtggtgggccgcgcagctccgaggaaatggctcgggagaccctagggttgctgcgccagatcatcacggaccaccgctggagcaacgcgggggagctgatggagctgatccgcagagagggcaggaggatgacggccgctcagccctccgagaccaccgtgggcaacatggtgcggagagtgctcaagattatccgggaggagtatggcagactccatggacgcagcgacgagagtgatcagcaggagtccctgcacaaactgttgacatccggaggcctaaacgaggatttcagcttccattatgcccaactccagtccaacatcattgaggcgattaatgagctgctagtggagctggaagggacaatggagaacattgcagcccaggctctggagcacattcactccaatgaggtgatcatgaccattggcttctcccgaacagtagaggccttcctcaaagaggctgcccgaaagaggaaattccatgtcattgtagcagagtgtgctcctttctgccagggtcatgaaatggctgtgaatttgtccaaagcaggtattgagacaactgtcatgactgatgctgccatttttgccgttatgtcaagagtcaacaaggtgatcattggcacgaagaccatcctggccaatggggccctgagagctgtgacaggaactcacactctggcactggcagcaaaacaccattccaccccactcatcgtctgtgcacctatgttcaaactttctccacagttccccaatgaagaagactcatttcataagtttgtgggctcctgaagaagtcctgccattcacagaaggggacattctggagaaggtcagcgtg

SEQ ID NO: 11053 - DNA, 4425 bp, Homo sapiens
acacctttttttcaactccgaaacttttattgtcctggaaacgatcaatcatctgtgttagtggtacttgagggtaaaggtatacactcagttctgtcgaagcagacgtgagtgtttatgcacagcatccacaaaggcgcccacatgttctgggtccatgtcaggataaagcccatggcccaggttggcaatgtagcgatgtggtccaaagtcatccagcatctgcttcaccaactgcccgatctcctcctgggggaccaacagggcactggctacaggaggaccagcaagcctttgtcctccctatatatactagtgacaaacgcatatgtaggcatgcttctactcagtgttattcagtcattcaataaaatttatcagatccctagtatggacccaggcatgaagcataaacacaaatgaacaacggcaacaaaaagtccggtctttctagggcttatgttgtacagagtagaagaaaaggacagacagacattaaaaacaagtgcacacagaataatacaaccacagccacaggagtgcacagtaacagacacacagaggggccctggctgttacctcagatgcatacaaggcacaggggtccaggttgccctgcaatgtcaccgtcttccccacacactccctggaagcaaagccagcgccacgttctggtaactgcatacatggcagctcccccagccaacacccccacctcaacctcaaggcctcacccttccatggcttaccgggctttctttggggccactgtccagtcaagcccaaccacctcatagccagcttgggccagctcctccagggcaaaatgcccatccttagcaaagatgatctagaaaaaagcagatctcaggctacagagggccttgctacaaccactaatctttcttgactgtacttctgctgccctccagtggtcactccagtccatgcaggacttagcctgaaagctccacaggaccaccttcactcaacccatcccaatcctcaccatgggcactggtgccaggcctgcctcccgcaacctggccttcacttgcttggccacatcacggatgtaaggcagtgcaaacttgttgaagagctgtgggccaagatgccctgcatgggactcaaacagctgcaatgcctagttagggtatggtgaagaaaaatatgtaacacacaaagaggaagtttcccccacatacaaaatccacctcaattttccccaaatgacttcaatccctgatactgcctgaccctaaaaacccagtaattaaaaaaaaaaaaatttactttcctcagatcccagcactaactttggtgtctgaatacttagagcattaagccccactgtcagtgtcaggatgggcttggctgctcagctagatcactggaggccaaggttctttcatccctagcattaagacccctgccctctcaggtttaggacactcttgcttctcggccttacagaccaaatcccagcctatttctctctctctcaggactcacctgggcaccagccaccacttgtcctaccagatatgggaccagagcatcagtgaggatgcgaagcagctggtgactagcctgaggtctctgatagagccagcgcttggcctgagccatggtgcttgagccaccaccctcaaccatgtatgtcatcagggtccactagagaaggatagaaagatggtgtcacagaagccagactgacccttccttttgtctaccccagaccttccagagtgatctccccgcgccccgagtccctgccctgtcccacattactggggcaccagcaaagccaatcagcggcacacgtccagccagtcgttgtcgggtaagggtgatggcttggaacacatagcctagctcagaggctaccacttctggatcccgtaggcgttctaggtcctgctcttctcttaatggctctgggaagctgggtcctttgccaggtaccatggtcacctccatgcccagtgcctggagggggagaaaacatctgggttcccaaaatggaatccaggaggaaaggttctgttcagctcattccaggaggaaggaaaaggagaataaaactctgccaaactccatttctttcaaccttagtttttccctcgatccagttaggataagtgcttattgtaaaccttgactggactgatagaaggattttcaaggcgtccttggattatattctaggatcaggtttgagtgggtacctggggtacaacaaggatgtcggagaaaatgatggcagcatccagaaggaagcgacgcagtggctgtaggaaacaggagacaggttgctaggtggcagactgaaggcataaatctttccctcttttgtggacccctcacctgcagagtcagttcacagcaggcctcaggagagcgacacgtgctgaaaaagtcctgggcagcccgggtttccctaaactctgcatacagagggaagacagggctcagccttgaggccctccagagccctcccctgcccctcgaaaacttttctcctccggagttttatctagatttccagaccctgactcttacctggtaagtaacggcctgcctggcgcatgcaccaaacgggagtgtagtctgtttcctctccccaggctgctcgcaggaatgtgtcattcttcagctccggaaaaccctgaggtctggcgatcaggtgggggtgggggtaggtgtcagtatgctacgttggacggctggggaaagcgcgggttcataaggccgattcagtccaggaccgctatcctacctcctccaggccagctcccaaaccctggctttccgcccgttccgcctcctctctgcctatcagtgcacaaactccagaagggcccgccctggggcctcttccctccacttagtctctactcttccaagctcgaagcaaccagagggactggggggagggaatgaaggcccactaaggatagtttgggggtcttcgaactagtgagcctcagaaaccgggaaatgtcactgggctggttcaggggctgagaaatacccaggctgggggataaagagggatcagagttgatggtcccagaatgaagatcctggttggaaatcctgaggcatcccttgaattaaggccctgggatgaacatctcaaaaatccatggttttaggattcaggatccagctaacggagttcaggttgggaggttctccagggtggggaaaggggagtagagggatagagtcctgagttggaagactcaaattagaagcccggctagccacaccgcgtgctctggagaactcaccccaacccattcgcttccatggtcagctgtctgtaactgcgagctcaatccacaatttaacctgaatctgagcctgccccccagtccaggctccgcccctttctgtagggaaccaagagcgtcgccatgttgaagatcacatgatcggactccagcgacagctccagggctgccctgctgctgccgtagacccctaccttttttcaccgtaaagtttgctgtagcgacgaaacaacaaaggcccaaaagaaaactccgctgtaaatgtatcttacggtgacatgaggaatttgttctcatctgacagtctgggtatccggagcttggcgcaagtcccaactatgataccaacagtcttatccagccaggtccatactatagcctggacctatagtaggtgcagaggttagctctgctcaagacaccccagcctttaaggagctacaagactggggaaacagaaatcagcaatcacattaaaatgaataatgatctccagtgtccttgggattaggagtgtcaaacagaactcaaccctaatgactcaagactcctgtcagtggcaggggaaggggccattgtctcaaacactttaatcacaccacccataggatagggagtccagcagattcgctgggagtgggaggaaaaacagcaggccgaagaaccagaaaaatgactgttggcaatgacccaggctagctagaatggtgacttgaatgagggtagtagcagtagagataaaatggtagtcacaaggaaatggagagagggagattgatcaggtagcaatcaccaatcttgggtttggtcggctgggttagggtggcacagagataagtaatatggttgagtgtgggagtacacagtccaatacagtgagagctggggtgcgcttagtccagaacatacggcaaaggctggccaaaggcggggaagggcgtggtgggaagctctgtccgcggtcgcgccagctgactcatggcgggtccatggcccggcgcggtgctggagtccccccggcagctgctgggccggtgcgcttcttggcagaggtgagagcctcgcgccgggcggcgcctaggcagcgctggctttcgtgccgcgagaggtgcttacgaagctt

SEQ ID NO: 11054 - DNA, 169 bp, Homo sapiens
  misc_feature (1)...(169): n = a,t,c or g
gcgcgggctcaaggcaggtcattggaatccacgttttggccacagtagttgtaggattgcttttctgtatcataattttagaatgctcttaaaatcttgaggaagagtttttattttttatttatttttgagatgggagtctctgttgcccgggtgccagtgcntggtg

SEQ ID NO: 11055 - DNA, 244 bp, Homo sapiens
ggtctcctgccccttcattgacaacacctactcgtgctcgggcaagctgctggagagggagatcaaggcgctcctgacccctgaggattaccagcgatttctagacctgggcatctccattgctgaaaaccgcagtgccttcagctaccattgcaagaccccagattgcaagggatggtgcttctttgaggatgatgtcaatgagttcacctgccctgtgtgtttccacgtcaactggctggct

SEQ ID NO: 11056 - DNA, 320 bp, Homo sapiens
  misc_feature (1)...(320): n = a,t,c or g
gaataaaagttaagtgaatgtcgtctgtcttgctcagtatatcttatttcatgtgatattttcagattgcagttgactatggataattgaaactgaggaaagcgaaatcacacataaggggggaactactatattttgttaagggaaacaatctgttcccataaatcaaacctcaggctagcagaattaaaggtaaacttgaggagttagggatcatcacggtggatggggggagaaggactaggaatggcaggctcttncacagnggcaggcacacggggtctttgncgtttgtggaatttttagggttcccgnctttg

SEQ ID NO: 11057 - DNA, 859 bp, Homo sapiens
tttttccaaaaatatatttatttttaaaaacagaaaatcagatcagttttatagagtcaaattttcaagagacaaaccagagtttggattccagcttagagtgcaagtgaagcatcagtaatctcatgcagaagatttgtctctgcaggaggtacattctgcttgactgcaagcactcaattctctaaatctggtttgtacttctgccatcattttattccattccagcgctctggcatgcaagataatccatctctaaaattcaagacttccaaattgagatgaacggattattgggcttgggttggggtttataaccaatccggatcattgatcatttgttcccggctcttgggatcactgctaagcccaatggctccttctccatcactgcctcctacaacttccacatcttccttctgtttcttacgggtctccaggtcctttcgaatgttctcaaactcttcaatgtcatcaagctttagctctaggcgtgttggtttccgtctcagcatactgaagtcaacactaagggccaaacccagtgaactattagcaattcacaggattatcctccgcgtccaaacagatcttaaatgtgtacgtcattcattaaacaaacacttcttgtgttccagctacagagttaaaaggtacagtcataatctcttttcaagccggcctagccccttcccggaacctcggctcccccccaacgaaactactgctaagccaactggactacacttcccagactgcttggagcctctctctccgcagaacctcgtcttccgcgagcttttcctggaggttctaggagggatgcccctcaatgccacgacgccatttcctactacgc

SEQ ID NO: 11058 - DNA, 2419 bp, Homo sapiens
cggatcctttcctgcttttggtttccctggcaggggttgaactgtggagtgtgtgggctcttatcacgcgatggcatccactgtggaaggaggcgacacagctctgctcccagaattccccagggggcccctcgatgcctaccgagcaagagcgtccttcagctggaaggacgtggcgctgttcacggaaggggagggcaatgtccgctttaagaaaaccatcttctcagctcttgagaatgaccctcttttcgctcgttcccctggagccgacctgtccttggagaagtatcgcgagctgaacttccttcgatgcaagcggatcttcgagtatgacttcctcagtgtcgaagcaatgttcaagagccctctgaaggtccccgccttgattcagtgcctgggcatgtatgactcttctctggctgccaagtacctcctccatagcttggtttttggatcagcagtttacagttctggttctgaaagacatctcacatatattcaaaagatcttcaggatggagatttttggatgttttgctctgaccgaattaagccacggcagtaataccaaggccattcgcacaactgcccactacgatcctgccactgaggaattcatcatacattcccctgatttcgaagctgccaagttttgggttggcaacatgggcaagacagccactcacgcggtggtgtttgctaagctgtgtgtgccaggggaccagtgccatgggctgcatccctttatcgtgcagatccgggacccgaagacccttcttcccatgcctggagtgatggttggcgacataggaaaaaaactcgggcagaacggtctagataatggtttcgccatgttccacaaggtcagagttcctcgccagagccttctgaaccggatgggagacgtcacccccgagggcacctatgtcagcccctttaaggacgtcaggcagcgctttggagcgtccctggggagcctgtcctcgggccgggtctccatcgtgagcctggccatccttaacctaaagctggccgtggccatcgctcttcgcttctcagccactcggcgtcagtttggacccacagaggaggaggaaataccagtgcttgagtatccaatgcagcaatggcgcttgcttccatatctggcagctgtctacggcttagaccatttctccaagtcgctcttcctggacctggtggagctccagcgaggacttgcatcgggagaccgcagcgccagacaggcagagcttggacgtgagatccacgccctggcatcggccagcaagcccctggcctcgtggaccacccagcaaggaattcaggaatgccgggaggcgtgtggaggacacggctatctggccatgaaccggttgggtgtccttagagatgacaacgatcccaactgcacatacgaaggtgacaacaacatcctgctgcagcagacaagcaactatttgctgggtctcctggcacaccaggtccacgatggagcttgcttccgcagtccgctgaagtcagtggactttctggacgcctatcccggcatccttgaccagaagtttgaggtctccagtgttgccgactgcttggactctgcagtcgccctggcagcatacaagtggctggtttgctacctgctccgagagacttatcaaaaattaaaccaagagaaaagatcaggaagcagtgactttgaagcaaggaacaaatgccaggtgtcccacggccgtccgttggcgcctggccttcgtggagctcacggtggtccagaggttccacgagcacgtgcaccagccttccgtgccgccctcgctgccgggcccgtgctggggccggctcagtgctctgtacgccctgtggtccctgagccgccacgcggccctgctctaccgaggaggatacttctccggtgagcaggcgggagaagtgttggagagcgccgtcctggctttgtgttcccagctgaaagacgatgcagttgccctggtagacgtgatcgctcctcctgactttgttctggactcaccgattggcagagccgacggcgagctctacaaaaacctctggggcgctgtcctgcaggaaagcaaggtgttggagcgggcatcctggtggccagagttttctgtgaacaaacctgtcataggaagtctgaaatcgaagctctagtgggactggcacattcagccaagtctaatgaaacgaagggaactaatcagacgtggacctcaacttctgattccagaacacgccggagattgctgctgctttctgagcccgcacctgtgcgcctaaactgctgattggcctcaacttgcccaggcggacgggagggaggcacccggccggctggacctaatctgggatcgcggtgatttgcaccgtggaaaagaaattgcagattgatcatg

SEQ ID NO: 11059 - DNA, 565 bp, Homo sapiens
gtgttccaataaaactttatttacaaaaacaggcagtaggctgatttggccccagggcacaagcttgccaacccctgctgctttagggggatttcattagacttcatatccttgacatatgagagagggtgtatgtctggaaaccttcacaaatcctccccatttacaaaaattactgtaatcttcgcactctcctgtttcctcatctgttcccgggagcaatacctatagtgcacaggattgctgtgagaagccaatgagatcctgtatcaaatgagaataacatgcatggagctgcatccactgcccagcagctatgcccatttgccagccggtgactcacttctacatacaagtaagtgggtgacatagtgcaaatctgtgcctgaggataaatcacttatcagatgccaccacccctttggggcaccaagtacaatgcatgccagaccacaggtcccccaaataatacaacacagagcagaggcagaggtggccttgggagatccataaggtggatcactagtggtgaccaggggaggagtctgcctcgtgccgaattctt

SEQ ID NO: 11060 - DNA, 365 bp, Homo sapiens
gattccaaaggttcagagctcatctaccaggagccagccaaggccagttttgaagacaagtctttcttgggaatatgcagggtttgagcaactcagtcctgctgagttaaccctttcttgtacagcaagttagctcttcagggagttagctctgtctatcctgcccctgtctgcctagccactccttttctaggtagagtggaccttgctgttcacgtcatagatggccattccgtgtacctagactcctttttattcctttgccaacaagtaattggggaatgtttggggatttaaggaacatggtctgtggcttttggcaattttcatggtggaccatggggtgaaattatggcacacattct

SEQ ID NO: 11061 - DNA, 116 bp, Homo sapiens
gcacacaggagccagatcctaaaggctttgtatgccacattaggaaagaatttggaatacagcttctgtttggaaaacattttctgtaaccagcccgacacagagacggggttttg

SEQ ID NO: 11062 - DNA, 362 bp, Homo sapiens
gcaacaatggcagtcctgcagataggagatgggtgctttccataaagccactggaaactatgaaagctcagcaaacatttgaaggaggtagtattatcttctcaacatgacactcatttctttccgagtgcttatactttgtcctcactgcccccaaatcaacttttttccttttttcatccaactaatgtttatttagcacatgccacatagagaaaagatatatatacttcatattctcagtacagggaataaaaataaaattcagtttgccttgaattatcaattgcatcaaattgtttgggctgtcttccggaccagagggagggaaaaatgggtgaaaacattgcttcaagaacata

SEQ ID NO: 11063 - DNA, 89 bp, Homo sapiens
ggcttgttggccgtgtctgtgtcttttgagaagtgcctgttcttcgttgcccacttgtcaatggggttgttaggtttttggttgttgac

SEQ ID NO: 11064 - DNA, 88 bp, Homo sapiens
gtagtcaaacaaatgttataaaattctgtatgtatgtaggtatgtttaaaggttgttagagctttaacctctatcaaggttgttagac

SEQ ID NO: 11065 - DNA, 251 bp, Homo sapiens
ccggccggtcgactgggcctccgcctctcttcactttgctagaagaagccgtcactgccaggatccgggcattactttgggggtggggaatgttttccatgcaggtggggaactcctgcactttggccagtgtttaatgcccgtggaagcctggcacagagagattcacacccttcacccaccatggtcccggagagcctgatggcaatgcctgacctcaggaacaggagaccaacaaaatacactttctt

SEQ ID NO: 11066 - DNA, 301 bp, Homo sapiens
  misc_feature (1)...(301): n = a,t,c or g
gcttgcctttccttttttatattatctaccatattagaaaatgcagagggaagagttagtgcaaattgggaaagtgagtaccgatgcatttgtactcctgattggtgagcaaaataaaactgctcagcctcctataggattaaagtagaacttacactggacgatgtttgatctttctgtataaactgtttgtgataaaancatgcttatttaaaataagaagatcaggaatgatatgatataaaattaactggattcagaatttctgagattttagaataggatgtcagctatttaccag

SEQ ID NO: 11067 - DNA, 212 bp, Homo sapiens
  misc_feature (1)...(212): n = a,t,c or g
gaaaatattctgaaatagaaggcacatcacagaatttaaatatttttcaataaaatctgtaatcaaaccatagttcagcttcctctgggatattgtgaactatgtttaaaatgcgaccggaattttccactgctgttcatatttttaaatgcttagaattagnnnnnnnnnnnnnnnnnnnnnnnnnnncgggaggctgaggcaggagaatc

SEQ ID NO: 11068 - DNA, 1429 bp, Homo sapiens
gtaagcagcctccacaggctgtaattcccaggcccccgcccaccctgacctttggcccagaagctactgcttcagtgtgtggggtggaggagtgagactgggtccacagtgacattattgctgacctcttctgtgtgaggaaaaaggccacgagaccctttgtggggccagccctgagtgctcctctcccaagttttaaggcagggagggggaaataactgtacagcccttttagcccccaagctctggaagtggcagacagcaatgaggccacatccctggagctgcccgggggaagtgggtgaggaaccaaagccgtggtccctgtagagcagctgtggggaggggagggccagtcccctgctcagtcctgaccacataagccttggtcacaggtgtaggtggagagggcactgacggacactgccctaaggtgcagtcctgaggcacttaggtgggcgcctatctaggccatgcttctcagttggccttgaccttggcaatacctggagctccattttgctgaagtgcacggggcagccgcttgcccttggtataagagtgataccagaagttggagaacagcatgaagaagatggtgccatacatccagatgaggtgaataatgactgggtactggtagttacagctggacataaagtagtactgggagatgtgcagtgagacccaggacaaactggatcagctgaatggctgtcatgtgctttttccaccaaaggtagggttgtgccacagggccaaaggcagataatccgtagtacaggtacattatgacatgcacggaagagtttatcatggcatggaaagagcccattcctcccggggcaatctttaccccccaccaccagctccagggaagcacagagtgatggaagacatgtaggaaggtcacctgcccgtctttctttcggagaataaagatcactgtgtccatcagctcaatgaacttggagaagaggaagagccaggccacccgaaccatcctaagtgcctcagggctgttggaatagtccacagggtcacagcgccaggtataggtgctcagccagcccgacatcaggaactcatagacaatgtagagggagagtgccaccagtgagaagttgtagacaatcatgaagccacggagctggaagggcttccgattagccatgatgcgaggcccaagtgagagaacgaagtacacgtaggtcaggagaatggaggtcattagcaagggggaccccatcagagggtagccctggatccggggatctgcgtgcttcatcacctcttggtacaagttcacaacagcctccatcctggctaaggactccgtaggggccaggcgggcaacggcggagcgctcggagggagcagggccagagagaagtccccggggccagcctgcctgcctgccacttcctcc

SEQ ID NO: 11069 - DNA, 481 bp, Homo sapiens
gcaggcatgagccaccgtgcccggcctcatggaatttctaggggtgagcaggtgaccctggggctgccacttgagctcctggagtgtgtgtcttggcccctgtgtggttctccattaagaaaagctcagatagtctcaaccccaccctctccccttgctgcactcagagtaccagtgggagctgaaggatggggaggaacagagcagtgaccacccctccctgccactgataagttctgcctcgtcgtggggctcccctggttcccaagacaccccttcctccctcagcccgtcgtcctaacccagcaaagatctgggcattgctgactctgcacctccttcctccatgggcatctccaggaccgccctccttcaaggggcactgcccacaccaccgtcctcagcccgaggcatgcatctgagctggagaggcttgcaggcctgaccctggtagcttcccctccccaagattcagaggcgg

SEQ ID NO: 11070 - DNA, 138 bp, Homo sapiens
gcacttaagagactttatcacacaatatctttctacatttttatgctataatggttactatttcaggattaatggaagtgttcactcctgagttcatttcacaaatttaaatactaaaacattttgttctttgaaaag

SEQ ID NO: 11071 - DNA, 2021 bp, Homo sapiens
  misc_feature (1)...(2021): n = a,t,c or g
ccctcttcaccttggatgtaacaaaaataaagatgtgaggctgcctgctcttgcctaaagcatggcttgaactttcaattgatagtaaccgcttatgaaaaatattacattacataatctcctgtgtattgaaattgcacaagtcagagcatccaaaaactgcaagagtcaatttcttcctatggggaaaagcatatagatatactatgttaaaacttccattcctcattcgattatttgccctattcaaaacataaaaatacaaataaatatttccttacaaagttcacagtatgttgttttaaaaaaaagagataaaaaaacttaatttgctttgtcattaaataaaaatgctaatatatagacatgttcaatatttatacaaattgtaggggccagtgtatcctttcttggtcataattgaagtttaatagtgctagtccatacacgacaaggctcagatcccaaatgtaagctcaattctactaaaagttgctcaagataattttttctctttttctgtttaattaaaaaagacatttttggaattttagaattacatttgagttgtctgaaaaaatacaatttcaatgaaaaatcatatcacgcattcaagagtatattgctggtgctataatcnttttgcatgtctttgttttcatagaaaaaaatcagtaaaataacatgtctaagacttttaaatggttaaatgtaaccacatactattaatgatatgcctcatgcacacacacactcaaactcaaaacatgaaggaaacaggatcagacagctttcttttgcattagttctagctttcttctcagcagaccgtaattctccttagttcctgatgccgtggggtcaagctgcaaggagatttcatagtgtttcttggccaagtctagatgtccccaacgatgataaagcacagccaaattaccatggtaacttgcagcatttggatttgctttaattgccttgaggaataaagcttcagattccttgtatttctgggatttccccagcacgtttgccaacgagaacatgagagagtgatcattaggtattaattccagtgcctctcttccaactgcttcagcttgggctaaattacctgtattgtcgaggagtataatcatgttgttccaggccaggctgtgctctggtttcagcacggtggcatttctccacgcattcaaggcatccacgtggcgattgagatctgcatacagacgcccgaggttgtagtaacagtctgggtatttccttctgtgtttaattgctgtccggtaactttgctctgctgcttcaaaccgtttcaggctattctgcactatgcctagattcatccacgcagcggcaaagtctggctgtatttgaacagccaaagacagcagctcctcagcttcctgtagccaatccttcctttaagatattcccaagattattcatggcatgaacatacttgggatttaatcttacagctccccggtagtatctgatggcagctgtctggttgccctttaatcagcccggtttttgcccaatgttgttattgaaaccttagcattgaggggacacacagacagagcacttctgaaaagctgttcctcactccgccacttcgccgtgcgcagcacacatctcagcgtgttgatgaataagattcccagcacgacagcggcaatgagtttctttttcttggtatgtttgctcagggctccgaatccaaaagtcagcagcacacagtacccaacgctggggaggtagaggacacgctctgcgaccacgaagcccactcggaagaacaggttactcgcggggagaaatgggataacgagaaatcccatggcccagagtaaggatccttctcttgtggccgtcttcagagcacagggcttggcatatcaggccaattaggcagaaccagagtgctgcaagtgcaattaccctccagtcgctgatggacttaatgagggggatgcagcccattgaccaatcaaaacacagccaccagggac

SEQ ID NO: 11072 - DNA, 1309 bp, Homo sapiens
  misc_feature (1)...(1309): n = a,t,c or g
gaggagggaagagaagagcaaggggaggtactgaggggcagtggctccaggagaggcagctcccctgcccaagggtccttgggcagaccccagctgttgtctgcccagtagaagtgggtgggggtaggaggggatagggtgtccttgggaacaatggatcccagcttagccccaaagaccaaccaaagagccagccagagtaagctggacctgcaacctgcctgagccccgtggcctctcagctctgcggccaccccgttccctccccagcttcctgcccaaagagccccacattcaagccaacttgagggaagggggcgtctcgtcagctggtccctgctagggagctattgatgtgcaatattagaaaggagacatgaaaaaaggagaaaaggaaagacagaagtgtatatatatattatttaaacaaacaaaaagaaggtgcgttactatttttttttcacccgggaaagaggtgagaggatgggaaggagcagccaggcgtgggaagcggcgagatcctcgggctgggggtgcccacgtttgctacctcccactgtgaaatcgctggtgctcacaattgtctctcacagtgtatgtgattttttttaaggaaaaaaaaaaatccctatttaagattctgaaggtgctaccattattttgccacagactttgaagaaacttttggatgtggggcatcatccgcatctttctctctcctccaaatgacaaagtttggggaatttttgaattttcctagcatcgcccttgtgctcatcaggtaatctgctaaggaggnnnnnnnnnnnnnnnnnnnnnnnnnnnnnnnnnnnnnnnnnnnnnaaancaaaaacaaaaaccctaccagaaaccagaagtagagagatttaccatataacttatggactttgaaatgtctgtccttttaaggcagcagggaggcctgggtgcgaacatggtctggcttggcccttcacggtcctggagggaggtgaggctggccttggaaggcgtgccctggagaggtcttgggtgaaaacttgaccttgaagaaaccaatcacaaaagcggcgttgggtcagggctaggcttagaggtgaagcatcaacatggaaccatctcaggaagccgcatcgcctcttccgaggtcctcacttccaggagcctgtccttgcaagatgcaatcatcgttcctgctttttcattgtcattaaattctgtagaaacccattgtcattagctccaagtgtaaatttgggtcaaggagacagaataataatgggaatctcggagttcgacaccatagtga

SEQ ID NO: 11073 - DNA, 883 bp, Homo sapiens
gtcaaaatgcagtatttcaatatatttcgaggactgataatcctattgaagtcacagagtcaagcagtactcctgaacaaaccgaagttcagatacaggaaactagcactgaacagtcaaaaacagtaccggttacagatacagaggtggaaactgtagagccccctcctgttgagattgttacagatgaagttgcacctacatctgatgaacaacctcaggagtcgcaggctgacttggaaacttctgacaattctgattttggtcaccagttgatatgttgtctttgtagaaaagaattcaattctagacgaggtgttcgccgtcacattcgaaaagtacacaagaaaaagatggaagaactaaaaaagtacattgaaacacgaaagaatccaaaccaatcctctaaaggacgcagtaagaatgttctagttccattaagtaggagttgtccagtatgttgtaaatcatttgctacaaaagcgaatgtaaggaggcattttgatgaagttcatagaggactaaggagggattcaattactcctgatatagcaacaaagcctgggcaacctttgttcctggattctatttctcctaaaaaatcttttaagactcgaaaacaaaagtcttcttcaaaggctgaatacaatttaactgcatgcaaatgcctcctttgcaagaggaaatatagttcacaaataatgcttaaaagacatatgcaaattgtccacaagataactctttctggaacaaactctaaaagagaaaaaggccctaataatactgccaaagttcagaaataaaagttaaagttgaaccagcagattctgtagaatcttcacccccttccattacccattctccacagaatgaattaaaggga

SEQ ID NO: 11074 - DNA, 255 bp, Homo sapiens
tgacacaatgaacttgatttctttactaccttgactgtagctttttgtccctacctgtgaaccttcaaagactgcattaacttttaggctacataggtccaatttaggtataatatcagtacaccaaagatttttatatgcccttcgtgtgaccattctttaacggcctaagggcagtctgcaaagacttttggaaaatacaatttacaactcaaaattatttaatagtttaggaagttgctttttttttttttt

SEQ ID NO: 11075 - DNA, 650 bp, Homo sapiens
  misc_feature (1)...(650): n = a,t,c or g
ttctcttaaagcattatagtttggcctgatggtggacacagaagactttcatattcttgttttttaaaagtctcttcagtaggaaaaaagctacagatttaaaaaatatgaccatgactagaatagaatcagcttaaaaagaaacaaagtttttaaaaaatcataatccatgctatgtactcaccaaagtgttttgaaatttgtgttacacatagattaaaacagtggttcttaacaagggggcaattttgtcccccagaggacatttggtctgggagggtgcctattggccatgtaagtggggaaggcccagagatactgcccaaacacccctacactgccacaggacattcccctcccaattacgcagtacaaaatatcagtagggcccaaggctgaataaattttggattataaacagaaataggtcatccccttagaaaagaaatcagannnnnnnnnnnnnnnnnnnnnnnnnnnnnnnnnnnnnnnnnnnnnnnnnnnnnnnnnnnnnnnnnnnnnnnnnnnnnnnnnnnnnnnnnnnnnnnnnnnnnnnnnnnnnnnnnnnnnnnnnnnnnnnnnnnnnnnnnnnnnnnnnnnnnngaaatacagagtaacttatctgcagagtgctttcaatccctcgtgcc

SEQ ID NO: 11076 - DNA, 4528 bp, Homo sapiens
  misc_feature (1)...(4528): n = a,t,c or g
ggcggcgggagccctggaacggagcttcgtggagctaagcggagctgagcgcgaaaggccgaggcactttcgggaattcacagtctgcagcattgggactgcaaatgccgtggctggcgccgtaaaatacagtgaaagcgcgggaggcttttactacgtggagagtggcaagttgttctccgtaaccagaaacaggttcattcattggaagacctctggagatacattggagctgatggaggagtcactggacataaatctgttgaataatgccattcgcctaaaattccaaaattgcagtgttttacctggaggggtttatgtctctgagactcagaatcgtgtgataatcttgatgttaaccaatcaaacagtgcacaggttacttttaccacacccctcccggatgtataggagtgagttggtagttgacagtcagatgcagtcaatattcactgacattggaaaagttgatttcacagatccttgcaactatcagttaattccagcagtacctggaatatctcctaattccaccgcctctacagcctggctcagcagtgatggggaggccctgtttgccttaccatgtgcttctgggggaatctttgttcttaagctacctccttatgacatacctggtatggtgtcagtcgtggaactgaaacagagttcagtaatgcaacgattgcttacaggctggatgccaacagctatcaggggtgaccagtcgccttcagatcgtcccctcagtcttgctgttcattgtgtggagcatgatgccttcatctttgctttgtgtcaggatcataaactacgaatgtggtcttacaaggagcaaatgtgcctaatggtagctgacatgctggagtatgtccctgtgaagaaagaccttcggcttactgctggaactggacacaaattacggcttgcttattcccccaccatgggactctacctggggatatacatgcatgcaccaaaacgaggacagttctgcattttccagttgggggagnactgagagtaatcgctatagtctcgatcatatttcttcactgttcacttctcaggagacactgattgactttgccttaacttccacggatatctgggccctgtggcatgatgctgagaaccaaacagtagtgaaatacatcaactttgaacataatgttgcaggtcagtggaatccagtttttatgcagcctctgccagaggaagagattgtcatcagagatgatcaagaccccagagagatgtatctgcaaagtctttttacaccaggacaattcacaaatgaagctttatgtaaggctttacagattttctgccgaggaactgagaggaatttggatctttcctggagtgaactgaagaaagaagttactttagctgttgaaaatgagcttcaaggaagtgtaacagagtatgaattctcccaggaggagtttcgaaatttacaacaagaattctggtgcaagttctatgcctgttgtcttcagtatcaagaagccctctctcaccctcttgccctacatttgaatccacacacaaacatggtgtgcctgctgaaaaaagggtacctgtctttccttattccctcatccttagtggatcatttgtatctcctgccttatgagaaccttttgacagaagatgagacaaccatatctgatgatgtggatatcgctcgggatgtcatatgtcttataaaatgcctccggctgattgaagagtcagtaactgtggatatgtcagttataatggaaatgagttgttataacctacagtctccggaaaaggctgcagagcagattctggaagatatgatcactattgatgtagaaaatgtgatggaggatatttgtagtaaactgcaagagattaggaacccaatccatgcaattggactacttatacgggaaatggattatgaaacagaagtggaaatggaaaagggattcaatccagctcagcctttgaatattcgaatgaatcttacccagctctatggtagtaacacagcagggtatattgtgtgcagaggggtgcataaaatcgccagtactcgtttcctgatctgcagagatcttttgatcttacagcagctgttaatgaggcttggagatgctgtgatttggggaactggtcagctctttcaagctcagcaagacctactacatcgaacagctcccctactcttatcttattacctcattaaatggggaagtgagtgcttggcaactgatgttccacttgacacactggagtctaatctccaacacttatcagtactggaattaacagactctggtgctttaatggcaaataggtttgtatctagtcctcagactattgtggagttattcttccaagaagttgcaagaaaacacattatatctcacctcttctctcagccaaaggcacctctgagccaaactggattgaattggcctgaaatgattactgcaattaccagttatttattgcagcttttatggcctagcaatcctggttgtctctttctagaatgtttgatgggaaattgccaatatgtacaattgcaggattatattcaactgctacatccctggtgtcaagtcaatgttggttcctgtcgatttatgctgggaaggtgttacctagttacaggagaaggacagaaggctctggaatgtttttgtcaggcagcatctgaagtaggcaaagaggaattcttggatcgcttgattcgctcagaggatggggagatcgtgtctacccccaggctgcagtattatgacaaggttttacgactactagatgtcattggtttgcctgaactggttattcagttggctacatcagccataactgaagcaggtgatgactgggaaaagtcaggctactcttaaggacatgtattttcaaacatcatttgggatttggggtcacaatagccaagcatatggaagcctttaaccccaaattcctgatttccagcaggcaattagattgtttacggcagttggtggtagttctttgtgaacgctcacagctacaggatcttgtagagtttccctatgtgaatctgcataatgaggttgtgggaataattgagtcacgtgctagagctgtggaccttatgactcacaattactatgaacttctgtatgcctttcacatctatcgccacaattaccgcaaggctggcacagtgatgtttgagtatggaatgcggcttggcagagaagttcgaactctccggggacttgagaaacaaggcaactgttatctggctgctctcaattgtttacgacttattcgtccagaatatgcgtggattgtgcagccagtgtctggtgcagtgtatgatcgccctggagcatcccctaagaggaatcatgatggagaatgcacagctgcccccacaaatcgacaaattgaaatcctggaactggaagatctggagaaagagtgttccttggctcgcatccgcctcactttggctcagcatgatccatcagcggttgcagttgctggaagttcatcagcagaggaaatggtcactctcttggttcaggcgggcctctttgacactgccatatcactctgtcagacttttaagcttcccttaacgccagtctttgaagggcttgccttcaaatgcatcaaattgcaatttggaggagaggcagcacaagcagaagcctgggcctggctagcagccaatcagctctcatctgtcatcactactaaggagtctagtgctacagatgaagcatggcgactattatccacttacctggagaggtacaaagtccagaataacttgtatcaccactgtgtaatcaacaagctcttgtctcatggagtgcctctgcctaattggcttataaacagtcacaacatcgcactgtcccaaaaagttgataaggcaacacgggatttattatatcgtcggaccttgtgatttggattgtcacctagcctttgtaaccgcttggtgcctcttaggacttaagactaccctacaggaaccctgtactcaaggccgatttttgtaactgtaaatgatgtgtacaacattcaagtctgcattctgcacaagataggagggcggaagagtcagaggaccctgtgcttgctggtggtgctaacacaatttctggtgttcaaccttggtctcaaatagctgcttttgtatatgattcacgagcttttttagagtttatatttttttaaactaccgaagacattcattatctgcaaattaagactcaccttcactttccaaaatagctgagggttgttggcttgttgtagctgaccaccaaaaggcagtcactgcaaatcttttaattcttccctatcaccttttgtattttaatgcaattattttggtccagaactgacctgtattttctgtattgtacacaaaagctaataattttgtggtactttttatttattttggaggttttatatgatcttcaattgagtattaaataatttgcctagattaagcctaaaatgatgaccagct

SEQ ID NO: 11077 - DNA, 269 bp, Homo sapiens
  misc_feature (1)...(269): n = a,t,c or g
tctctggagaaatgtcaattaaaatacttgaaaatcatacatgtgatataggacttgtatccaggatgtataaataactcttataatncagtagtaagacaataactcatttaaaaagggccaaggatttgaattgacatttctccagagaagatatgtaagtggtgnnnnnnnnnnnnnnnnnnnnnnnnnnnnnnnnnnnnnnnnnnnnnnnnnnnnnnnnnnnnnaccactttatacctatttgaaagatacaataaaaaaagact

SEQ ID NO: 11078 - DNA, 534 bp, Homo sapiens
ggcatctcctcttcaggcatatctctgcctgaaatattttcctgccaagtgtaatcttaggaccacatctgaaatctgtgttatgtatgggtttagttattttatttgttatttcccaataatgatagccctttgcaaaaacccatcccatccagaaagaggacataccttaaccatgggagcccttggtactttcctcttcataccacagtatggcttgtgattccaaggaaaaagttgtgtaataaccttaacaaagcagccttcagttccttccctggtaaacctgtggtcccgtggaaccatgtgttttgatccagcagttccctctgcccaccctggaatccttgagataagtgtgtgggtcagtgtgcatgtgtgccccatacatgcttatgaggaggtcagtgtgtgaggggaatcaggaagtctcttttttatttttaaatgaaatcaagtaaaacttaaccttggcttcaaaaatatctctcaaatactgtaaacaatacctttgatactttttagaaagagatt

SEQ ID NO: 11079 - DNA, 974 bp, Homo sapiens
ggatccgcggcagcagcggctgcttgagatctgtttctggggcctctgcgggtggcggcctggggcggcgcgacggctggtgcgcaggtacactgatgctgaagtactatgagccttcggaacttgtggagagactacaaagttttggttgttatggtccctttagttgggctcatacatttggggtggtacagaatcaaaagcagccctgttttccaaatacctaaaaacgacgacattcctgagcaagatagtctgggactttcaaatcttcagaagagccaaatccaggggaagtagcaggcttgcaatcttcaggtaaagaagcagctttgaatctgagcttcatatcgaaagaagagatgaaaaataccagttggattagaaagaactggcttcttgtagctgggatatctttcataggtgtccatcttggaacatactttttgcagaggtctgcaaagcagtctgtaaaatttcagtctcaaagcaaacaaaagagtattgaagagtgaagtaaaataaatatttggaattactaatttgtcattaaatcattctatgctgattagcttcataaacattgaactttttgattttatagccacaatgctgcatattcatactttaattcctaaagaataatttttaatgttaaaacgtgataatgcaataaatagaaaaatgtggtttacaaaataaaaacggtcttcactagttaccacctgaagtaagatgtctcgtttggaagctaagaagccatcattgtgtaagagtgaaccactgacaactgagagagtcaggaccacactttctgtcttgaaaagaattgtaacatcatgctatggcccctcaggtaggctgaagcagctgcacaatggctttggaggttacgtgtgtacaacctcacagtcctcagctctgctcagtcaccttttggtcacacatcccattttaaagatcctgacagcctc

SEQ ID NO: 11080 - DNA, 610 bp, Homo sapiens
tttttttttctttttttctttttgcagggggaagggcagggagtatatcgtctacacaattggacaaattcatcttttctgctcttcacttcatgtccacatcaaagtccagcaccagcagcttggtttcttcagtcccattccgactcccaactgcacacaccagctttgtgtttgaggctctgatccgccacacaactcccccactccccccactctccaatgtgactaggtttcgaataaattcacccgttttcaagtcccatagttttacagttccatcatctgagctggtaattacaaagttcttgttgaactgtaaacaggtcacagcactctgatgcttgttgggaccttgcaatgtttgtaaacactgtcctgttttgatatcccagattttaactgtagaatctgcattcccagagacaagaatattgtctttgagttccattccacttgttaacgactggtgccctgttaacgtgtgaatgcaattccctgtctccacatcccaaacacggattgatgtatcaagagatccactcaccacatggataccatcaaactacaaaagacacagtttattagaatagaagtatggatactcttc

SEQ ID NO: 11081 - DNA, 456 bp, Homo sapiens
ttttttttccttttcttagttttatttgacttttttttttgaaggctgtgactaactttattggcatctctctagagacataagtaggcttcaccgccaatttgcctaaggtgttcagcaggactattgaaggcctggcagctgccggaggagagcctgtctcccagccgggccttctgctccttgctccagagggctttgagcttgcggtagtacaccttgcagctgaagccctccctgaagcccctcttgatgtggctcttgaggaagtccagggtggggtacatgcggcagcagggccacgcacttgtagccattctgctgtgctgggtgccacctggaagccattaggatgtcctgggatgtgatggagtccaggccatgcctggatttcttggtggcttctcgagggcaagtgttctctggggaggaagaggatgaacagatgttctcagc

SEQ ID NO: 11082 - DNA, 397 bp, Homo sapiens
gctcgacgatcagcctgggcaacatagcaagacccccacctataggaaaataaatccgagcgttccaagtgttcagctattcacccactttaggtttccaccttccttagaaagtagagtagtataaattatttctgaaatttgtgaaacgatgtaccacataaccctctcaaaccaggttgctactacttccaatgacttcattgataaggggcaaagtaactcgaatgatgggtgagctcatgacatggtttagctccgtatcaaactctggatttgggaaaattgctactgatttattaaacacttgaattcttatatgctaggtcagaatttggcaactaaactctcagaaatttgtaaacttcacttttctatgtaaaaaggaaggtcgacg

SEQ ID NO: 11083 - DNA, 302 bp, Homo sapiens
  misc_feature (1)...(302): n = a,t,c or g
ccccctcccactggaaaataaactccacatggacatggatctatgttttgatcacaatatgtcccaaatacctaggcacagggccctgagcacagggtaggtatgcaatatatatttgttgaatgttcagtggatggatgggttgatgagcgggtagatggatgaatgnntagntcatgtaactgccnnnnnnnnnnnnnnnnnnnnnnnnnnnnnnnnnnnnnnnnnnnnnnnnnnnnnnnnntcctggncatgacctgaggagggagacntanggggtctcctgagtcctggccaattgc

SEQ ID NO: 11084 - DNA, 78 bp, Homo sapiens
gatccataacgtgtattgcaaatatcttctctaactctggcttgactgtttatggtgtccttttttttgggggggggg

SEQ ID NO: 11085 - DNA, 7692 bp, Homo sapiens
  misc_feature (1)...(7692): n = a,t,c or g
gaggctcctcggtccttcagcacccctcggcccgacgcacccacgcccctcaccccccgagagccgaaaatggacccaagtggggtcaaagtgctggaaacagcagaggacatccaggagaggcggcagcaggtcctagaccgataccaccgcttcaaggaactctcaacccttaggcgtcagaagctggaagattcctatcgattccagttctttcaaagagatgctgaagagctggagaaatggatacaggaaaaacttcagattgcatctgatgagaattataaagacccaaccaacttgcagggaaagcttcagaagcatcaagcatttgaagctgaagtgcaggccaactcaggagccattgttaagctggatgaaactggaaacctgatgatctcagaagggcattttgcatctgaaaccatacggacccgtttgatggagctgcaccgccagtgggaattacttttggagaagatgcgagaaaaaggaatcaaactgctgcaggcccagaagttggtgcagtacttacgagaatgtgaggacgtgatggactggatcaatgacaaggaagcaattgttacttctgaagagctgggccaggatctggagcatgtagaggttttacagaagaaatttgaagagtttcaaacagatatggctgctcatgaagaaagagttaatgaagtgaaccagtttgctgccaaactcatacaggagcagcaccctgaggaggaactgatcaagactaagcaggatgaagtcaatgcagcctggcagcggctgaagggcctggctctgcagaggcaggggaagctctttggggcagcagaagttcagcgctttaacagggatgtggatgagactatcagttggattaaggaaaaggagcagttaatggcctctgatgattttggccgagacctggcaagtgttcaggctctgcttcggaagcacgagggtctggagagagatcttgctgctctagaagacaaggtcaaagccctgtgtgctgaggctgaccgcctgcaacagtcccaccctctgagtgcaacacagattcaagtgaagcgagaggaactgattacaaactgggagcagatccgcaccttggcggcagagagacatgcacggctcaatgattcatacaggcttcaacgcttccttgctgacttccgtgacctcaccagctgggtgactgagatgaaagccctcatcaatgcagatgagcttgccagtgatgtggctggggctgaagccctgctagatagacaccaagagcacaagggtgaaattgatgcccatgaagacagcttcaaatctgcagatgaatctggacaggcactgcttgctgctggtcactatgcctcagatgaagtgagggagaagctgaccgtcctttccgaggagagagcggcgctgctggagctgtgggagctgcgcaggcagcagtacgagcagtgcatggacctgcagctcttctaccgggacactgagcaggtggacaactggatgagcaagcaggaggcgttcctgttgaatgaagacttgggagattccttggatagtgtggaagcgcttcttaagaagcacgaagactttgagaaatcccttagtgcccaggaggaaaagattacagcattagatgaatttgcaaccaagctaattcagaacaaccactatgcaatggaagatgtggccactcgccgagatgctctgttgagccgccgcaatgcccttcacgagagagccatgcgtcgccgggcccagctagccgattctttccatctgcagcagtttttccgtgattctgatgagctcaagagttgggtcaatgagaagatgaaaactgccacagatgaagcttataaagatccatccaacctacaaggaaaagtacagaagcatcaggcttttgaggctgagctctcagcaaaccagagccgaattgatgccttggagaaagctggccaaaagctgattgatgtcaaccactatgccaaggatgaagtggcagctcgtatgaatgaggtgatcagtttgtggaagaaactgctagaggccactgaactgaaaggaataaagcttcgtgaagccaaccagcaacagcaatttaatcgcaatgttgaggatattgaattgtggctatatgaagtagaaggtcacttggcttcggatgattacggcaaagatcttaccaatgtgcagaacctccagaagaaacatgccctgctagaggcagatgtggctgctcaccaggaccgaattgatggcatcaccattcaggcccgccagttccaagatgctggccattttgatgcagaaaacatcaagaagaaacaggaagccctcgtggctcgctatgaggcactcaaggagcccatggttgcccggaagcagaagctggccgattctctgcggttgcagcagctcttccgggatgttgaggatgaggagacgtggattcgagagaaagagcccattgccgcatctaccaacagaggtaaggatttaattggggtccagaatctgctaaagaaacatcaagccttacaagcagaaattgctggacatgaaccacgcatcaaagcagttacacagaaggggaatgccatggtggaggaaggccattttgctgcagaggatgtgaaggccaagcttcacgagctgaaccaaaagtgggaggcactgaaagccaaagcttcccagcgtcggcaggacctggaggactctctgcaggcccagcagtactttgctgatgctaacgaggctgaatcctggatgcgggagaaggaacccattgtgggcagcactgactatggcaaggacgaagactctgctgaggctctactgaagaaacacgaagctttgatgtcagatctcagtgcctacggcagcagcatccaggctttgcgagaacaagcacagtcctgccggcaacaagtggcccccacggatgatgagactgggaaggagctggtcttggctctctacgactatcaggagaagagtccccgagaggtcaccatgaagaagggagatatccttaccttactcaacagcaccaacaaggattggtggaaagtggaagtgaacgatcgtcagggttttgtgccggctgcgtacgtgaagaaattggaccccgcccagtcagcctcccgggagaatctcctggaggagcaaggcagcatagcactgcggcaggagcagattgacaatcagacacgcataactaaggaggccggcagtgtatctctgcgtatgaagcaggtggaagaactatatcattctctgctggaactgggtgagaagcgtaaaggcatgttggagaagagttgcaagaagtttatgttgttccgtgaagcgaatgaactacagcaatggatcaatgagaaggaagccgctctgacaagtgaggaggtcggagcagacttggagcaggttgaggtgctccagaagaagtttgatgacttccagaaggacctgaaggccaatgagtcacggttgaaggacattaacaaggtagctgaagacctggagtctgaaggtcttatggcagaggaggtgcaggctgtgcaacaacaggaagtgtatggcatgatgcccagggatgaaactgattccaagacagcctccccgtggaagtctgctcgtctgatggttcacaccgtggccacctttaattccatcaaggagctgaatgagcgctggcggtccctacagcagctggccgaggaacggagccagctcttgggcagcgcccatgaagtacagaggttccacagagatgctgatgaaaccaaagaatggattgaagagaagaatcaagctctaaacacagacaattatggacatgatctcgccagtgtccaggccctgcaacgcaagcatgagggcttcgagagggaccttgcggctctcggtgacaaggtaaactcccttggtgaaacagcagagcgcctgatccagtcccatcccgagtcagcagaagacctgcaggaaaagtgcacagagttaaaccaggcctggagcagcctggggaaacgtgcagatcagcgcaaggcaaagttgggtgactcccacgacctgcagcgcttccttagcgatttccgggacctcatgtcttggatcaatggaatacgggggttggtgtcctcagatgagctagccaaggatgtcaccggagctgaggcattgctggagcgacaccaggaacaccggacagaaatcgatgccagggctggcactttccaggcatttgagcagtttggacagcagctgttggctcacggacactatgccagccctgagatcaagcagaaacttgatattcttgaccaggagcgtgcagacctggagaaggcctgggttcagcgcaggatgatgctggatcagtgccttgaactgcagctgttccatcgggactgtgagcaagctgagaactggatggctgcccgggaggccttcttgaataccgaagacaaaggagactcactggacagcgtagaggctctgatcaaaaaacatgaagactttgacaaagcgattaacgtccaggaagagaagattgctgctctgcaggcctttgccgaccagctcatcgctgccggccattatgccaagggagacatttctagccggcgcaatgaggtcttggacaggtggcgacgtctgaaagcccagatgattgagaaaaggtcaaagctaggagaatctcaaaccctccaacagttcagccgggatgtggatgagattgaggcttggatcagtgaaaaattgcaaacagcgagtgatgagtcgtacaaggatcccaccaacatccagctttccaagctgctgagcaagcaccagaagcaccaggcttttgaagcagagctgcatgccaacgctgaccggatccgtggggttatcgacatgggcaactccctcattgaacgtggagcctgtgccggcagtgaggatgctgtcaaggcccgcctggctgccttagctgaccagtggcagttcttggtgcaaaagtcagcggaaaagagccagaaactgaaagaagccaacaagcagcagaacttcaacacagggatcaaggactttgacttctggctgtctgaggtggaggccctgctggcatccgaagattatggcaaagacctggcttctgtgaacaacctgctgaaaaagcatcaactgctggaagcagatatatctgcccatgaggatcgcctgaaggacctgaacagccaggcagacagcctgatgaccagcagtgccttcgacacctcccaagtaaaggacaagagggacaccatcaacgggcgcttccagaagatcaagagcatggcggcctcccggcgagccaagctgaatgaatcccatcgcctgcaccagttcttccgggacatggatgacgaggagtcctggatcaaggagaagaagctgctggtgggctcagaggactacggccgggacctaactggcgtgcagaacctgaggaagaagcacaagcggctggaagcagaactggctgcgcatgagccggctattcagggtgtcctggacactggcaagaagctgtccgatgacaacaccatcgggaaagaggagatccagcagcggctggcgcagtttgtggagcactggaaagagctgaagcagctggcagctgcccggggtcagcggctggaagagtccttggaatatcagcagtttgtagccaatgtggaagaggaagaagcctggatcaatgagaaaatgaccctggtggccagcgaagattatggcgacactcttgccgccatccagggcttactgaagaaacatgaagcttttgagacagacttcaccgtccacaaggatcgcgtgaatgatgtctgcaccaatggacaagacctcattaagaagaacaatcaccatgaggagaacatctcttcaaagatgaagggcctgaacgggaaagtgtcagacctggagaaagctgcagcccagagaaaggcgaacgtggatgagaactcggccttccttcagttcaactggaaggcggacgtggtggagtcctggatcggtgaaaaggagaacagcttgaagacagatgattatggccgagacctgtcttctgtgcagacgctcctcaccaaacaggaaacttttgacgctgggctgcaggccttccagcaggaaggcattgccaacatcactgccctcaaagatcagcttctcgccgccaaacacgttcagtccaaggccatcgaggcccggcacgcctccctcatgaagaggtggagccagcttctggccaactcagccgcccgcaagaagaagcttctggaggctcagagtcacttccgcaaggtggaggacctcttcctgaccttcgccaaaaaggcttctgccttcaacagctggtttgaaaatgcagaggaggacttaacagaccccgtgcgctgcaactccttggaagaaatcaaagctttgcgcgaggcccacgacgccttccgctcctccctcagctctgcccaggctgacttcaaccagctgggccgagctggaccgccagatcaagagcttccgcgtagcctccaacccctacacctggtttaccatggaggccctggaggagacctggaggaacctacagaaaatcatcaaggagagggagctggagctgcagaaggaacagcggcggcaggaggagaacgacaagctgcgccagggagttttgcccagcacgccaacgccttccaccagtggatccaagagaccaggacatacctcctcgatgggtcctgtatggtggaagagtcggggaccctcgaatcccagcttgaagctaccaaacgcaagcaccaggaaatccgagccatgagaagtcagctcaaaaagatcgaggacctgggggccgccatggaggaggccctcatcctggacaacaagtacacggagcacagcaccgtgggcctcgcccagcagtgggaccagctggaccagctgggcatgcgcatgcagcacaacctggagcagcagatccaggccaggaacacaacaggtgtgactgaggaggccctcaaagaattcagcatgatgtttaaacactttgacaaggacaagtctggcaggctgaaccatcaggagttcaaatcttgcctgcgctccctgggctatgacctgcccatggtggaggaaggggaacctgaccctgagttcgaggcaatcctggacacggtggatccgaacagagatggccatgtctccttgcaagaatacatggctttcatgatcagccgcgaaactgagaacgtcaagtccagcgaggagattgagagcgccttccgggccctcagctcagcngggaaagccttacgtgaccaaggaggagctctaccagaacctggacccgggaaccaagccgactactgcgtctcccacatgaagccctacgtggaacgggcaagggcccgcgagctccccaccgcgttcgactacgtggagtttcacccgctcggcttttcgtgaaactggagccactccctggggtcaccccacccctcgctgccttgcccctggcgtcgccttgcctgcatgtccgctcctctgtgtgctctcactttccactgtaaccttaagcctggtttagcttggaataagacttaggagaaaatggtgcttcactaacccgcttccggtccagtcacaatc

SEQ ID NO: 11086 - DNA, 394 bp, Homo sapiens
cccgaacaagctttgatcaggtttccctgcttccgacctgtcctgcctcagtttccccatctgtgatgagcaggtgaccacgttaactctcagggctgtttgaagtctcttggttgtaggccctcgccactgagtggcccaggtgtgagaggtagtctagagccctctgcggcctttgtggaggtccgttctcagcatgtggcctggtgtggctccctaggcctgaggcttcccactctcagtgccccctgcccccttgggaacccacactccaccccagctaagcacaacactgtgggaccaccaccaatgggcacctgagccaccttgaccaccattagtgtccccaccctcattactcttgccgtcgttgccttgttccccaccacattca

SEQ ID NO: 11087 - DNA, 369 bp, Homo sapiens
gctcgcgcgcctgcagggttttggcatatgctggttacattccccctagcaaagaggaaagtgactggccagcctctggctccagctctccattgcgaggagagagtgcggccgacagtgatggctgggactcggccccctcagatcttcgaaccatccagacttttgttaagaaagcaaagtcatccaagagaagggcagctcaagcaggtcccacccagccaggacccccaaggtccactttctctcgtctgcaggcccccgacagtgctaccttgcttgagaagatgaagctcaaggactctctctttgatctggatgggcccaaagtggcatctcctttgtcccccacatccctgacacatacct

SEQ ID NO: 11088 - DNA, 411 bp, Homo sapiens
  misc_feature (1)...(411): n = a,t,c or g
gctacaacatcattagcaataggaatatgtcagttctgttataattttatggaaccactgtagtatatgcagtctgtagtgtaccgaaacaccatcatgtgacacatgtatgtatacagtggatatacacnnnnnnnnnnnnnnnnnnnnnnnnnnnnnnnnnnnnnnnnnnnnnnnnnnnnnnnnnnnnnnnnnnnnnnnnnnnnnnnnnntaactcccatatataccaaaggatgactgtatataaaactagcctatagaagttggaaatctttctaaaattgaggctaactctgaagttgacttccttttcacattattttccctcttgatttgttttaatcattaaccttatttcagattttttgtattagatatcaatatctccatcatcactgactcctgcacac

SEQ ID NO: 11089 - DNA, 219 bp, Homo sapiens
  misc_feature (1)...(219): n = a,t,c or g
agaacactttcttgatacgttttggaagtaaagcccaattgttgctattctacaacaaatgacttatccatcataattatttgacttttctgatgaggtcaataccactagtgcaatatattaacgtttttaaaaaatcaagtcagtgttttatttttcataccatctacttttaagtgtaatcgtagnaggttctttggctgtttcagctttaatgaa

SEQ ID NO: 11090 - DNA, 1069 bp, Homo sapiens
ctgaaggcaataagctgggctcaccgctgcagcagagttctgtgctagccgggcataggggcgagagaaggcccagaggcgacgtcagagagaagcaactgcgccccggtgaagagaagctcgcccatcaccggctgggagccagctttcagtgaagatgggcagggccagaactgttgcttgactccaacatctgcctctgggtggtcctacccatcgttatcactcttcgtagacatgatccgccactacgtgtccatcctgctggagagcgacaagaagctcacccagggaacaagtatctgacaggggacgaggcacccacagtccctctcccataagcctgccaagaagattgatgtggcccgtgtaacgtttgatctgtacaagctgaacccacaggacttcattggctgcctgaacgtgaaggcgactttttatgatacatactccctttcctatgatctgcactgctgtggggccaagcgcatcatgaaggaagctttccgctggggccctcttcagcatgcaggccacaggccacgtactgcttggcacctcctgttacctgcagcagctcctcgatgctacggaggaagggcagccccccaagggcaaggcctcatccctcatcccgacctgtctgaagatactgcagtgaaagcccaagccctagctttccccagtgaaggactagactaggggccccacgctcaactggtagtggccacaagcctggcagctgtagagccgctaacctcccgacacctccctcaccacacaggaccctgagtgaggaggaggggctggaaacctgggatgggttggccaaaggagaacctcaggctcctggcctggcccagctccttcctgcccaagggtagcttagccccatccagactggtcctgaagtctgtccctccattggcatgaagtctgcccctcagcagtccggcctcacaggctgtactttcatggtgctctctaccttctggcccccatcccaggaacatcctgagtgaattgcgcaagcgcactagcatgtgatattagggagtttgcaataaat

SEQ ID NO: 11091 - DNA, 230 bp, Homo sapiens
gttttttgtattgtctttggttttagtgtcagagtaaaatcagttttataaaataaatagggaagtgttacatctattttctgcaaaagatggtctagaattggtgttcattccttttttaaacgtctggtagaattccgcagtgaaaccatttggacctagaggtttcgtttttggggagttttaaaactatgaattcaatttccgttgtagtttatagggctattcaa

SEQ ID NO: 11092 - DNA, 399 bp, Homo sapiens
gggttactgcaatgcagatggatgtttggatgaacaactgatacattttagttagaatgctttttcagcattatggctaaaatatatgtctaacccagtgctatttaggtgaaaatgctaattgataaaccagaagtttcttttgagatttgctttaaagaaatgctttagtaagaatatgaacaatttcctgatgtctcctataaattgtgattgtttattctattactattgttaaaaacttgaatggtatttatattgggctgatatttatatacttaatagattgagttctgtaaggggcaaaaacgggattgaaatggaacataggcgttttgcactaatgataagataacctgaggaggtagggttgaggaacacagggttgaaagctgttgg

SEQ ID NO: 11093 - DNA, 714 bp, Homo sapiens
tttttttttcctgtcaactgcaaccatgtcatgtcctaggtgacagatgtgtttttcactaaaatggatggtactctcttcaaggtgagtaaccaggaggccaatgaagtttcttcaggggggtaggaaaagctcataaatgcacacaccacctcatccttcaagtcaaccatgtgactacaaggacttagctttaaaaagtcaaaattctgagctgaatcaatctagccaagagtatacctagcacctacccctaaagagccttcatttaacaggagcatcttttctttttcttgggggtgggaggatcaagggtgggggtggtttgacactatcaaacagatttaagtaggtggttagatatccagattttaaaaaggagtctaacccctctaaacatacatactgttgagcaatttggttcttgcaaatcctggaagatttaagacatgctgtgaattttgtctctgcgatatctaaaggcaagactgcatgtctggccaggagagaaaaagctgaagggccatccactcactgtgatatacagaagcaaaaataaaaaagctgggagatatgtgaatagatcatcccactaggagggatgtgtgctgggagactccaaactaccagtgagtccctaatcctactggccttttatttctggagtgaatttgaactgtaatgtgttacacagtaacatagctttgtatacac

SEQ ID NO: 11094 - DNA, 483 bp, Homo sapiens
ggaaatccatgttgtattcatagtgctccttactttgcaggatggaggttgcagctgtcctggggatgtggccaaggcttttggtaaggagcttgagggcacagaaggatgattctatacaagaggatgaatcacctctgagggtctagggtcaggctaagagaggctcaggaagtcattcagattctttcataatatgaattagtgactccgaagtctatggtatcatctggggcagccagcaggggacatctgagactccaagtgtgggccagggccatctgaccatctcctagattgctgcacagtgcagactcctgagccccagccatacctaaaaataggctctgaggaatgggacagcacatctgcatttttcattttgcacagcttcccaggagatcattactcccattaaagttggggatctttgctcgttgggacacatgaaatgagtcttatttagctgggcgcagtaaaatc

SEQ ID NO: 11095 - DNA, 176 bp, Homo sapiens
gatttaaagtaaaataagacaggtgtgaaagacatacattgtatgattccattcatatgcaagtccagagcatgtaaagctatatagaaagtcagttcgtggttatgtaggcctaggatgtagatcggtgggggggcagggagtgatagctaaagggccaaggggttttttttcct

SEQ ID NO: 11096 - DNA, 1722 bp, Homo sapiens
ataaatcgtttctaagaaaagtaaaagctcttttgaggcacaagataaagaggtttagctaatgaggagggtaacgaacctaactggaaaagtactgctaagggacatataataagaggtagcagattcagagagttggaggaaagtcactgaaatgatgaagttcttaatcttattatctctcacaaacccaaaataaatttaaaataattctaagtgattgaaaacatgaataaagaagtattttctattcatggaacaaatttcaaggtgatacaaatacagaaaacccacaagtactagcactaaaattataatgacattatttctataataaaaatttatgtcatattcttataaaggaaataattaaactagtctggaagatgctattaccttttagggatctgttttagcactgccagctcagaaaacagaaaggatttgtttaaggaaagtagagctggagaccacacaattctctgattggccaaactctgcatgagtcagccaggtgctccctcctcaccaggtgatctagtggggaagagatggggtagcccatggcatgggaaggaaaggaaaaacctgacatgctgttttcatgtctgcaacatgatagtctgtctgtctctttatgtgaacatcatcagtcagatgttctacctttttataacttcaaaatagttttaaaaacagcgtcggtggccccttattagataactgagtgtacatgaattttcaaatttgaaatctataaaaattttactgttctaaatgatagcagttactcagctaaacacagacatggaattgttgagactacaaaaccagccagcaaagctccccattgctttcaccaggacttgcaaaggcagcaaggattaaacagccagaaacagtgtaagagggctagagacttcatactttcaaatttagttggtgttctataaaaactgaagtaagaaaagctagccagatttaaaggagggaaaaaaactacaaaagaggataactatttttaggaaaaagcttatcaacagcatatagtagacactatgtaaacacctgatataatctagcagcaatgaatccccaaacatttatgtgtatatttactcaggagacaataagattacaaaggagataaaaggagaaaaaaaatgattaaatgctccaaaaattttgtttgttttttttgtttgtttttaaagtctacaggtaagcagacatttctatacatgtcctggtcactctttctaaagtatttataattaggttattgaccatgtcttggatattgttggcagtttaaataataccctcatccgtaggtatacacagaaagactgttttctttataacaaaaaatactataaagaaagagataatggaaataaggcctataatgaagacagaatcactaacactgtcagaattaactgatacagagaagaaaagattttttcttggaaaaggcattaattttgcagatcactgggatactatgtacatctgcaaagctaaatagaacctcagaggtccaaatagggcaatgtcatttcactggtcagatcaagcccagataagtaatcacagaaaaccggaagtacacttttcatagattttttttaaaaacactggctgaacaaaatagtgtataaattaatgtaagaaaggcaactgttagtggccagttaatagatactcgttttttttttc

SEQ ID NO: 11097 - DNA, 330 bp, Homo sapiens
caaggcccccaaggtccactcctgctagatctggtgtggaaatagaggagggagtgaaaatctggggggggctgaccatgtcagccacaccaagctaggggagcctcagccacgtccacaccaccttctgtggccactcctggagacatggattaaaggttgatgcaggtgtgtctgtgttagaaggcgtttcaagatgtgactttagctgtaagaggcaggatatgtaagtccttgcatcccctttagaaagccgggttgtgactcctactgcctcaggggtgccttggccctcctggtcttgcccaggctgggatcttcctggatgca

SEQ ID NO: 11098 - DNA, 167 bp, Homo sapiens
tgaaattctaaattgttagcctaattgcaaagtctatataggaatttgaatgtttgataatataataaaaaattttacctttatattaagatctataaataggttagaataattcttatgctctctaatagaaaaacatttaaataattaataaagtaacatttaaa

SEQ ID NO: 11099 - DNA, 406 bp, Homo sapiens
gcacacaagaaactaagggataaaaatatgggcatactcaggtcacattgggaacttgggtcacacaagtcttttgagatatctgtttccctgcatctgtacccattttctatcagatccatcttttgatctgtgaaaaatggcagataatacttggtacattttacaggtttggtggcctaaaactccaggcctgtttaacttcttaacaattcaagaattatatggatggaaaatgtttttctttacatttctttctttatataggaaactgtaatttagctctaaattcaactagccagctgggactagtctaatcattgagagacatgacaccaagtaattccgaggctcagctttaatcttgacaacattcctgtcacattcacttccatgatagaagaca

SEQ ID NO: 11100 - DNA, 372 bp, Homo sapiens
gccaccacgcccaggcccagacattcttaaacttgcttgctctatatttctgtacatttctgttggatataagccagaagtagaattgctgattaatagggtttatgtgtgttcagcattagtagattctgcccatgtccaaagtgattgtaccaaattacactcccaccagctaaggataattcccattgctgtacatttttgtcagcacttgaaattgtcactttttaattttagccattttgtagatgtgtataacaagatgtcattgagcttttaatttctattttcctgatgacttaagagattgagcacctttcttgtagttactggccattggatagcctcatttttgaagtgcctgtacaagtc

SEQ ID NO: 11101 - DNA, 834 bp, Homo sapiens
cgctgtcccgctcttgctacggtggcctggaggagtggcgaaaccggaacagagaatttatcacttctgggactcacagtcgtgatgtctttcaagagggaaggagacgattggagtcaactcaatgtgctcaaaaaaagaagagtcggggacctcctagccagttacattccagaggatgaggcgctgatgcttcgggatggacgctttgcttgtgccatctgcccccatcgaccggtactggacaccctgggccatgctgactgcccaccgtgcaggcaagaaacatctgtccagcttgcagcttttctatggcaagaagcagccgggaaaggaaagaaagcagaatccaaaacatcagaatgaattgagaagggaagaaaccaaagctgaggctcctctgctaactcagacacgacttatcacccagagtgctctgcacagagctccccactataacagttgctgccgccggaagtacagaccagaagcccctggtccctctgtctccctttcccctatgccaccctcagaggtcaaactccaaagtgggaagatcagtagggaacctgaacctgcggctggcccacaggccgaggagtcagcaactgtctcagcccctgcacccatgagccccacaagaagacgagccctggaccattatctcacccttcgaagctctggatggatcccagatggacgaggtcgatgggtaaaagatgaaaatgttgagtttgactctgatgaggaggaaccacctgatctccccttggactgatacccttttcccattcattcacaaataaattacaatgggtgctgagaacttaaaaa

SEQ ID NO: 11102 - DNA, 435 bp, Homo sapiens
cttcgttgcctggactctggtttccgccctggagcaagccggggcctggtcggcagctgggccgccatggagtccacgctgggcgcgggcatcgtgatagccgaggcgctacagaaccagctagcctggctggagaacgtgtggctctggatcacctttctgggcgatcccaagatcctctttctgttctacttccccgcggcctactacgcctcccgccgtgtgggcatcgcggtgctctggatcagcctcatcaccgagtggctcaacctcatcttcaagtggtttctttttggagacaggcccttttggtgggtccatgagtctggttactacagccaggctccagcccaggttcaccagttcccctcttcttgtgagactggtccaggcagcccttctggacactgcatgatcacaggagcagccctctgg

SEQ ID NO: 11103 - DNA, 405 bp, Homo sapiens
tggttttctgtttcatacatcagagtcaacttgtgaatacatttaaagattatttcattttgatatcacgaagaaaaacaggctttatatctcagactttaactaaatccagttagacctcaatttttcactgtcagattaaatccccatacctgaaaataagtttaacatttttttttgcaaatgatctattgaatcagatttaaaatgaagcatgcattgagtgtgccaaggaactaagtggtccatagcagcagtaatgttcatagggtgcgagatgcctgctatgaaacagcaactctcaaacatttttatctcaagaccatttgtttatgtgagctatatatattattatattaaatattaaatttttaaaatatttatttatgggccaggcacgggttg

SEQ ID NO: 11104 - DNA, 182 bp, Homo sapiens
gattaaaacggaaaataaaataggagcagcttgagttacacatgatgtggtgttgtttataaggtagaaaaaagctgtagcaattacttcctcagggaagagaaacttttcctgatactgggctctataaagtttttcatctctgcctcttcaaattggagatattgggtagtgtggtcatg

SEQ ID NO: 11105 - DNA, 352 bp, Homo sapiens
cttgtttttccctctaccagattatggagagaattatggatctacccactttactgaggcatgcattcagggaaatgttttcagtcgggggccttttctggatgtttcgcatcaggataatactttgtttaatgggagcttttttctatcttatatcacctctagattttgtacctgaagccttgtttggaattctaggctttctagatgatttctttgtcatctttttattgcttatctacatctctattatgtatcgagaagtgataacccaaaggctaactagatgaaaaagaaaacaaaactgagtttactaggatatctgagctaatgtagaacatcaaacagaagg

SEQ ID NO: 11106 - DNA, 406 bp, Homo sapiens
ggactcaccctgcctgccccgcactccctacaggaagtagacggactgagggcacccagctgggagccaggagacctgggctctagtctggcctcctgctgaaaccctccaggggctcctggcccgaagagttagagccagactggacgccctgcactgcccgccctggcctcccggctctccggccccctcctccagctgccgtgcttcctttctgttcctagatctcctgagcgtgccccagggcctcggcacaagctgctgcttctgcagagcctcatggctgtctcatttatttctcaattcaaatgccacctgcctggggaggtccttccagaccgtgcagccccaggaggcagctggcccggagacagcagggccttgacaaagagtcccccctgtacac

SEQ ID NO: 11107 - DNA, 427 bp, Homo sapiens
gggaaattcgagagcaaaccatgagcaagtcagaggccaagtggaagtacaagaacagcaaacctgactccttactgaagatggaagaggagcataagctatataagtcgcctctagctggatgcaaagactataaggtctctttttctttctccaacaagaaactcctcggctccaaggctctcaggcccccgacgagccctggtgagttcggggccttgcagaacttcaaggaggacaagcccaagcccgtgcgggatgagtatgagtacgtgtcggatgacggtgagctcaagatcgacgagtttcccatcaggaggaagataaacgccccgaaaagggacttgtccttcttgttggataagaaggctgtgctgccacgcctgtcacgaagccaaagctggactcggcagcgtacaagaatgag

SEQ ID NO: 11108 - DNA, 422 bp, Homo sapiens
  misc_feature (1)...(422): n = a,t,c or g
ggaaagtcaatagtaagaaatttcatgttaagacagtgttttcgtatattttaacattttacatataaatagtatgctaattgcaaattcattttatttaatgtttaatagtttatgttatgaattcaaggcattttctatacttgtcaataatgaaaagggcatttctccttttaaaaattctatggaagtcagccttcttattccttaggaacatgaactaccgtgggtttggttttgaatctgattgttcaaacactttacaaagtgaataggaaaataatttgggaacatttatatttaaacttgtcaatctatggatctgtttttcatgtgacagccaatcacaatgtgttctcnagaagtttanctcagtatatggattaacacgtgttctacttgngtgatatttcttatgacaa

SEQ ID NO: 11109 - DNA, 453 bp, Homo sapiens
gctattgttccctaaaggattattcattcgttcattcattcctacatcctcccatttattccagtcatccacagatgtttgagtggttacaatgtgccagcctcccttctaggtactggagataaagtgggacaagagaggtgaggtctggacccttgggcactttcacgataaaatacacaggtaaacatttgcctttagggccccctgtgattacttccactcttgcagataagaggataaggcctcttcagcttgtttcacagcagctggaaaagcaaagcctcttctgtcagtaggagggtaaaagattaagaatgcagagtccgatggggcattaccacatgattatgaattaatgcaattttccatcttttatttccaatccaggcattgcttttgaactcagtcatcttttcccccttgccactagttgcttgtgatacatcagta

SEQ ID NO: 11110 - DNA, 5064 bp, Homo sapiens
gttgtcgactgtcaggaccgaagcgcttcactgagcgctcgccgccgcccagcctctcctctcgcgcctcctagctcttcgcagagcaaccaggagccaggagtggtctagagcccgagggtgggaagggggagtctgtctggcttttctcctatcttgcttctttttcctcttcccttcccactcttgttcaagcgagtgtgtgagctatggagcgaagagcctggagtctgcagtgcactgctttcgtcctcttttgcgcttggtgtgcactgaacagtgcaaaagcgaaaaggcaatttgtcaatgaatgggcagcggagatccccgggggcccggaagcagcctcggccatcgccgaggagctgggctatgaccttttgggtcagattggttcacttgaaaatcactacttattcaaacataaaaaccaccccagaaggtctcgaaggagtgcctttcatatcactaagagattatctgatgatgatcgtgtgatatgggctgaacaacagtatgaaaaagaaagaagtaaacgttcagctctaagggactcagcactaaatctcttcaatgatcccatgtggaatcagcaatggtacttgcaagataccaggatgacggcagccctgcccaagctggaccttcatgtgatacctgtttggcaaaaaggcattacgggcaaaggagttgttatcaccgtactggatgatggtttggagtggaatcacacggacatttatgccaactatgatccagaggctagctatgattttaatgataatgaccatgatccatttccccgatatgatcccacaaacgagaacaaacacgggaccagatgtgcaggagaaattgccatgcaagcaaataatcacaaatgcggggttggagttgcatacaattccaaagttggaggcataagaatgctggatggcattgtgacggatgctattgaggccagttcaattggattcaatcctggacacgtggatatttacagtgcaagctggggccctaatgatgatgggaaaactgtggaggggcctggccggctagcccagaaggcttttgaatatggtgtcaaacaggggagacaggggaaggggtccatcttcgtctgggcttcgggaaacggggggcgtcagggagataattgtgactgtgatggctacacagacagcatctacaccatctccatcagcagtgcctcccagcaaggcctatccccctggtacgctgagaagtgctcctccacactggccacctcttacagcagcggagattacaccgaccagagaatcacgagcgctgacctgcacaatgactgcacggagacgcacacaggcacctcggcctctgcacctctggctgctggcatcttcgctctggccctggaagcaaacccaaatctcacctggcgagatatgcagcacctggttgtctggacctctgagtatgacccgctggccaataaccctggatggaaaaagaatggagcaggcttgatggtgaatagtcgatttggatttggcttgctaaatgccaaagctctggtggatttagctgaccccaggacctggaggagcgtgcctgagaagaaagagtgtgttgtaaaggacaatgactttgagcccagagccctgaaagctaatggagaagttatcattgaaattccaacaagagcttgtgaaggacaagaaaatgctatcaagtccctggagcatgtacaatttgaagcaacaattgaatattcccgaagaggagaccttcatgtcacacttacttctgctgctggaactagcacttgtgctcttggcttgaaaggagaacggcatacatctcctaatggctttaagaactgggacttcatgtctgttcacacatgggggaggagaaccctataggtacttggactttgagaattacagacatgtctggaagaattcaaaatgaaggaagaattgtgaactggaagctgattttgcacgggacctcttctcagccagagcatatgaagcagcctcgtgtgtacacgtcctacaacactgttcagaatgacagaagaggggtggagaagatggtggatccaggggaggagcagcccacacaagagaaccctaaggagaacaccctggtgtccaaaagccccagcagcagcagcgtagggggccggagggatgagttggaggagggagccccttcccaggccatgctgcgactcctgcaaagtgctttcagtaaaaactcaccgccaaagcaatcaccaaagaagtccccaagtgcaaagctcaacatcccttatgaaaacttctacgaagccctggaaaagctgaacaaaccttcccagcttaaagactctgaagacagtctgtataatgactatgttgatgttttttataacactaaaccttacaagcacagagacgaccggctgcttcaagctctggtggacattctgaatgaggaaaattaaaataagtgtgtggtcccaagttggaaatattcatgcttcttccttaccctgcgattttgcctgtgtctgaagtggttgttttgtcatgaattcttatgcttataatatcctttgtggcaccttttctttttctccctaaactgtacatgtgaaggggatgagctcaagcaggaagttcaacttccagaattgatcataggtatttcaaaacacatctttcctgtctgcacaagtgaagtgttttgttctttctggagtcacagttgacaaaaagctcttacactacattagaacactgcattagagcccatttcaattctcaaaagaaaaggcaaaacctgggatatcaattaatttgaaaacataatctgcaaagaatgagaaggagtcagaaactgtttctgtagcttgttccctgtcttgtccatgtggttcttcaaattttgatgccaagaaagtatttggtaggcctaatgaaggagttcactgtaagactcattccctagatctttctattccaaagtgccactcattcctgtagtcaaaatctggtcatgttggtcaaaagctggattatttagatctagaaacagatcttgaaatctgaatgctctggtttgagcaattttcgaacattctttgcctggtgcactgtgtctgtggtgccagaggcgtccgtggatccagaggtggttatgactcgtgctgcatgcctggtctttcctctgtttctccttctgaaagttttctatacctgtctcctttctcagccacaaaataaatgttgggagaaatgatatataccactttcccagaaaaaaaaaaacttacacttgggacttggcaaattcctagtcacaatttttttcagcagtaacaggaaaccacttatcacatggagacctaatgtaataatagaaaaatactcataatagggagaaaccaagagaagttttgtttttgtttttttccaactgtgttcattagaacagcgtgttctaagtatttgaaactgaatgtttattccttgatactaaaagttcttctccaatcctatcactgatagtgtccaaattctcaccaaattgctcctaagcttcaaatcagaagcagaaactggcaggccatggaccttaattgtccctcaggtagattttgtttggtatgcagaatgtttttaaaatatgagtggttattgaaaatatgatgtttcacataaaacctcattctcggacccatctttgctcatggcaacagttagctggagctgagtaggcagctgcctgattagatggactctcagtccccatggcaccctgctccatgttacctagagcaggcacttgattccttgctgggcagtatccaataggcatttgattttgcccactcctacactaagcgaatgtgtacaaagtgtaaatgcattaggaaaaacaaactacccgcatcttctgttaggcaggatctgtacaataataattatgagtttgcttatgtaatctcacctcacctggatgatcactaatactaattcatttattactaaccttctggcttccttctctcaatatgcttacaaagtctccagtcacctacaatgctggctttctcccactgagtttgctgtttgcaatttttccatgaagtttgaacttcataaggtaattcatggcattgaactggttcatgaaaagaacactagagtctgtcatttgctttggcttgaagtatggttggtaacacaaattttcacctgctcttctaccatttgaatttgtgtagagggtgtttgcagagcaatgcccgtaatgcttagagaatgttctcctaaaagacttgcggaatcactctgtccttggaagtttcatatattgtttgatatgaagtgttagatagaatttccaatattggagcatatcaaaaagtattaaaactaaaaaggaccagagaattcttagattggcccggaaaggccaataaagagttagaatgaaaactcattacttttccattcccaatctagtgctagatgtataaatctttcttttgattcttcctaacaaaatattttctgggttaaaaccccagccaactcattgggttgtagccaaaggttcactctcaagaagctttaatatttaaataaaatcatattgaatgtttccaacctggagtataatattcagatataaaacagttttgtcagtctttcttagtgcctgtgtggatttttgtgaaaatgtcaaagagaaaacttatatactatttcccttgaaattttaaactatattttctttacaggtatttataatataccaatgcttttatcaaacagaattttaaagagcataataaattatattaaagaaccaaaagttttcctgagaataagaaagtttcacccaataaaatatttttgaaaggcatgttcctctgtcaatgaaaaaaagtacatgtatgtgttgtgatattaaaagtgacatttgtctaatagcctaatacaacatgtagctgagtttaacatgtgtggtcttggtattcttaagggaacttccacattatacatttgatgtattgaccagaat

SEQ ID NO: 11111 - DNA, 353 bp, Homo sapiens
gaaacaaacttgattctggcaatagagggatagaggattaattctttgaagtttttgacatataaaagggattgtggggtctccttttattggaaagacagagaattaacaccttaactgaatccatattgtaataaaccctaggacttggaaacaatgttgcaaatattaagtatcgtataaatttatctctatggaaaacatcttcaacttcattaaatgttctgtatgatgccacttatctatttcatgcacccccataccttctccaaaagttctctagacaatgttgcactgagaccacagagatgggcatttttaatgtcaaaacaaaataacgtagccaggaaacc

SEQ ID NO: 11112 - DNA, 1593 bp, Homo sapiens
ggaaacgcgctggctgactggggtcggcgtttagttcagcgcagcgactcggggacctggagctgacgcctagacacttgtattagctttaatagaagagaaatggaggagccatagaatattaaggatgaattcaggaaggcctgagaccatggaaaacttgcctgctctctacactattttccaaggagaggttgctatggtgacagactatggggcctttatcaaaatcccaggcctgtcggaagcaaggtctggtccatcgaactcatatgtcatcctgtcgggtggataagccctctgagatagtagatgttggagataaagtgtgggtgaagcttattggccgagagatgaaaaatgatagaataaaagtatccctctccatgaaggttgtcaatcaagggactgggaaagaccttgatcccaacaatgttatcattgagcaagaagagaggcggaggcgatccttccaggattacactgggcagaagatcacccttgaggctgtcttgaacactacctgcaagaagtgtggctgtaaaggccactttgcaaaagattgtttcatgcaaccaggtgggactaaatactctctgatacctgatgaggaagaggaaaaggaagaggcaaagtcagcagagtttgagaagcctgaccctacaaggaatccttctagaaaaagaaagaaggagaagaagaaaaagaaacatagagataggaagtcatctgactctgacagctcagactctgagagtgatacaggcaagagggcaaggcacacatcaaaagacagcaaggcagcaaagaagaagaaaaagaagaagaagcacaagaagaagcacaaggagtgagagtataaagagtgtagggggtggttgagagtaagaaaccaggagccttgtgccttgagactcctggaaagactcaatagtgagaatatagcctcccaccccattaacttcgctcccatgggagatggcttcccctcatgcaacaggcaggtttgggagttagaggtcaaaagcagctgccctgaatgagttgttgtttccttatcactcctggtccctttgcaagtgaaccctgcagctcacccattcattcacccaacttccttcattcagcaggaggccctattaccctctccagctgccactgccagagctggattcctgtaaaggagtccaggctagagccacagagactgttgtggaggtgagttcggctgtagttagagtgattggacccttcctattggtctgtcctgggccaactggtgggtgatctctgctgcatccaacatgggagcagagactggcagcaggaggggggaacatggtgagaagtggtgctcacttttcccattcctcctaacatagttctactatgctagaagtggcatccagcggccacagctagaaaacagtctgcagtgtgacttaacttgtgtattgcattccagcagaccactgaaccagacagcgaagccaagatcattgttctactttgtatttactactgtgtgaatcagttgattctacttcaggtccttgcttaaattcctgtcactaaatggaaatgtgtttggtt

SEQ ID NO: 11113 - DNA, 402 bp, Homo sapiens
  misc_feature (1)...(402): n = a,t,c or g
attcagtgtgctttcttgaataccagccttgtttcaactctttaatgagtggactattctctgaagctggccctcagtcttactctgggttcatcaaccaaggtcaagatctgtccacatgcacgtaacaggagcacttttccgagaattgtaaaggagccacggtgcaaagccttctggacctgggtctcatgtgaaaactcagcaatgagnctcctggcctgagatgagcctgcggagcaccttgttacagcacgcatatgatgtatataaaaaatgaacacatgtattccaattacactgatttgatctttacaaactatatggatgtattaaattgtcacatgtaccctcaaaatatgtacatctattatgtatcaataaaataattaacatattttt

SEQ ID NO: 11114 - DNA, 368 bp, Homo sapiens
gcgcatgtggggtcgcctccctgtctgtggtggactgtgtcccagcccctttttcccagcaacagcccctgccggaaggagagcgaactctggggggccggcacagactgcggacacgggctagggccctgcaccctgcccccgcctgcttctgccatgcgtccctgtgtgtctgcatgtggcggtgtcctggtgtgcgggctcctctgtgagcaccagagcgactccatccactgtctgtgtcatctgtgtctgtgcaaatgtaattacttgtgcatcagagccgcctccagccaacacctgaatgtcactgggttggggggaataaaacctgtttggacctgatgatctctttgggggaagaagtg

SEQ ID NO: 11115 - DNA, 369 bp, Homo sapiens
ggccctctgcggaatccgtcaccgaggctggggtggttaacagtcctcttgttggccaagcctgggatcctatttaaaccaagtggattgagagaagtaggggtactggtttcccaaaagaaaattaccaaagaggagacaaagctaggcttgcaaaaatagggtggcccctagtggcagcccccttcccccaaattgcaggttcggcttcttggagcaggcacttaactgggtattttaggtctcaggctggagttatctgtaccccacactctcctccagcccagggcttgagtgtgtctctccctgtgcctatcctgaagccctctgtctcccaggtgacaccgggtctaggagtggtggccgttc

SEQ ID NO: 11116 - DNA, 249 bp, Homo sapiens
gtggttcttaaaattttgatcttcttcccctatctgcctgctactgtttacttttcagagtcctcaaatagctgcttcatgtattctctttggaatttatagctgcattcagtggaagcgagactggagggtgtgttcaggccatcttatccagaaccaagctttctagtccattttaatattttgtgctaacaaatatctatacatacataatacatataatacagtgtaacatatatgcaaaaaaaa

SEQ ID NO: 11117 - DNA, 233 bp, Homo sapiens
  misc_feature (1)...(233): n = a,t,c or g
ggttgtgaacattttctgctgtcaacatgtttctggtttttgtaactgggaactttcttgcacatctctagtacacacgtagaaggatttctctagagtatgcaaccaggactaattcccgtgggtcataggtactgcaaatattggacacaaggaatacaaactgttttttaaagtctttgtaccaattngtaccccatcagcagtgtataaaagttcccattggttcactt

SEQ ID NO: 11118 - DNA, 373 bp, Homo sapiens
ggaattttcttggaggccgaggccctgcgcctctgtctgcacccaaggcgaccgcccagcttacccccggctcttctgagcacagggaggcctcccagcaaagcctgaaccctctaagtttagctgcaggcttcgaaccccgaccgtccccgccgagccttgggctgctgaggtggggatgaactgggcgaaagacacttgggagttaggaagaaacaaacaagcagggaagtgaccaggagacaaggtgagactttgcccggctcaggtctgaactgagtgttggagataaccacagttaacaaaattaaacaaaattcttcgcccccgtggagctgttagcaaccctggtgcctgggaagccctgaagagg

SEQ ID NO: 11119 - DNA, 279 bp, Homo sapiens
ggcaaggatggactttttccccttgtgagaggtttgatacccagaaaatgagctcaaaacctttacattagggttgcttgtaggaactggagcctggaggctgcatctacttcacctgtcactgctgagggagaggaggggagaaaggcccagcaacagcgtacagaggggtcagtcagcaagtccagagagcacatgcagggagatgtttggcccacaccgcacagccccgccatctccagtgggcgatgaaagatgtaggaaaggttgatttcaaga

SEQ ID NO: 11120 - DNA, 1880 bp, Homo sapiens
acaatggaggcccatggagggattttccaggcccctattcctgatctccatggtggcgctgcttcccttattctgcagtcttgctttgagaccagacaattctgtactctgtctgtgccttcttccttctcagcagccctgcctctgccacctgccccagaagggctctgggtcctctcatctcaggacagacaagggtttttgtaattatcttcttgggtaacctccctgtaaggaataggagaggttatctggtcctggtcttttgggagagcattgagaagaaaaagttaaaccagtgggcagcccaggctgcatacatcctgggaatattgcgattattctctccagtaatctacggaaatctactggttgttctgcagaaaaagaattaagagagacaaggagacctgttgtctaagactaaggcaggatgacgtttacctagtaactgatgatgctaggctgaggcactcagtgatttgtctctacatttgtccctgcctacctagccaatctgtccctgtttgggacactggactcccgtgagctggaaggaacagatttaatatctaggggctgggtatccccacatcactcatttggggggtcaagggacccgggcaatatagtattctgctcagtgtctggagatcatctacccaggctggggcttctgggacaggcgaggacccacggaccctggaagagctggtccaggggactgaactcccggcatctttacagagcagagcatgatcacattcctgccgctgctgctggggctcagcctgggctgcacaggagcaggtggcttcgtggcccatgtggaaagcacctgtctgttggatgatgctgggactccaaaggatttcacatactgcatctccttcaacaaggatctgctgacctgctgggatccagaggagaataagatggccccttgcgaatttggggtgctgaatagcttggcgaatgtcctctcacagcacctcaaccaaaaagacaccctgatgcagcgcttgcgcaatgggcttcagaattgtgccacacacacccagcccttctggggatcactgaccaacaggacacggccaccatctgtgcaagtagccaaaaccactccttttaacacgagggagcctgtgatgctggcctgctatgtgtggggcttctatccagcagaagtgactatcacgtggaggaagaacgggaagcttgtcatgcctcacagcagtgcgcacaagactgcccagcccaatggagactggacataccagaccctctcccatttagccttaaccccctcttacggggacacttacacctgtgtggtagagcacattggggctcctgagcccatccttcgggactggacacctgggctgtcccccatgcagaccctgaaggtttctgtgtctgcagtgactctgggcctgggcctcatcatcttctctcttggtgtgatcagctggcggagagctggccactctagttacactcctcttcctgggtccaattattcagaaggatggcacatttcctagaggcagaatcctacaacttccactccaagtgagaaggagattcaaactcaatgatgctaccatgcctctccaacatcttcaaccccctgacattatcttggatcctatggtttctccatccaattctttgaatttcccagtctcccctatgtaaaacttagcaacttgggggacctcattcctgggactatgctgtaaccaaattattgtccaaggctatatttctgggatgaatataatctgaggaagggagttaaagaccctcctggggctctcagtgtgccatagaggacagcaactggtgattgtttcagagaaataaactttggtgga

SEQ ID NO: 11121 - DNA, 1956 bp, Homo sapiens
ctgcacagagacctcgcaggccccgagaactgtcgcccttccacgatgtggctccgtgcctttatcctggccactctctctgcttccgcggcttgggcagggcatccgtcctcgccacctgtggtggacaccgtgcatggcaaagtgctggggaagttcgtcagcttagaaggatttgcacagcctgtggccattttcctgggaatcccttttgccaagccgcctcttggacccctgaggtttactccaccgcagcctgcagaaccatggagctttgtgaagaatgccacctcgtaccctcctatgtgcaacccaagattcccaaggcgggggcaagttactttcagagctatttaacaaaccgaaaggagaacattcctctcaagctttctgaagactgtctttacctcaatatttacactcctgctgacttgaccaagaaaaacaggctgccggtgatggtgtggatccacggaggggggctgatggtgggtgcggcatcaacctatgatgggctggcccttgctgcccatgaaaacgtggtggtggtgaccattcaatatcgcctgggcatctggggattcttcagcacaggggatgaacacagccgggggaactggggtcacctggaccaggtggctgccctgcgctgggtccaggacaacattgccagctttggagggaacccaggctctgtgaccatctttggagagtcagcgggaggagaaagtgtctctgttcttgttttgtctccattggccaagaacctcttccaccgggccatttctgagagtggcgtggccctcacttctgttctggtgaagaaaggtgatgtcaagcccttggctgagcaaattgctatcactgctgggtgcaaaaccaccacctctgctgtcatggttcactgcctgcgacagaagacggaagaggagctcttggagacgacattgaaaatgaaattcttatctctggacttacagggagaccccagagagagtcaaccccttctgggcactgtgattgatgggatgctgctgctgaaaacacctgaagagcttcaagctgaaaggaatttccacactgtcccctacatggtcggaattaacaagcaggagtttggctggttgattccaatgcagttgatgagctatccactctccgaagggcaactggaccagaagacagccatgtcactcctgtggaagtcctatccccttgtttgccattgctaaggaactgattccagaagccactgagaaatacttaggaggaacagacgacactgtcaaaaagaaagacctgttcctggacttgatagcagatgtgatgtttggtgtcccatctgtgattgtggcccggaaccacagagatgctggagcacccacctacatgtatgagtttcagtaccgtccaagcttctcatcagacatgaaacccaagacggtgataggagaccacggggatgagctcttctccgtctttggggccccatttttaaaaggagggtgcctcagaagaggagatcagacttagcaagatggtgatgaaattctgggccaactttgctcgcaatggaaaccccaatggggaagggctgccccactggccagagtacaaccagaaggaagggtatctgcagattggtgccaacaccccaggcggcccagaagctgaaggacaaagaagtagctttctggaccaacctctttgccaagaaggcagtggagaagccaccccagacagaacacatagagctgtgaatgaagatccagccggccttgggagcctggaggagcaaagactggggtcttttgcgaaagggattgcaggttcagaaggcatcttaccatggctggggaattgtctggtggtggggggcaggggacagaggccatgaaggagcaagttttgtatttgtgacctcagctttgggaataaaggatcttttgaaggcca

SEQ ID NO: 11122 - DNA, 1232 bp, Homo sapiens
  misc_feature (1)...(1232): n = a,t,c or g
atgaggtggccaagcctgcccgaagaaagaggctgcccgagatggcccagccagttgacccggctcacaatgtcagccgcctgcaccggctgcccaggggattgccaggagctgttccaggttggggagaggcagagtggactatttgaaatccagcctcaggggtctccgccatttttggtgaactgcaagatgacctcagatggaggctggacagtaattcagaggcgccacgatggctcagtggacttcaaccggccctgggaagcctacaaggcggtggttttgggggatccccacggcgagttctggctgggtctggagaaggtgcatagcatcacgggggaccgcaacagccgcctggccgtgcagctgcgggactgggatggcaacgcgaggttgctgcagttctccgtgcacctgggtggcgaggacacggcctatagcctgcagctcactgcacccgtggccggccagctgggcgccaccaccgtcccacccagcggcctctccgtacccttctccacttgggaccaggatcacgacctccgcagggacaagaactgcgccaagagcctctctggaggctggtggtttggcacctgcagccattccaacctcaacggccagtacttccgctccatcccacagcagcgggcagaagcttaagaagggaatcttctggaagacctggcggggccgctactacccgctgcaggccaccaccatgttgatccagcccatggcagcagaggcagcctcctagcgtcctggctgggcctggtcccagggcccacggaaagacggtgactcttggctctgcccgaggatgtggccgttccctgcctgggcaggggcctccaaggaggggccatctggaaacttgtggacagagaagaagaccacgactggagaagccccctttctgagtgcaggggggctgcatgcgttgcctcctgagatcgaggctgcaggatatgctcagactctagaggcgtggaccaaggggcatggagcttcactccttgctggccagggagttggggactcagagggaccacttggggccagccagactggccttcaatggcggactcagtcatattgactgacggggaccagggcttgtttgggtcgagagcgccctcatggtgctggtgctgttttntgtaggtcccctggggacacaagcaggcgccaatggtatctgggcggactcacagagttcttgg

SEQ ID NO: 11123 - DNA, 741 bp, Homo sapiens
aattcggcacgagaaagcacttttcctatgtgtaataacactcgatccagttctgagttgcattttgtggtctcagaatagttagcctaacctgccttcagtcttcctgctagtgagaggagtctggactcccacccagatttccagatcctaaaatgaatgttccttttgctacactgcagtttgcaatttccatcttccaaatccaggagtattttgggaaggttttgtttttctgacgtctgttccacaagagcagagctcatgaatggccatgatttaattccccaagtctctgctggagccttcccagctgtcatgaggttgagtatggctttatcatcatgaaacaagtcatcagagtctttgaatcttgcgtaggaattggaagtcggggtataccaggataggttttcagcaccaggtgtggcactcaccctccggtatgcttggcagagtttgtgaagcggctccggtactgcgaatacctagggaagtatttctgtgactgctgccactcatatgcagagtcgtgcatccctgcccgaatcctgatgatgtgggacttcaagaagtactacgtcagcaatttctccaaacagctgctcgacagcatatgggcaccagcccattttcaatttgctgagcatcggccaaagcctgtattgcgaaagccaaggagctgggacagagttgaaggaaattcaggaggcagctcttccatatcaagaagctgttgaa

SEQ ID NO: 11124 - DNA, 249 bp, Homo sapiens
gggagaccacaacccccacacatgtcgttggttcaggtcgccctgctttgcctgcctaatggagcacatcttgctgccagaacctcactggcctctgggggtcggcaggtgcagagccacctgggacgcctggagaccacctgggatgtttcctctgtgactgggaatggccttgacaacagagtccagccaagtctacgttattttctcatctcctgacaacactggatgtcatatttattagtcagc

SEQ ID NO: 11125 - DNA, 234 bp, Homo sapiens
  misc_feature (1)...(234): n = a,t,c or g
tgacttggataaaaaagcaagaaccaatggtatgctgtcttcaagagacccatctnacatgcaatggcacccttaggctcaaagtaaagggatggagaaaaatctactccacaaacaaaacagaaaaaagcaaaaggacnnnnnnnnnnnnnnnnnnnnnnnnnnnnnnnnnnnnnnnnnnnnnnnnnnnnnnnnnnnnnnnnnnnnnnnnnnnnnnnnnnnnnnnnggtggtc

SEQ ID NO: 11126 - DNA, 381 bp, Homo sapiens
cccatgcagtgtcagaacagcaacgtgatcctcttctgcgacatgtgcaacctggccgtgcaccaggagtgctacggggtgccctacatccccgagggccagtggctctgccgccactgcctgcagtcgcgggcccggcccgactgtgtgctgtgccccaacaagggtggtgccttcaaaaagacagatgacgaccgctggggtcacgtgggtgtgtgccctgtgggatcccagaggtcggctttgcaaacacggtgttcatcgagcccatcgatggggtgaggaacatccctccagcccggtggaaactgacatggtaacctctgtaaggagaaggggcgttgggtgccttgcattccagttgccaaaggaaattgttac

SEQ ID NO: 11127 - DNA, 696 bp, Homo sapiens
catagggctcggcgtggtgaactcacgacaggcctggggtgggagcacagacacgccggcctgtgactaggcagcagggtggcacagggcagcaggttccacagcggacagccgcctgccaccccctgtagttcacacaccggcgggtgactcgttaagtaaatggaaagggctttcagtaacaatggaccacctctgcagcgaccaactgcatggactccctgttctgcgccacgaaagaaaggtggttagcgttccgtgtttcgctttgacaaatgcgcattcacatgacagaaactcttccatgcagaaagatcacctgttcatatttctctagctcagagtggtaaatctgtcggatctgggacagcttggccctgtagtcagagtgctcaatgctattgtcatttggacagccacctggtgttgctgtgccggccctggccaccgctcctcctcttcctctcttctcgggcctgcacacgccctcagccagcagcatgttatccagcctcaggagctgggcgtcagggggatcttcgtcttgaatgccacggatgcttaccactagataagagagaccgggacaagtcacaattcattttctggagagaaaacaaaccatgagaaaatgtgagcactggtgttatgtctgaaaatttttgcatagaacccttcgggagaaaggaatactcc

SEQ ID NO: 11128 - DNA, 269 bp, Homo sapiens
taaaacacagtcttgaacttatctggttaagtacaaggtgctaaaggtgccacttgaccatcctaagcctcctcttcttttccccatttctcactttttaaaaattcgaatttattttttggtgtaaagcttaatagcatgggttttaacatttttgagggctgcttttcattcagaattttcaccactcttcatcgcagcagttcctggagtaagcatggcttcactaagggaccgaggccacagtgagaattaatatttattttttg

SEQ ID NO: 11129 - DNA, 368 bp, Homo sapiens
cttttgttttcatggaaatcattctgattacagtgctgatgtttagaaataaatagcagtgtgactgggaaagaggaattgcagttgtgggggtgtgagcctggcagcagccagccagcagcctctcccaggcgggagtctaccatccgagacggcgatgacaaagagcttcattccacattctttgttatctctacttcccaccctcttggcaactacagagcagtgtgggcagccccaagtgtggtccccagagagcgtttggctttcctgtctgtctatcctgagcgggtggagtctcaggttgtgtgcccctaaatcaagatttgcttccacagaagccattacttgcaatttttttttttttt

SEQ ID NO: 11130 - DNA, 350 bp, Homo sapiens
gtttcttaatgaggattaataccttttcaatgtttatatagtgaaggacaaatataaaaaccaagactatcacccttctgtgccctccaatacttttgtagagttggctgttctaacacctaaagagcctagcgacactgctagttttaagccatctcatgagggacctttgtcgcattaggttacaacttgtgccaaaagaactagagggaaaagatgcggcctgagccacacgctactgtaagggccggagaggaaagcaggccttggctacggcttgttcctgggctgtttttcgtaggatggatttcatttgtcagtcctgcagcgtggcacacttaagggaatgg

SEQ ID NO: 11131 - DNA, 1134 bp, Homo sapiens
ttaagaccacagaaggctgaccgttctgtttaattatctgtaataatccttaaaaatcagcacacaaatccattccaggtagctttgccaccccacctgctgtggtggcatttgtccagatgccaccacccccctaagagtgggtcatcctgggggagcaaggcctgagaaaggaaaggaagggaaaggccccctagtgcctgccccacagccctgaggaaggcacatatttagcctgggcctgagacagggacaggaaggggccacagggctgagtgcagggacaaaggggtcagggtcccaagtgtccgggcccccagcttacccaccccatgtcttgtttttggtttttgtcattaaaaaaaataaagtgacaaatactgggtggagacccagttgttgcactgtcttctgttaaaaatacggaccaagggcatagaaagtctcctcttcagcaggtcctgcttcacaggatgtctgcccgcttgtcccgcacacggcttcgagccttggtccgggctttgaaggcagcagcattgtacaggtgcttctcaaagcgtggaaccttgcaggccttcagggcagtggcatccagcaacagcacagggcccaggccaaagatgtcacggagtagctcattgttctggaggtggtggtgcatgcccgaacccagcacttccttgaaggcagcgtagatccggtgccgagcccagctgtccatgtagagcacctcaaagccgaagcgcactatctcttcttcgcattcaccgccctccacggagtgcagcacggcgcggaaagtagagcgctggcgccgacgatcagccttggcacggtacttgttactgtcagtggccagagtgcgcaggacactgcagagggcctccatgtcctcgtaaacaaactcctcctcaaggtcccgggcaagctcaaagagcagtgcaatggtttcaccggcagcgatccgcaggttcacactttcactggacaagagctggggcagccggggcagctgcctgtcaaggatgtggctgatttgggtgctagggcagatggtgagcagcaatgcccaggcctgcagggcagcagagagcaggccgtgcaggctggcaggaaccacaggacttgtggagc

SEQ ID NO: 11132 - DNA, 1153 bp, Homo sapiens
ttttttttttaatgagaaattcacttacaaaaaaccaactggctcaagtgaatgggatcaaacccaacttgttataaggtcattagtatcaagaattcagatacagagtctattctaacataactgtttttaaaaaatttttgaacttcaaaaatttccagtcactaaataaaatgcattcaatttaagcccagattgcttcccaagccaaacattctttatttaacacttcagtccgctttctgagatttcttggtacctgctctttagcatcttctttaaccttagctcatttcaaatttttccatatgtgctatctgtgcttaacatttatgcatgtgatgttcatatatacagtggagtccacactgtgggttacctggcatcataatatagagctcggcaagctatgtgtacattatgtattgccagtacagtgatttaatatgtaatatcatcattattaaataactatgatttatcaaatagatattacatattatcacataatatatcaaatatatacagatgctattatgattaataagtttactaaaatggaagtcttttctcactgtgtattgtctgaatcaacagacactaaaaagatgtgcagtgtgtcaaatattagaagtggttggttcttattctcaaacagactgtgggaagcactatgacagattttctttccactgttaaatgcaatggaggttttacttggcaacagggccattgattccatccaggtcccatgtatttgaacacatttactcccaactaatttaatgatgtaaattctaggcatttacctatcttcatccagaaattagctacctgatctaggactaaaacacagcttgaaatataaaagctagtgcgcaacatgggctctggtggctaggttacacattgggtccaaataaagctgtgtggacggaaggcttggagtggcacgaagaacttagcaatgactactaagcagtctgatattcaggcagaacctgcactgtctactatgggagccattcactacatgtggctatcaagcacccaaaatttaactcgtctgaccggcatgttctaagtgtaaaatacacattggatttccaagactttgggcaaaaacattttaaattacatgtggctttgattc

SEQ ID NO: 11133 - DNA, 349 bp, Homo sapiens
  misc_feature (1)...(349): n = a,t,c or g
ggtggaaggcgccatcctgcctgccacaggaagggccttggactgagaggaccggagctgactggggattattcaaagccaaaagccaacagagcccccatggagaagtggaggatgctcagatactgctatggagccctgagaagtgaaatgggtccaagcccttgcccaggatagagcgctccaagcgcatcctccggggacccttttaatcagtgaattgttcacctctcactgtttcttcccagcagagtgaagcagacttcttagagcctcttgtggatggtcagcgatagccctggtatgaccagggaggtgcgattctgtctaggccctcancnnnnactaa

SEQ ID NO: 11134 - DNA, 1278 bp, Homo sapiens
  misc_feature (1)...(1278): n = a,t,c or g
gcagttttggaaaagtgagctctcggttctgctctgagatggtcagagaagatgcgggccaggagacttactcaggtgggactgggcacagggcaggtatgtgggaggctgggctgcttagtgtcttctagtcacctctgcttgggctgattgacagaggtcagtcattacagccccttatgcctcttccatgggaacaaatactgtgcagatgtttgtaagttaaacataagacacaggggctgttgcttttgaacagaaccctatattactctcctgggatctgagtttctgcaggtcatttgtatgtaggaccaggagtatctcctcaggtgaccagttttggggacccgtatgtggcaaattctaagctgccatattgaacatcatcccactgggagtggttatgttgtatccccatcttgggctgggcttcagtttttgctgtagccctagagcactttgtttgtgggaggctggcctcttgcctacctccttgcatggacagggggatgaatatttactttcccacctccttgctttttctttcactgataccactgaatggaactggtgctgtgactcctgctgctggggatttatgtcccgagaccttaggcctggctgagtggagcctgagacctgcacaacagctcatggtcatgcatgagagagaagtggctggccacagcagacgggaacagtaacagcccagggnctttattttgggaaaggctgtccggggctgttactgtctcttctggttataaagcagacatgtggccatcttttccgcagggttaagagtgggctcctttctttttgggaatccttttcttcctccttttggtagcagctccctgcctccagggcttccgccaccagcgtctctgctgtgttgcgcagtgccagtgggggtgcaagggctttgtttctgcctgcctgaaagaaagggcctctgggggatggagatgagaaacaacacgctctccttcagacaatgaggcattctgtcctcctgctgcccattcttcatctccactgagagcccagagtctggtaggagccgaagttgccacaggcattctgcattgctctactcttaggtttgtgtgtgtganccttcccctgccctgtcgcccactcctccctcctctggctatccctaccctgtctgtggggctcttttactagccagcctatgctgtgggactgtcatggcatttagttcagagtggaggggctttggtcctgaaataaaatgcaagtatttaaaaa

SEQ ID NO: 11135 - DNA, 428 bp, Homo sapiens
gcttcccgtcccccgcctccctcactccccgcccctctgctgtgaggacacagcctgagcgcagcctgtcctccacaggtagatgatgagctggagatcaaggcctactatgcaggccacgtgctgggggcagccatgttccagattaaagtgggctcagagtctgtggtctacacgggtgattataacatgaccccagaccgacacttaggagctgcctggattgacaagtgccgccccaacctgctcatcacagagtccacgtacgccacgaccatccgtgactccaagcgctgccgggagcgagacttcctgaagaaagtccacgagaccgtggagcgtggtgggaaggtgctgatacctgtttttcgcgctgggccgcgcccaggaagctgtgcatcctcctggagaccttctgggagcgcatg

SEQ ID NO: 11136 - DNA, 1068 bp, Homo sapiens
tttttttaattgactaatacagataaatttattagttaaatactgattttccagccatttcaccttaagacaatgttaacaggtttgtgggttagggagggtatacgagggggcctttggaagaaaacaatgtaaatgatgattaaaacagaatcttggttcaaaggtattctctgctacagccagtaggattttggagtgaggggtctgggcgtgtggggaggcgtagtaatgccacagtcagctacagctctgctgagaaagaggaaggagtctccatgagctccagcatcaggggcagaaacagcaatgtgcagaggagaacgcggcagattcccggagcagctcagagtcggaggctccctccaggggccccctgcccgtgtcttagcagtcgtcttctttccaggaattctgttgtgttgtgtttgtttgcttcgaattcgtgttgcagaatctctggctttttgcctccctggacaaaagacttctgccggggcgaaggctgccaggtcctgagggactctggctgccatctgaccaagggctaggaggagcagacagacagcaggtgggccagcccttgggacactcctgccccctgaccaggactctgtccacttacactctccccagaaggacctcgaggctgggctgagtgcttgccagactggcttgagcagcagaacgttttgttcttactcagaacccctctatgtgtgacacggtgaacgaagggtctgcagtgaactcgagggggtgccgtttggctaaactacccagctcttgttttgccaggggagagacatgtacaagctgcgggcagagctgaatcgctcagagcgggaagagggatttttattttgagagatgttggaagtgaaggagcaaaggccggcagcagggggaaggcacctgggggagaagttgcccagctgcattttgatgaggtgcgctgtggtgggttaagtgcccctctagctccccaggaagtgttcagtcacttgtgtgtcacaccccacaattttggagtcagatttggtattagggatgcaggcggtgccatgc

SEQ ID NO: 11137 - DNA, 415 bp, Homo sapiens
  misc_feature (1)...(415): n = a,t,c or g
gctgatccccagggcttctgtgggaaggacgtgggcagaactacaagtctccactcaccctccaagacctaaaccccaggtggggggagagaagcagaggacagagagccctgctggatacagagtggagagtatttttctctttgcttctaaagagccgttcaggacaaggacgctgtctagagcagaatgttcaagctgaggtcacccaggaccaggaaggagcaggcagaggtgctgccaggctgtgtgtgtctgcagtgccccacgggtagagggaggcatatagctgccttcccaccaagcaggcgtcanngtntgnngngcggnatngatacagctctggaggggcaccnggattcctcctctanggntgcaggatgctcncnaactttnnnagcntataacnnntgtt

SEQ ID NO: 11138 - DNA, 76 bp, Homo sapiens
cagcccaaagatatattttacagagaaagacattggtgtacaaagtctaaactttaggtggcttgttaacaagtta

SEQ ID NO: 11139 - DNA, 480 bp, Homo sapiens
ttgtaaattatttaaaattaaacttcgatattgctccaaacaaacatttaaaaggtaatgttttcacatcataaagcagattcctgcctcgttatcaagttactcagctccattcctcttacttacctaccacaagcaaaaggcctttttcctgctcagcaatattggaggtaaaccctagagtctctcctccccttcagtatttcactaaccagggtgtcagaaaaaacctgggtttcacagggtatgctgcaaagaaggatgcattctatccctaggctcctgccctctgccagaccaggcaggatccatgcctttcccttcggacttcggcgtggagcatgaccaaaaccacgaaagtctgcagctcctaactagagtacctttcctgtaggaggtgttacaaccattcctggtgctggactcttcttcctcatggtcaatgggtacaattaagccatgcaataaaaagtttggttt

SEQ ID NO: 11140 - DNA, 392 bp, Homo sapiens
gatcattcttgtgttttagtctttgccagactcaaagtgcctatatttcatcccatgagtctgcaaacctgctttgtggtaacctgcctggctacttgccattcattaactgcttcttgacccatgttgattccctctgtcacttactctgaaaagacctgttagaaataagcttgtgatctgcttgagactttggcaatactggtttagccagaatagagaaatccttaagtagcacagcaatcctttctgaatcttctatttgtttcttctttgttctctgtgtctctcccacctaacatccctctccaatttaagtaatcaaaatagaaagaggggcccaggcaaggtggcccacgcctataatcccaaagtgctgagattacaggcgt

SEQ ID NO: 11141 - DNA, 347 bp, Homo sapiens
gcctcatataaccccaagaggtaaattagtataattatccttcattgtaggtgacaaagttgagacacagaagaatcaaaaaactcttccaggatcaaccagtaaaaggcagaccttggattcgaaccaggcaacctggctcaaatatcagttttaattactacactctgtactttccaagatttgtaaacagtttgacaatgcatgccgatttaaaactatgaagaaacaaacacaatttttcacaacacctctcaaatctaatgggtcctcactgtcaagattaaattccaggctgatgacactgtaaggtcacatggccagctgtgctataggcctggtcaagg

SEQ ID NO: 11142 - DNA, 322 bp, Homo sapiens
gatcttgtttctacttcttagctggagctgtgaagttaaaccgacaacagagctgatatggctgttaattgggctggaggattacaacatgctaaggaatcaggagcatcaggattctgttacgttaatgatattgtgcttgccatccttgaattactaaagtatgttaatttatattgatactcttttcagtgataaagtgttttcattaaaacacaataaataaagtctatggctttaaaaaatattaggtaaaccataggttgaaatagttaatggtgaattttctatgaattcattacaaaacaatgaagaaatgcag

SEQ ID NO: 11143 - DNA, 423 bp, Homo sapiens
ggtctccaaggcagttttcatatgaccatgtgtatattcactgctcacgaaaaagtttaatgttagattaccaaatttaatatagttacagaattactgcataagggcttcccttcttggagactcttacccagcatgggaacagtgatctgcccacatgacagggtggtatgccaggcatagttaactgcttttggttgtgaggtactcatcttcctttagttacccttagttatgtggcacacatgtccttattgcctagttcgtcatccacactttggatcttgtgaaaatgctgttagtatccaaccttaaaatatattagtatatgggtttttattaaaagaattactttgaattttctatttaattcatatgtaaataaaggaacatttcatttcacttaaaaaaattatatcagtt

SEQ ID NO: 11144 - DNA, 414 bp, Homo sapiens
gacagaagaccatgtgcttcccgagctgaataaggtaatgactcagaaagatatcacatttgttgctgaatttcttactgaacatttcaatgaggctccagacctttataatcgaaaaggaaaatactttaacgttgaaagagttggtcagtacttgaagatgaagatgatgatcttgtgtcaccccctaacacagaaggaaaccagtggtatgactttcttcaaaatagcagccaccttaaagaaagtcctttgctgtttccttattatcctcgaaaatcattgcattttgtgaaaaggcggatggagaatattattgatcagtgtttgcaaaagccagcagtaagtttgaaagaaatgcatgtctttgtgtaggagcaatagtgtctacagtatgtggctcacttatgtaaa

SEQ ID NO: 11145 - DNA, 257 bp, Homo sapiens
ggcacgagatcttttttatcctcagttggaaaagtgtctgttttcttttaattataaagatgctgcatgctcattacaggaagttctaagagtatcaaaaagtgtgaagaattaaagattaaccaaaattctgggaaaagattgttataacaatgttgacaggcatttacaacaaagcataacattattctttgacattatgctttgttgttgtttttaacaagctatatctagcttcctattattttcattttgaa

SEQ ID NO: 11146 - DNA, 430 bp, Homo sapiens
gcatgtttttattgctgcagccttggcgaggaatccagaagtttcgggttggctttgaggtagccattctgttgtctgcacatctaacgtgcattcccatgcctgtttaaggtggacttttaataatctaaatggccccagtagaagacatttcagtaaattggggaatgcctatacaatgtaacagcatgtagccatgtcaaagtcccgttgaggaagaatacttagtgactgacatggtttgcacctgttccctccaaacctcatgttgaaatgtggcctccagggttggaggtgggcctagcaggaatgtttaggtcatgggggcagatcccttatgaatggctttgtgtcgtcctcacagtagtgagtgacttctcactttgttaagttcaggcagagttgggttgtttaaagagcctgggaccac

SEQ ID NO: 11147 - DNA, 256 bp, Homo sapiens
ggacacaagcagcctctgcaggtgtgcgagcaggattgcttctgcaacaaaagcctccacccagccacatcttgtgaaaagaatggccacttcttggggcacagtctttttcatgctggtggtatccctgtgtttgcagcgctgtctcccacaggaaccagcagacttggtttgagggtatcttcctgtcttccatgtgccccatcaatgtcagcgccacgaccttgtatggaattatgtttgatgcagggagcac

SEQ ID NO: 11148 - DNA, 674 bp, Homo sapiens
tttttttctctcttttataggggaggtgggtgcagataagggtgggcagggcactgtatagggaggaaaaaaatactgatattgatgggtcttgggattgcaataagtcagtttaccatttaagaggaaaatttaaatattcagtggaatgaggcactcaaagggttgaaatgcgatttttctttggtttccagggacctgtccctgggctctcactccaaggttaagttccaaaactatactttttggctcacagggctctctgtgatgctctggtgccagctgtgtactcttgagtggttaggcagcagttcacattagatgtgtaaaattaattaaacctaaatctctaggctcaagtccaggatgtccccagactagttcagaaactaagtgctctctcctccccttaaaaaggtgttggcaaatgcaggtctccaaggaagtacgtggcctcaatgggagatgcccagagacttgcacaggtgaaaggtggcccccaaggcccagcccgtctctatgttgttcactttctttgtgagctgttgagaagaaaaaaagtcttcaccttttcatccagtttccaactctagcaagcacagctcttgggcagaaaatattggcaaagaatatccacatgggcaaaccaaggcaaaacggacagaagccagtcc

SEQ ID NO: 11149 - DNA, 263 bp, Homo sapiens
  misc_feature (1)...(263): n = a,t,c or g
cctggcctggtcatttctcttgctgtgcccaacctgccattaatcccatccatcctgagcccgacgtggtcctttccctcaccacccagcctaccgcccgacgtggtcctttccctcaccacccagcctaccgcccgacgtggtcctttccctcaccacccagcctaccgnccgangtggtcctttccctnaccanccagcctaccgaccgacgtggtnctttnccttancacccagcctaccgnaccgacgtggtcctttcc

SEQ ID NO: 11150 - DNA, 351 bp, Homo sapiens
gagcttattaaatatgtatatttgaccacccatttagcagaaattcctattttctttgcctctctcttgaagtgtctgtttctagacttcacctctcctactcttcagtgcacatgtgtgtatgcatcctgccatctcaccactgtcagtgggagcacaactctcagtcccacccctactaacatgcaggcaccccaccatgccaccagggacgggcatgaatgctgggcaacactgtctctgccaggcaaacttacccctgctatggccaccactggcaatcatgtggcaaggaatgctttccaccccactcccattggtgccccaccaaaggccaatggcacatgcacc

SEQ ID NO: 11151 - DNA, 341 bp, Homo sapiens
gagcaccatgagcgagctgcagcagctgcagaatgaaaagtgccacctcctggtagagcacgaaacccagaaactgaaggccctggatgagagccataaccagaacctgaaggaatggcgggacaagcttcggccgcgcaagaaggctctggaagaggatctgaaccagaagaagcgggagcaggagatgttcttcaagctgagcgaggaggcggagtgcccaaacccctccaccccaagcaaggccgccaagttcttcccctacagttctgcggatgcttcttaacaaccgcccggggctgtggctggcagcttggtgggccccagggccttctccttca

SEQ ID NO: 11152 - DNA, 367 bp, Homo sapiens
cccagctttgccattatgagtgccttctccatactggtaaggtggacacctggtcttggtgatgtaggtgttgacactcaggagataaagagcctggtggaagttcgccaggggtcttttctgtcccccacgtagtccctcatgagctccttggtgggcacagctatgccttagactgcttctgggtgttcccaccccatcacctctccccactcaggcagaacccgttaggctaggatgcccagtaagtttgagataaaatggagttggcttgcaggtagggagttacaggaagagggcacgagcaccagggcttccctgttgccaaaatacacacaggaggaaggctgcctgggtttcagctggc

SEQ ID NO: 11153 - DNA, 938 bp, Homo sapiens
  misc_feature (1)...(938): n = a,t,c or g
tggttatacatggtatatttgaatcaaaatcactaaattagagttgaaaagcatttcatttttttctagaaaggaggcttaaaaaaagaatttcacatgattcaatcctctcattttaagtggggaagcatgcacaggacactgaaggattcatccaaggtcactcatgagaacactggcggaaccaggagtacaatgtaagaaggactggattcccatgttctgtttcctaatattagctgtctttgctttgctttcagcatttatgatttttccccttctttctcccttagacttctccaagcggattataccatccgagactcttttccgaagggtggggaactctgcccagacttcattgtctattttccaattgcaactttccccaataacgatttatccaaacatctcaaattcatgtagataactctgacagcaaataaaaggtacacattttataaagtaagttataagtgagatactgccaagctttatttcaaaaaccaggctctagtttccaatctaagaagtaaatngctttctgcctgtttctgcctttcctccctcactcaggagagaggcccaaggctgtgtcttgagggattgcttcataaggaaaaatcaaggcagggcacagtcccaggatggccagcatgggttggaagtgagcttagcagaaggctctgggaaaagggaactggattcatgagcaggctagttcagtccccagagcgatttctctccattggaaacaggtctgagtgctgacacgggggtttcccacagcttctgctggcctccaaaggcatatttgtcatcagaggctcttgatgaagctgtacataaatatctgactgttgttaaatgcaaaacaaaacaaaacaaaaatattccacaggaaccaaatcaaaaccagctgtgtgggggagaggccc

SEQ ID NO: 11154 - DNA, 337 bp, Homo sapiens
ggaagcaaaagtattacttgcacacatgttgaaattatttgaatttaattctttaaatttatgtggctatttgactatttgtcttagaccagccttttgctcattccagtaaccacacataccacacagttcactgatgcaaatcctctgcgatgaacaggagatggggacagaaaaaataaatggcgatattttaagggtttagagcactctgaatgttcattcagacaatgcttgccccaaattctaatctccctctgattttgttccattttgtaatgaagactttggggaagtgggtgaggaggtcctggggcagtgggggaaacaggtacag

SEQ ID NO: 11155 - DNA, 1538 bp, Homo sapiens
ttttttttttttaatgatcattatctttattcatacacacttgcttccaaactacaattaatgtttctaacaaagcgtatcatgcaaacggagattagaggttatacaaactgaaaaaaaaagcaatgcagtaatttacacatccgtctcctctgcgatataaccaaatggtgtttgacggttgaatggcctctacattttgtcagtaggtgcttatacagaaggaaaaacctcaacctccgtctcttcctccaaacaaagttggggcttatatgatgtttttcaattaatgatttaaacgtggtatgtccttcacacacacaaatcatgtagcaaaagcaatgacttcaaatgcttctgtttataaaagatattctgaaagaccctaacagaagggatgtgaggttaatttttagaaaacctttagactcaaaatagtaactgccttcatgattgattttgaatattctagtaaaccaacccttcaagaaaagaatgatattcttccaggaagaatatcaacaaaagtctacaatcacaggaatggatactcctaaagttaagcagaggtgacaaagacacagtcgtttaatcagaaaatgcaaagccaccttttatcttattttagaaaaaaaggttcttataaagtggacttgacacctattttctgaaaagccgagttctgtctactcgcgtaagtggtaactatgaaacagacgtcaataggcacgtttgctgctgcctcttatatcttgggagatcgaagtatttctgagttgcccagtgggcaaaatccttacagggcatctctgaatcttcacccaaggtgagagacctggggaccaggcgggtctgggcacagagccaaggaagcatcctcctcctgccaaaagatggccacagagcctcacggagcaaggaaaggggtcccagaaacccctgggaatcctattccagggctgcctctggatgggggacactaaaaatgtctttcctgtggtttggaagtttctaaaccttaagcagttgtccccagtgtctattaaaaactcgcagagcatcagtcggccaagttccacctgaacttgcagtcattcccacgtggactccataccctaggagcatgggaaaatctggcagtgggagatcaggtcgggggtgctccagctgacccaggctaagtcctcctacaagctccagggcattggaatcttaggaaatcgtcagttgctttgttctaaaaactcatttttaaagaattattattaaagttctctataaaaaagtacaaatagcccagtatattcagttgctctactggaattaacaaataatttcttcctttaggttaagaaaaagtctttggaatttgggggcttttgtgtagggtcactgtaaggctgttggatggctgagtgtgacctccacggttattaactgtcacctgatcacataaatgggaggcacaggggtcagaatccttcatactgttgaccttcccgaagaatccctgacactacggaattaacacaattgtg

SEQ ID NO: 11156 - DNA, 334 bp, Homo sapiens
ggaccttccttgctttcagaatttcacccaggttctgacaggcctcaagaaaggagaactagttatgaaccgtttcatccaggcccatccccagtggatcatgattcactggaatcgaagcgaccacgtctggaacagggtttctgattctcattttcagcgtgtcagtgctgcggttttgcctttagtgcacccgctgccagaagggctgagggcttctgcagatgctaagaaggtaaatatttgttctcttaccctgtagagttgtaggtttgtaatgtttatttagttatactcatgcatagcacctcaaagaaagtccagttacaccagt

SEQ ID NO: 11157 - DNA, 377 bp, Homo sapiens
aaaatcccaagcagaaaattcagtcattcaagagaaaagtcattaaagaaaaaggaaaaaatagagaacagaaaagcagacatttagtttttccttaggcgtgacaaagcttaacaaacagtcagttctgcagaaatgctcccagttttcctgggtgtcccaagccctcgctctgtttggagactaccacagcctctgtacttctcagctttgtgggtctgggaggcacttttgcttcggaattggggtgaaggctttctaggtcctgattaacagaatctgaactgctcccacctgtcttccctgcagtcctccacccagcagccagggggaattgctttaaaactccaagcagatcatgtcgtctcttggttaaa

SEQ ID NO: 11158 - DNA, 126 bp, Homo sapiens
ggctaaaattactaccttaaataaaaatttcaacttaatcaaacatatgttgagcatttgcagaagggaaatggagatattaaagtaactaggcaaagtttctaccccaagagctgtatatcaggg

SEQ ID NO: 11159 - DNA, 131 bp, Homo sapiens
gacgagaccagccagagcaacatagcaagaccccttctctacagtgtgctggcatttgcagtgcagccaccattgcccatggtagcgatgaggaagctgtggcttagaccaacttccagaatcactgctct

SEQ ID NO: 11160 - DNA, 205 bp, Homo sapiens
ggctggcgagccattttacttcctgaggacaattccccagccacaggctctgagtcaaatttctatttggtaagcatcctagcagcaaagtcctgcactcagaccagccaaaaaacagcccccattccaagtacttggtgtcaaaagtccccgaacgacttttaaacccaagtcttcttaaggtttcagtactgtggtggcttta

SEQ ID NO: 11161 - DNA, 75 bp, Homo sapiens
catgcacagaaaattgaaactggactccttccttacacattatacaaaaattaagatggattaaaaacttatgaa

SEQ ID NO: 11162 - DNA, 305 bp, Homo sapiens
  misc_feature (1)...(305): n = a,t,c or g
gcaacttctgctgcctgggcttcatcgccttggcctactccctcaaagtgcgagacaagaagcttctcaatgacctgaatggagccgtggaggatgcaaagacggcccggctgttcaacatcaccagttctgccctgggagcctcctgcatcatcctcgtctttcatcttcctgcggtacccccttcaccgattattaaggcccgccagggaacggcttgcttggcgggagacaaagcacttgaggacatgttttatttctncattgggttccctgaaaacggagggtcccattgagggtttggg

SEQ ID NO: 11163 - DNA, 125 bp, Homo sapiens
gaacttgcaatatttgaatgttgacgcttcggaaaggggactagtaccaccttcatcttgcaccctttcaaggatgcatgccttctgagcctacttatgaggtaactgtgacatccgcatctgaa

SEQ ID NO: 11164 - DNA, 709 bp, Homo sapiens
  misc_feature (1)...(709): n = a,t,c or g
aaccttcaaacttcagcggctttacataatgagggtttacttcttgctcatgtcacagttcggggagcagagagaagcattggacagggaatgggttctacccatcagagtcgtgcagtgacccaggtttcttctgtcttgtggctccacccatctctgggtccctggtgtcttctctattcagtaggtggccttggtgctgggaaagtggagcaccactgcaactctggctggggcattggatttttataaaactttatttcaagccctgaatgactgtgttctccaatctggtagaatacagctggagaaaggcagctggctgggtgcccaagagaagggaatttcttcctagcactgtgacggagtggagcatcggaaggctgaactgttataactgctactggaaaggagaaatactgttgtcttattttccaagagatatacacagccttgttgattttagaatcattaaaatttttaaaattgcagaccatacaaaagtacacaataatgtaggcttgttcctcattccagagattacttcaaaattcgttcaacttnnnnnnnnnnnnnnnnnnnnnnnnnnnnnnnnnnnnnnnnnnnnnnnnnnnnnnnnnnnnnnnnnnnnnnnnnnnnnnnnnnnnnnnnnnnnnnnnnnnnnggtgnaactcgggtctactgaaatacaaaaactancagggcatgg

SEQ ID NO: 11165 - DNA, 334 bp, Homo sapiens
  misc_feature (1)...(334): n = a,t,c or g
gagcaccctcctagaaaccgagccnnnnnnnnnnnnnnnnnnnnnnnnnnnnnnnnnnnnggagcaagacggcaccatctatagaccaggaaacagcccctccccagacaccgaatctgctggcaccttggacnnnnnnnnnnnnnnnnnnnnnnnnnnnnnnnnnnnnnnnngataagccactcagtgtatggtattcttttttttttttngaaacggagtntcgttttgtnncccaggntgaanggcaggggcnnantntnggttnattgaaagntcngcttccnggnttcccgcnttttttnggcntaancntccngnnnanntggnacta

SEQ ID NO: 11166 - DNA, 446 bp, Homo sapiens
  misc_feature (1)...(446): n = a,t,c or g
ttgagatggagtctnnnnnnnnnnnnnnnnnnnnnnnnnnnnnnnnnnnnnnnnnnnnnnnnnnnnnnnnnnnnnatacccgaaattaatgttcttgtagtcctgcaggctagaagtctgagatcagggtagcagtatggttggttcctcggtgagagcccccttcctggcttgtagacagccaccttctcactgtatcctcacatggcagggagagagagagcaagctttctggtgtctcttcttatgcaggcatttgnnnnnnnnnnnnnnnnnnnnnnnnnnnnnnnnnnnnnnnnnnnnnnnnnnnnnnnnnnnnnnnnnnntaaatatcaccatggtgnnnnnnnnnnnnnnnnnnnnnnnnnnnnnnnnnnnnnnnnnnnnnntgcatagcagtgaatgactggcttcagtttgagtgaccaagtttattgaagagtctg

SEQ ID NO: 11167 - DNA, 366 bp, Homo sapiens
  misc_feature (1)...(366): n = a,t,c or g
gccacagccctgggaacacacccttgagccaaacttggttgaagactaggtcttccctggcaagttccggaagaatggacttactgacttttatcaactcttctcactgccaaggccaacagcatctgaggtatagctttttgggagtacctgctttcttgcctcctgggaggatattttctgtcctggggcttcatggcccctctcttccctgttacacattgctgtgcttcagagcctttgcagctgcaacctagttgaatccacatagggttccttccacacggtgggaaggatcttgntgctttcactcacaggaccagggagtttttcaatcaggaggtgggtttttgttcccttcagggc

SEQ ID NO: 11168 - DNA, 431 bp, Homo sapiens
ttttttttttttttttgtaggtaaggaaaggcagatttattagagaatgtaggaaaatacgttgcaagaatggaaagggcaggtcagcaagggaggagctggctgccaggagacaaaggcttgctggggattttataggatggtgcttgtgctgttttctggagagagctatgtgcagtactgataatgccaaggttgcagtgagctaatttgcatttttctatcagctgagggtctggtgatagctgggcgcaggaagattgtgagttatgtgagttatttgcataggagggctaagtcctgcaccagggaagaaaggcagacttgtagttcatctgccttctctttttgctttcccttgggtcccaccaacctgggctccttttccatcattagggactccacagaaaagatcccctgtatcttgacta

SEQ ID NO: 11169 - DNA, 85 bp, Homo sapiens
gtttcctttggacaaccgaagagcttccatcattttcaactagcttccagtcttggtgtcagctgaactaagtcctatacaatgc

SEQ ID NO: 11170 - DNA, 708 bp, Homo sapiens
tttcaccagcagcgtcttccctttattttagtttattaatagaatacagagtgcaggcacttacagtggtcaaactgagcgaggagtgggtgaggtctcctcagagagaggccgccctgggcccacccatcagggaggcatgggcgggagctgagaggcccccaagaccccccgccaccaccacccacatagcccaagcccagccaccctgggggacccaggaggaggaggaggagaggaatagggcaagggcaaggccgggcaacggctccgggcctagcaaaggcacctctggcagccgaggctgggccaggctcaggctgtgtggttaatatggccgggaaggactatgtacacctcaggcctgccagctgggcactaccgagcccactggcgcaggcttgccgctggggagctcctgctaatgggaagttgctatatccctgcaccccagcaaggcctggggatgtaggcgcccttggtgctcgcacttatagaaggcctgccctacatgggctttcccagcccaagaagaccttggtagagtcccccccaggctggacccctcattcaggatggtgtcaagggttctggtcccccctctgccaccctgagactccatcccccaaagtgcaacaccccagcgccccctgcctggagctccagggcccctttgcgcagtgcggtgtccagccaggcacaggggcc

SEQ ID NO: 11171 - DNA, 115 bp, Homo sapiens
gtcgacgtgcttagagcagtattttgcacatatcaagtggcatataataatttgttgaatgaataaacttgtcagagggggaactctcctcccctactcccaactctcccttctg

SEQ ID NO: 11172 - DNA, 77 bp, Homo sapiens
ggaggaagaagaggccaattctaagcaaaatataacaaaacgagaagtggaggatgacttgggtcttagcccctctt

SEQ ID NO: 11173 - DNA, 354 bp, Homo sapiens
ttagtcctctcgtctgcttgtctgcttctggagcctggggtctgggacttatatgggtacagaatagggggttgtggcaggccaaaagacaacttttgggtgccaaaacaggaatgtctgttcccatttggggccacaggtttccaggcttgagggcagggtctttgccagggaaccgccctcttctacccagtatttccctgtctcctgtccatatcagtagctgagatttctaaggctggtattttaaaggggttgaggtaaccctagggacatggtccaggatcaccatggctagagtgtgatcaagttttggtgtgctgggttgaacagagacttttgcagttctcaccc

SEQ ID NO: 11174 - DNA, 521 bp, Homo sapiens
  misc_feature (1)...(521): n = a,t,c or g
ggttagcagcttaacaataatcgtgatctctcctgatttctgtgggtcaggaatttgagagtggcttagttggacatgtgtggtgtggggtctgtggtttgggctgtagtcagatgttggctggggctgccatcatctgaagactggattggagctttcaaggtggtgccctcacatggttatcaagttcngtacttttccacgtggcctttccactagactgcttgagtgtccttacaacatggtggctgccttccccaaagtgaacggtctgagagaaagaaggcaggtgganggatatgccttttctaatgacttggtctcaagaaagccacaatgcctgtcacttgcatggtattctgttggtcacataaggtcaatctatttgtgttttganaacatgtgtacataanggtatgaataccaaggaaggtgaagtttaatttggaagacacctcagaaggctgactaactggtgtatccccctttctgcnataaatgcttcttcaacagtcccctct

SEQ ID NO: 11175 - DNA, 292 bp, Homo sapiens
  misc_feature (1)...(292): n = a,t,c or g
gatcctgtgagtggtgctgagcaggaatggagtgggaggcatcaccatgggacctcaagccccagaatatgcagcaaaaattatatactttttatcttccactttcccttccctcagaactaaaagtctttcagcacgggtaccagccctagaatttccagtacaccagcagcagcctggaaaccacatcctcatcaaaagacagaaagaaaaaaactcgagccagcctgagaaggaccctattttatgctgttaaccactgagactggcatcctcacaggntgagnaaggg

SEQ ID NO: 11176 - DNA, 772 bp, Homo sapiens
gcggccgcctactactactactactactaaattcgcggccggtcgacgggagctgaattccggaagatccccacatcgatgaaagcaaagcgaagccagacaagccatcatcatgtccacgtcgctacgagtcagcccatccatccatggctaccacttcgacacagcctctcgtaagaaagccgtgggcaacatctttgaaaacacagaccaagaatcactagaaaggctcttcagaaactctggagacaagaaagcagaggagagagccaagatcatttttgccatagatcaagatgtggaggagaaaacgcgtgccctgatggccttgaagaagaggacaaaagacaagcttttccagtttctggaaactgcggaaatattccatcaaagtttcactgaagagaagaggatggataaggacgttatccaagaatggacattcaaagaccaagtgagtttgtgagattctaacagatgcagcattttgctgctaccttacaagcttctcttctgtcaggactccagaggctggaaagggaccgggactggaaagggaccaggactgaacagactggttacaaagactccaaacaatttcatgccctgtgctgttacagaggagaacaaaatgctttcagcaaggatttgaaaactcttccgtccctgcaggaaaggattgatgctgatagaagagcctggacagatgtaatgagaactaaagaaaacagatggctggagatgacatttatccagggtcactttgtcaggc

SEQ ID NO: 11177 - DNA, 750 bp, Homo sapiens
ccgtgcagaaccgcgtgtacaagtcactgaaggtctggtccatgctcgccgacctgggaggagagcctcggcaccttccagttccaccaaggccgtgtacgaccgcatcctggacctgcgtatcgcaacaccccagatcgtcatcaactatgccatgttcctggaggagcacaagtacttcgaggagagcttcaaggcgtacgagcgcgggcatctcgctgttcaagtggcccaacgtgtccgacatctggagcacctacctgaccaaattcattgcccgctatgggggccgcaagctggagcgggcacgggacctgtttgaacaggctctggacggctgccccccaaaatatgccaagaccttgtacctgctgtacgcacagctggaggaggagtggggcctggcccggcatgccatggccgtgtacgagcgtgccaccagggccgtggagcccgcccagcagtatgacatgttcaacatctacatcaagcgggcggccgagatctatggggtcacccacacccgcggcatctaccagaaggccattgaggtgctgtcggacgagcacccgcgtgagatgtgcctgcggtttgcagacatggagtgcaagctcggggagattgaccgcgcccgggccatctacagcttctgctcccagatctgtgacccccggagaccggcggcgttctggcagacgtggaaggactttgaggtccggcatggcaatgaggacaccatcaaggaaatgc

SEQ ID NO: 11178 - DNA, 355 bp, Homo sapiens
gccatgaacaaacatataaaagtagcaacagataatgaccaataactggttcagtggctggagtattaggggcctggggattggagaacggagaagaagttgtagcagagggaaatgagacaggaagatgctctggggacacattttttatgtgttatcttcagccatgagaagcagtgatgactatcccatatcacagatatgatttaccaccaccaccctgcccccgctcccgtgaagaaagcagggcaagtgctgtgctgcccatttgggcctgcatagtgccatgattggaacccaggaactctggtctccttgcctagtgcttttcaaaactctgtgctacacaggagtg

SEQ ID NO: 11179 - DNA, 356 bp, Homo sapiens
cattgctttacgagggtccaatatccgctcctctgcccacctcctttggaccagcttcagcaaaggtccaaggcaatctgaccccacacggcaggtggcagaaccccaccctgtctgaaccgaggctgcacttacatctgatccagtgtggcaaaaccctcccaccaagcaatccaaagagaccctcaaaggctggaggtaggaactcctgaggcccagagtgctccatggcacctaggtgcgtggaggtacccgctgccgctgaaggcagcacagcactcaggtgactgaaccacttccaggaaggcctccaagggactgggtacaaaaaaggggggcttctgtttttattttac

SEQ ID NO: 11180 - DNA, 803 bp, Homo sapiens
tcgtggcgctgtggcggaatgtggcgggagtcgtgttaacagcaacacggaagtgtgtgcttgcatcagcgccaggacgtgacacctttctcctcctatattgcttctgtcctgggtaactccaggcaaaacagatttgtatgtgagctgtgaccaggtaggaaggccggcctcgggggtcggaacccaccatggttgctggtgtccacgttgcccattgctcgcacactcctcgtgctgtgttgtcatgcagatgccaccttcggaggtgccctccgctgtgtgagccacacgccggctgcctctcagccaccgtgtgtctgtggtgtgtgatcccgggtgtctgtccctcggtctcgtacatccatgtctctcgtgaagcccgtggccctgcctttcttcttctgtaacctgatggctgtgactgaatgcatagattctctccttgtgcttttttctccctgtggctgcgtcacaagcaggagacggatgcgctagagagtacctgttaccctaaccttgtgccggagccgactactggagatgacagtgatgctgccacctttaagccaactctccccgatctgtcccctgatgaaccttcagaagcactcggcttcccaatgttagagaaggaggaggaagcccatagacccccaagccccactgaggcccctactgaggccagccccgagccagccccagacccagccccggtggctgaagaggctgccccctcagctgtcgaggagggggccgccgcggaccctggcagcgatgggtctccaggcaagtccccgtcc

SEQ ID NO: 11181 - DNA, 349 bp, Homo sapiens
gcaaattaatttaagaaataaaatgtttgttgaatacgtatccattggagacagctttcagaatgcttgtggtcaacttataaagttactgctaagttacattgttaaggaggcacaaggcatgaaactcaccttgaatagagttgcaggaattatgaccaagagccaggcatgtatgcacatgagcatggttcttgtatgtatctgaaaatgtgcacggtatatgtttaccaagtaagtcgttaaaaactttggggcatgcacaactattgtagcacaactattgtagcacattagaagccaacaattttccccacatagagggaataatctagacttcttagaaaat

SEQ ID NO: 11182 - DNA, 79 bp, Homo sapiens
cgcgtcgacaaactatgtacttgacattacacttttgttttccaaaggtaaatttattgacctacaataatttaggata

SEQ ID NO: 11183 - DNA, 930 bp, Homo sapiens
cggccgctgacatgggcgccagcgggtccaaagctcggggcctgacgttcgcctcggggccggaggcggctcagaggcagcaggagctgagcaagctttggtgcggcctcggggcagctgtgccccccttcgtattcacgcgccgcggctctatgttctatgatgaggatggggatctggctcacgagttctatgaggagacaatcgtcaccaagaacgggcagaagcgggccaagctgaggcgagtgcataagaatctgattcctcagggcatcgtgaagctggatcacccccgcatccacgtggatttccctgtgatcctctatgaggtgtgaccctgggaggtggcagacagaagcaccccctgccccggcaagaaactcccaggctcaatcaaggtgtggcttccattgaggagcccaggctggggccacaaccctgaataaactctgttggcccataaccttcagctgtgagcgggtcggtcccacagtattggttgggtgttggtttgtgtgtggacaagaggtggttggtgggtggtgaaggctaatggcagagttagcaccccactctcccaagccacccctgcaagcagcacagcagggcatataccagtcaggaatgcccgttacctggttccttgcctggtctgctttcttccaagtttgcctgggggcctagccctgctagaggctacagcactttacaagcaaggtatgctttcttccagcccctaggctgtgggcactgtatacaagtaggaacttcctttccttcacttcccttttaacccctagtcagagcatttcagccgtttgctacctcgattcctcctgtgttggacagaggctgggggcagtgccagcctgattcttccgacctacctgccatttgttcccgccttcagatggatggacagtttgctgg

SEQ ID NO: 11184 - DNA, 434 bp, Homo sapiens
tttagcacaacaagctctgtatttaggctcatatatccattcttgccagagccgctaagtcagagctggggtggagaacaactggccaaagtccattacattccatctaatgataggtctgttggcaggtggggggaggctatcagcaactcaccttgtccagtaccctcctgttataatacaaagctccagctcaaactgaaaacttaaagtacaatcagccagatccaccttctaatgactatgatgtttaaagcatccacaaaagtgaaattcaaattattgatatgttttagtagcaccatccgtaatttcacaaggcagtcctgttctccttcacaaatgaagcatccacagcacaattggtgacttcacaaaggtcccatggctcctaggtgggaagccgccagaaggcagatctgattctaaagctg

SEQ ID NO: 11185 - DNA, 279 bp, Homo sapiens
atttcggcacagtgaccctgtctctcccaccaccacaaaaaaacaaaacaaaacaaaaataggcatttttctgtaactttaatcagcatctttgcttgctaaaattgccattcttatttagaaaccttatgcattcatgatcccactaactttactaaaacttacttttactgaaacatctagtaaactctcaagaatctatgcaacttagtaagggaaaaaaaaaccacctttgaaaagttctagatcagtataggccaatggaagaaatattgagta

SEQ ID NO: 11186 - DNA, 455 bp, Homo sapiens
ggtgggggtaggaatgcagtagagaaacaaaaacactgcacaaagggtgcagtgttctactattcatctaaataatggagaactggcattttacaattaagatataaaaaatattcatactttcagaatttccaagtcagaggtggcttacaacagctttcattagaaaagggtgagacgcccaaataaaatgctccctggtggaacaaagtcccctttaaacctttaccaagctctttctcagaagctcacaaaacttaagacaatgtgaacatgatgagaaagcaaagctctccaacataaggctgaaaatgacaataaaagactgcaataaaagactagtgggatgaacatgaatgcttgtcagtgacaaacacattatgcctacaaagaataaatactgcacttctctttaggtctatttacagacaggaccccatgacctttcaggcatc

SEQ ID NO: 11187 - DNA, 104 bp, Homo sapiens
ggtataattttgtaacttagagttataattatgatttgggtaaataaagcttgaatgtaaaatttgggggaaatttttaaactttatgtgggctggatgcagtg

SEQ ID NO: 11188 - DNA, 928 bp, Homo sapiens
  misc_feature (1)...(928): n = a,t,c or g
tgagcaagtcttcccctcagcctctggagtagctgggcctacagtgtgtgctgccacacccagctaatacagtctttctactcccgctctctattccccagtttcttgcccagaggcaacccttgccagtctgtttatccctccagatacagtctctgatagtaaacttttctttctcttacacaaatgatagtagtcacatacactacacacactgtgccacgtttaaaaagaaaaaaaacaattctcggctgggattacnggngnnagccntngcgcccggccagcttttctttataaaaatgagtaaagtaggtaaacttcacaggccccttagaattaaatccttagggcatggttcaagtctgtaggaagcaaatctatacttttttatatgggcttttaagtaaagcttagaaccctggggggagaaaagcagtcaggtgaggtttgagattccttctatagaatgatttcttaaaatgaaaatctgggcccacttaactaccctagataaaacgcttcaatggcttcccatggctcactggataacatctaaattcttcatggaattgaaggcccctatgtgctggttttggctaagatctcccctttgatgtgggtcccctgttgattatacgtgcggccttccagctgcccaccatcacagctacagctcgctccccttggcctctgtgccttggctccgcactgttcctactgaaggcctagcacctgctcttggcctggtgagcccctccaccttccaggcttactcaaaagaattctttctgccctccctgtgtccgggaactgtttcatatcgcttctgtggtcgtgaacccatggtcttgtaattgtgaacttctttgctgcccttcgaagctggggaatgcttgttgcagatgaatcaaaaggggnaattcgt

SEQ ID NO: 11189 - DNA, 329 bp, Homo sapiens
agagcagcaccatgagcttaaccctgttttacagatgaggaaacaaagagagattacataatgtacccaaggtcaaagatttagtaagcatcagaaccaagacttgaacccccatttgtttgattctagaatctattagggttttcagtttaatcccaagtatttcaccttacataatatagtaagtagaaaaagaaattttttactattgctataactattattaaaaacaacccaaattttatgaacttcttgagcttttcattgctaatattagaccaaaaaaagtgaataatctttggcaattttaaaatctaaaagcaataaag

SEQ ID NO: 11190 - DNA, 819 bp, Homo sapiens
tatggttcctatgctttttttctattttaggcacaatgctttaataaattacacaaagactacaaacctttattacatcaattgttacaaaaggctaagtggagaaagattacttatctgaagctgcacaaaatcagtgggcaatatggatttcatttaagcttgtcaattctcctggattaaattcttggcgctgtctcacatattcccaagtcctacatgtaggatgctaaaagttgcagttactaggttgggaaagccatgcccagacgcccctgtgaaaaacatatcaatatattaagttccttagcaaatcacatctagattaagttcataatgctttttttttttttaactttgcaaatctccaaacttttgctactttcttaataaaatacaacaaaatttttggcattccagccacggaaaaacagatctctacctctgaggtggcagtaatccaagcagttactaggatctacgaaacatgaggcataattagaatgttggggaaaaaatctacagaaatatctatatcttcgtcatgaacctgactgttgagtttatgaaaaagtggaaaaggaacctcactcgttccttccctggtaccttcacagcgtctcccgtcccagtctgcctagttgaatctatggacacttaaaggtaaatcctacctcttggctgtccttccgtctcccaggattctgctaggccgcacagttggcaagcttaaaactccaaagattccgcactctccgtctttcaacagtcatgtcacagagacacgaaggttagcacaggaacattagtttccaaact

SEQ ID NO: 11191 - DNA, 619 bp, Homo sapiens
ctcttaggtgaggaaactgaggctcaacatggtaaattaaacttgacaaggatacacaactcacaaggtgtggagtcccactagtttcttggacagtttctaaagtctatgatctttccacagcacccagcttgtggcatgctaattgcttaagtgcccctagagtccagatgaagaaagttcagggcacaagactctgagagtacaaagcactccagaaataagccagttgcatttgtcattagctttcctgtccacattcccttttcttagtcaggttcagtccatctagaacttcaatttcaatggaaacagaggaaatgaatgtggtagcagacatcactaagcactctcaaagctttcttgttactttgaaatggtctaaaaagcccattctttctacccactgggtccccaccttccccgccaagtctgtgttctctgttcggttcattatcagcaccgcccacggccagacacgggccaggcggcttcacagaagccaaagagcttatcagaaataagtactttatttgacagtgaggccagatgtgcagagagaggcatttcaaggccttcacttctcttctcataattagtcagcttctagcaatgatgc

SEQ ID NO: 11192 - DNA, 405 bp, Homo sapiens
aaagaactgaatcaggcaccccaagaatgtcaatttcttacattctcaccctaaggactcttaattccatctgtagtgaccaagttatggcttaggaagtttcatgttgggaagatggtacatggtcctcatttatagcaaccttttagttagaaatgaatcatatttatattctatgatgacagctgttccctgagagtgaaaggtacattttgtccagagggcagcaataggaacagtaggccttctttgtccatcttttctcgggcgtaagaccccagttctgggggcctgaaggctaattggcccacttgaaggaatctctgatttctgcctgcattccaacattggcaccaaaatgtagccatggagatttaagaattcagtgctgtggcttgcttctct

SEQ ID NO: 11193 - DNA, 343 bp, Homo sapiens
ggaatcaggccaaataacattaaagttcactttctcaaagcttaaactctgttaccgagaaaagatgggggtagagttttaaagtattcttcttagtataaaactaaacgtttttctctagacatattgtctcgtgatatttttaaaagccagcattatttttttttcaggaaagttaagtcagtctataacagtgattccacggtttaccctgttgtcctggagtgggtaggagctttcaggagtagctaagggttttctttttccaaagtaagtgtgtcaagttgaaagaaaattacaggttgtgggactgagaagttagataatataagggctcttctaa

SEQ ID NO: 11194 - DNA, 428 bp, Homo sapiens
gtcatgtccttattgggatgggagggtgctgagtgccggggctgtgatcagcagtggcaacctgcaacagtattggttagttttaaagaatgtctaaaaatgaaagcctgagtgttctgatgctagctgtccaaagagccaccagataattttaatagtgacctgcatactgtagcttctgcctttatcaaagtttctcttcactcccttcttcagtaaagaatagaggacataagtcaattctgtgtgccatctgttgtcgtttttacaatttctcaaattaaagagacaggccaaaaatttaatgtcgtgttggatcctagaagctcctctagaagagagaaaattgcaactgaatttactttgtctctcttgagggggaaaaattgcatattgctatgtcataaccttttacttgtagtcccaat

SEQ ID NO: 11195 - DNA, 358 bp, Homo sapiens
gaaccattgcaccgggagctgaaaatatacagagaaagctgagaatgcaagagtcgctggcttccatgcccatcggcagtgccctatcactccctttatcctgaatgttaatgtgtattggaattctgtcacttgcaactgaatgagcccagttcaatataaaaattaaccagggaaaagagcaggcctatgagaaggcttcaggcaaaggaagacatgggaatatgtatgaatgggtgggcaagcggcagggagggagcatttccttttgttgggagtcctggggttgtctccctagctccctaacacatgctaaaccccaaacacatttgcagtctttaggcctggggtatttcag

SEQ ID NO: 11196 - DNA, 428 bp, Homo sapiens
gttttttttttggttgtaaaattttgagatagtttttatttgaaaacataacattacaaagtttgaaaaataaaaaaattaatgattttaactatttttttcttttgttctcttgtttttaacttactattttgaatgacaaaaaaatggctcatatgtttgtccaaaacccttgataatatctttaattttttaaatacctgaaacagttaaattattatgtactaaaaacatttactgtactctcagacagactcatataaaataacctcatttgtcaggagaaagaaaggtacatacaaagtagtaaattatgagttttgacaaaagtaatagacatttttagttatttaaataaattaaggaaacatcccaaaagacatttatacagtaaaaaaaaaaagtaaataatttcaggaaaagtaaac

SEQ ID NO: 11197 - DNA, 260 bp, Homo sapiens
  misc_feature (1)...(260): n = a,t,c or g
gggcacaaatcaccaagtgaggttgcaggtcacaggtgcacaccttcccactgggtgtacacggtggaactgaagccccaggcgtccctggaggggcccgagggagatgataagcagtccccaggacagctgagtggccccatcccacctgcatcttagggggctggtggtgctgacgggctcatcatgagtcctgtggtccttgcctggcccacactggagctggttccagcttcncacgccgagccctatgcagtctc

SEQ ID NO: 11198 - DNA, 502 bp, Homo sapiens
  misc_feature (1)...(502): n = a,t,c or g
taggttaataacttgctaaagtcacatggcaagtaagtgtggagccgggatttgaacccagtcatcctggctcggggtccaatgccctggctggccctggatgccgctggggggccctctgtagggctgacttgccctcctgagaagccccttccttagcttacggccacatagccctctggtagtcctcatcaccagctctgctcttaatttggccattttccgccttaggattggagtgaatcatccttcaaagacagagccacgttctgcactgtgttaagcatagtccgtggctcacagttcatgcgtgagccacacacacatgcacactttgttgggaagaagagcaacaataaattgcttatttagaaatgggcgannnnnnnnnnnnnnnnnnnnnnnnnnnnnnnnnnnnnnnnnnnnnnnnnnnnnnnnnnnnnnnnnnnnnnnnnnnnnnnnnnnnnnnnnnnnnnnnnnnnnnnnnnnnnnagttctccac

SEQ ID NO: 11199 - DNA, 77 bp, Homo sapiens
tgaatctttgcatatctaaaattgtgcttttccctcacatatgggagcttttctggatgtgaaattaatcttgggtt

SEQ ID NO: 11200 - DNA, 388 bp, Homo sapiens
tctcaaaacaaaaatcctaaccaaaaagttgtcattaaaaaaaaaaaaattcaggtagactgaatgtttttctgctctaaccttaaatgttattaggtttggtttttgtttctaagctacttcaagactacctgaggtaataatggtaaactttattattcagaattcgattaaactaacttcagcatttccacagttctattaaacaatgactgatgttcacaatgacaacctacctgagatggctgcaaggccctaatgttccattatacattatagtcttttcagcatagtttagtgttgagtgcaattctaatgcattctacgtttttgaaaatcgataatccatggaaggtccatgggttgatacctcaggtcaaaaatgtgt

SEQ ID NO: 11201 - DNA, 532 bp, Homo sapiens
tttttttttttttgtgttgataaagctttatttataaacacactcacagggccagatttgggccacgggcactagttgccagcccggctttaactgctggtcctcacgttagtctcactgcctcctgcagggtgggcatgtgggtgtcgtgttcacgcagccccttcctccaccccacagacacgctggtggctgtcctggagcgcgacacactgggcatccgtgaggtgcggctgttcaatgccgttgtccgctggtccgaggccgagtgtcagcggcagcagctgcaggtgacgccagagaacaggcggaaggttctgggcaaggcctcgggcatcattcgcttcccgctcatgaccatcgaggagttcgctgcaggtaacagagctcgggctcaggggctggtttgggaggggagtggcacacaggtgggcatctgggtaccgaggatagtgcccccgagttcactgcggaaagcctggcagatgcctggcatatacagataggaagaaacctggcttgtgaggacgcg

SEQ ID NO: 11202 - DNA, 898 bp, Homo sapiens
  misc_feature (1)...(898): n = a,t,c or g
ggggctcaagagaaggccatctccctgatgccatctgcatgatccatgttgagcgggttcacaccagtgccttctctgctcttcaatggtatcatggcattgatctacttgtgcgtggaagacatcttccagctcattaactactacagcttcagctactggttctttgtggggctttctattgtgggtcagctttatctgcgctggaaggagcctgatcgacctcgtcccctcaagctcagcgttttcttcccgattgtcttctgcctctgcaccatcttcctggtggctgttccactttacagtgatactatcaactccctcatcggcattgccattgccctctcaggcctgcccttttacttcctcatcatcagagtgccagaacataagcgaccgctttacctccgaaggatcgtggggtctgccacaaggtacctccaggtcctgtgtatgtcagttgctgcagaaatggatttggaagatggaggagagatgcccaagcaacgggatcccaagtcttaacttaaacaccatctgggaatcctgatgtggaaagcaggggtttctggtcttactggctagagcttaaggaagtttgaaaaggaaagctccacttcttttggaggcaccctgtcccagaagccctggccctaggcagcttcaacctttgaacttactttttgaaatgaaaagtaatttatttgttttgctacatactgttccagacttttaaagggacaatgaaggtgactgtggggaggagcatgtcaggtttgggcttggttgttttagaagnncctgggtgtgcctacctactcctcttttcttttaaaagggcccacaatgctccaatttcctgtctcctttagagagacatgaaacgtatcacaggtgc

SEQ ID NO: 11203 - DNA, 716 bp, Homo sapiens
gctcactgcactccagcaccccagcctgggcgacagggcgcaactcttgtccccagaaaaaaagaaggaaagaaagaaagaaaaagatattgcatctttaaggtcatctgaaatcctctaaagacttggttaggaatgagtgcccagaaacacatagcagccattcactagaatgtcttaaactgaaaaacttcatgtaagtttgtctttagcatgaacacaagaccagttatttaagaacacattgccatcaagaagcccaggaagaaatgggcatgcagggttaacctatgcactggatttagaggagcaatcaagcatagacatttgtaattctcagatgttctctattttattgagtggttgcttcctgggtgagagacctgacctgagtctgttgagactggagagaccaggtaccaagcaccgactctggtgggaacctggcttcctgataacatcatctatttcacctaaatgtgaactgctttcttttcttcagctcaatagcttaacatctaattcatgtttgctccctttgctggacaatccccattccaaataagacaggtttagtggctcggctggaaggccccagttccttttgctaactcctaggtacaggaaaataaaagtggtaactgagtcttacagacaccaagtctaggatgtgcaaataagcatacttgaggctgttggtagtcaggcatattatt

SEQ ID NO: 11204 - DNA, 402 bp, Homo sapiens
  misc_feature (1)...(402): n = a,t,c or g
gagcagggggaaaatgcctgatctggaagttgtgtctgttatttccagtcacttcccattgttcagaatttagtcacctggtcatatcctagctataaatttgggttggaaatgtgtttcttctgggcagttgtatgcccagctaaaaatctattatatagcaggagggagaaattaatattgggggaacaaccagacatctctgccacaatcaagactttgttttgtatttctttgagtgctacacagtacttaacactgtggcttatccctgaagtctgaataaattcttctcattagttctttgtatgaaagactgaaggtctttgggatcttggggattaccccgctgctgggggncaataagggacccctaaggaggntatttcaccaggagtgttt

SEQ ID NO: 11205 - DNA, 325 bp, Homo sapiens
gggttcctgctaacaggcccccacctcacatgttgatttccaggtcactacaggagcggaagagagcaggcttctcttccccgtggaagaattccccgtggccccacccacttcccccagtgcgtacgtcaggctccagttcactgtgggatgcccagacaagccctgggcaggttccctcatcgacccaaaagcatctaatgtaaacattcttgggacgcttggagattctccagggaccccattttatctgcctaagcattttgctgtctcatgttaaggtatcatccagccctcgtggcttgtgatggcatttctggttgcg

SEQ ID NO: 11206 - DNA, 235 bp, Homo sapiens
actgtgcccagtcaggatgtctttaatgtaggaatcattcaagatccctcctcagtgcccatgtctcccccacctcagggtgctgtcaaccctcccttggtttccatgatcattgctgaactcagagctttcttctatccccagacccacatgggagtctcccagcacctctgactcagcttggccaatgcagaacttggcatctgaacccctgcctcttccctggaaccacttc

SEQ ID NO: 11207 - DNA, 350 bp, Homo sapiens
gggccactgctttcacagagaagggcactgtaagtcacatgccaacaggcaaggatgtataattttctccaggaaagaggggtgaaaaatcggatacaaaattacagtcaaccacatcttcctttctggatgaaactttacatgtgataaatatacactcttacagaattagatacaatttaccattttatattggcttttaagatatgcattttctcccaagttaaggtctgaaatcgtgatgcatcttacggtagatggggtcttataatcactgcaagccagggcagctgttgtgatgtcattgcctaggcatgagagaacttggctgctagtcctggtggtaggat

SEQ ID NO: 11208 - DNA, 5795 bp, Homo sapiens
acgatacatacatatttataggaaaccaaagtgacaaagaggggaggggaggcacccacctctgcctggggtcttatggagaaagaggggaggaagaaagtgcatttacacagaagcctcctcctttcacttgcatgtctgagggccagcgccacatacaggcgtgccgcgtgttacacacatatgtggggtgagggcagaccatggtgagtgggggcctttcggatgcagtcagcatgcttaggagacatgaggccttggagggttgggctaagggagggaaaagacactgaaacctgactccgacttgagcagaccaagcaacatgcgggtctccccccgggccttggctggatcctagtttccctaactgccctcctccacagggaggagtgttgggatcccccctaccctgtgccccggtctcaggcccagtccctgaaggaggagtggggacgcagaggatttggtggtttgtacggttatggtcctggctgacgcggctgcgtctgctgtgctgtcttccaggggggcgtcagagccatcctcagggcagggccccagttcatggctgttcctggagtcagaagctaggggctccttagcgggaggtgagagggagccatctgtccatctagctgcttctgtgtggaaactgcccacaggcgtggtgccaccagatgactctcccccaagggacttgagcagctctctgtgggccagctccatatccttgagcctgttgagcttgagagtgagctgctcaatggtatggaagatcatgcccacgtccctgagggccaggcttggaggagagcggctggggcgtcttggatcatcgttgcctccctgcagctgaggctgaggctctgtctgccctgcagggaggctgtcaggctgaggggggctcatgggtgcctctgagtggtcggtgcttgagtccgggggtcctgatggcatgctgacataaaagcagttccccgtagcctttgttccgccttccacttcaggtggcccaggctctgactggccactctctggtagtgcagggacaaccttgctgcctgccacctcagcttttctcacaactttgtaacctcctgctgcctctgtgcttgaagcatcttcagccagattcctgtccagttctggagactcccatatcccagaatttctggtccttgggggtaggtgttccagagaacagagacccatgtcttcctgctctggccgttccccctccagccctgcaagctgggtgttgtccccttcacccccagggggtgcttgccctggggagcctgggtcccaggggtgagaggtgacgctgatgacagaaggtgtgggtgtcaggtcgtcctcgggctcctgggcagcctgagtttccatggtgtgacctggcagcaggctccacaggatcagatgtcgcaggttctccacatcttccagagcggagtcagcgagcccttccatgaacagagggcctgggaaggccaagtggatggggttccttgtcctgatgcccctgttctctccatccagggatgtggaagggcaaggcaggacacccagttcctcttcctctgcactgccctcctgctcagggtcctctagcaggacctggtgcttcccttggaccctctgctgggacccagtgcctccaggcagctcctcaggttcaggttcaccatggaacacgtctgagtcatccagttctaccctgctgggtgtggggccctgctgggctggctcccggggacctgggggtggaggatggacgggcattggggcagctccggggtgcctggtggcattccgcacggcctcttctaagagctccatccatgtgttcttgtctgatgacgtcaatgcaaccagctcatagatctggggtgggcccagcttggaggtgcagatgatgaagaaggcccgtttatctgtggccacagagcggatgagcacagcattgagcttgagcacggggctgaaggtctgcttgctgtctgaggagcccacagcagtcttgctgtggcacttcagcaatagcttctcatcctgtttctgtagcagcactaggaggtcctccagcagcagcacgtggaggtccaaggtcttatccttgctgatcctccaggtcaggggtccctcatggatcatttttctggttgtaagatccaggctcttgaactctgctgccagggggttgctggccctctccagggcggtggcatccaggcgtttctggtagccctctaaacggtggcggttctctgtttgttttaccgcttcattcacatacttgagaatctcccggcactggtcccgggcccggcacagcttctcatgctcagaggtgccaccctctgtgtgcttgatgatgctctccagcagcagcgggtacttggtgagccgctgcatctcagagatgatgaggtctctcagctgcagccgccgacactgagggtggctctcagcctcctgcatgaagagctggaatcgactctccttgcgttgcttggtcttgattagctctagggctattgactgataggaacagaactgtgcagccacttgctggagttcctctcgggcagggccatcaaaccgggccagcatgaggtcactgatctctttgatgatggggccttcctcccggagcttcttcatggcttcacaccaggaattgtgaatctctatgagttcaggcaggttcgggaagagccgggccagctcctcccggggcatcaggttctccttcttcattcgctggtagaagatcaggtccaggacccggagtgtgcgcaggtgggaagcttcagtcacaaacagctcattgatgacctcttgccggtcaatctcccgctgggttagcccagccaccacatccttgcccactgtatgctgccaattttgggcatctggctctggctccaggtcagacagctggcccagatcatcctctaggaggtggggaaggagggtatctgtgcagaaccccaaactgggggactcaatgctcctgcggcccattttgggagtgaatggaggggttgggttctcaagagacctggtggagaggctggaggtagaggacgaggctgactggtgcaggcgagtagcctccgcagcagcatccatgtcaacatcactgcgagagcggggcacgttctctgcctttcgagaccgtttcatctcttcccggcccttgaggctttcagagcggcccaggcgaatctctgagcgtgaactgtcactctccagcaggtcctcaggaaagcttccggtcgagagtcgttgtgtcccaggttctggggcatcatactgctggttgttctcaaagtgctgaatgatgttcctcacattgcctggtttgacttccacaggggacaagggaatatgaaatgtgctttgagaagagcttttgggcttcccaatgtatttgaggatagggtttcgcttcttgtcctccaaggcatccttttctttcttggaattgctgctcttcttggtcttagggaagaacggtagccacttgtccttgtcaggagcagactgggccttttcagctgtgttggaaggtcgtgcctctcgaagacggatcccagcatggctcatgtaggtattgagggcgaagtccatgggggcgctcctgtcttcctcatacttggacaaaatatctccaagggcagccagctgcttctcagccacttggcgctctcggagagggtccccatccaggtccagcaggtcattttcaccatacaggctgcccagccccagtgtgcgcttcgttctgtagtcgtggatctgctcttggatctcaggcatggctgcctcttgagcttcacagagaacaccacgggcatcttcgctgttccgcaggcgcgagtcaatttcagcctgtagcatctcagggatcttcactctcagaggcgcatttttctccaggaaaatattccagatgtctttccccaagcttcgggaatccttggggcttgcctgctgataaacttctgcacacaggtaaaaaagcagtggactggggtccgcctgagagaagatgtaacgtagaaaaacccccaggtgagctggccgagacttcagtttctccagatcctggaatatgatgtcgctctcgttgttgaaataacccgggtcatagtcttcctctgggccaataattaaaggctttgggctttgatctacaccctggtcaccggttgaggggactgctgcatccgagccctgccgcctgtggtgctgggccaccctggccatgatcacaggggaggttcgaggactgtctagcccagggtctgacagtaccgagttccgattcatcaatgactcactgagggaaggaaagcgttctgtcccagagtccaagccactgtccccctcctgggaatccagagagagccggccttctgatggtctctggctggtgtcaccatatagtggaagtatgtcctgtaattctttttcttcctgcctcagcatattcctgaggatctgggtggcatgtttttgaacttcgggatcctgcagaggtttgggtcctgtgatgcgttgtggaggtggtagaggtggaggaggtggtggtgaggggatcactgacgtgattcggggagctcctgctggggatgggtcctgctggagcccagagatgcccatggatgaaggtgaagagcccaggagggtgagtgcgacataggcgccagatttgatcagctttaccacttccaggtgtgagctattggtcaccatggtgccgttgactttgatgatccggtcgccctctttcacaccggccttcatggctgcacctccaggccgcacagactgcaccagaacaatgcgatccccactgactgtgaagccgaagccatgctggtccttttggataatgacacagcgttgaacgagacctgttgtctcagaggcatccgaaggctggcgatggtgggaaggggacttgcgctctggtgcagaatctcccagagaagacaggctacttaacctgtctatactctggggtaaccttacactcatggtttctcggtgtctccacggttccagaatcctgtagctttggtgtcttgatcaggattgaatcgcttgcaatttttgagcaaggtgagaggagggcctcccaacttgaagatagaatcctttctcctccagctctcaggaccctggtaactgatgctccactctacttctaccagtgaacatgatttcctttctcagcccctcttcccctcccccgctttaaaaaaaaagaaaagaaaagaaaaaagaaaaaaaaaggaaaagaggaaaaactacgaccttctcagaaaccaaaaacccagccacgaatctcttcaaggttagcactatggccaaaaaaaaatgaatcacagaaaaatgtgccttcaaaatatcactgttaactgcaaagtacagataaaaccatcctttaaatccagctttctcagctgtccttctgttggcaagagaccctctagctcaaagggggaaagtaattttctagtctccaatgcttaatatgacaacagcaaatatctttgaggaaaggaaaaaaaaaaggattaataaatccgaaatggcacttggaaaaattctttcggctgatttgtacagtaaaataataaataaaaccatacaatagtatgtacacaacagcactccttccaagtccagtgcaaccctgggaaccaaaatttatggacttccttaaaaaaaaaaaagcttttacattaaatgttttgaaattcttaaatgagccaatt

SEQ ID NO: 11209 - DNA, 232 bp, Homo sapiens
caccgaagacagcgtcaagaagcgcatcgtggtggccgctcgggacaactgggccaattacttctcccgcttctttcctgtctcgggcgagagtggcagcgacgtgcagctgttagccgtgtcccaccgtgggctgcgactgctcaaggtgacccaaggccccggcctccgccccgaccagctgaagattctctgctcatacagctttgcggtaggtgctgggtgtggagtt

SEQ ID NO: 11210 - DNA, 492 bp, Homo sapiens
  misc_feature (1)...(492): n = a,t,c or g
cattcttctaaatcacagtacatctggttcccagtgcccaggctctcagggcagagggtccagtgtgatcactttgcatggcctctctcccctcctgagcttgtgccagggccccagggctgacctggagaaggaaaatggcagagggtgaagatggggtgtctggtttggggaccatcctggccccccttgtcactgttggcatctcttctgcacagtggcattgctgggaggtgcttactgtgcctattcaaggggctggcagccgcagcctcactgcagatcagggacttggcttcccggttgaccacaggtccaagaacctgcagggtccagcctcccccccatccccagtcttccccaccctggcccggccctccaggtgcagaaacatgcaggccctctcagaatgtggaaggagtgtgtccctaaaatggcctgtgtctgggtcctcttaacaactcttcaagaggttgtaactgcaanttgccc

SEQ ID NO: 11211 - DNA, 327 bp, Homo sapiens
ggtcgactcttataagcctgattatttttaatttgtgattttgcagaactaaagggttatttaggaatgtgtatattgcattgtactagaaatgcttgtattatccccagttacaactagtctcttagttgtagttggcaaaagttcaatttagctttgattctgtcacccagaatttttcagtatcaaggaacttcttccatctcaacccatttcagaaatcaaaatgagtggagctacagcatgtggcaaaaggaataatggataaaataattggacttcatcaaaatgaactcttgtgcatcaaagggcatattaaagtgaaac

SEQ ID NO: 11212 - DNA, 231 bp, Homo sapiens
  misc_feature (1)...(231): n = a,t,c or g
ggcttaacaattgggatacattctgagaaatgcatccttaggtaatttcatcattaggggaacatcatagagtgnnnnnnnnnnnnnnnnnnnnnnnnnnnnnnnnnnnnnnnnnnnnnnnnnnnnnnnnnnnnnnnnnnnnnnnnnnnnnnnnnnnnnnnnnnnnnnnnnnnnnnnnnnnnnnnnnnnnnnnnnnggtggcantatctgngatctaancgtntctnacat

SEQ ID NO: 11213 - DNA, 135 bp, Homo sapiens
  misc_feature (1)...(135): n = a,t,c or g
tcaattagatagctgtattggggaaaaaagtagaccccttccttgataccatatatatagaaaaatcaattccatgtggaatatggtttaaatgcgaaaggaaataatgaaacaggagagtgtnttnatgttttg

SEQ ID NO: 11214 - DNA, 345 bp, Homo sapiens
gaggagctgctggagagactcgcgcagcaacagcagcagctgtacgctcccccacccccagcagagcaggaagagcaggcactgtcaccatcacccaccaacggtaacccactgttgccctttccaggtgcacaggtcagacaaaatgtgaagaacagacttcttgttaaaaaccaggatgtcagtatttcaaacgttcagcccaaaacatccaattttgtaccatccagtgccaacatgcagtatcaaggacaacagatgaaagcactgaaacatttgagacagaccagaacagttcctcaaagtcagactcagccgctgcataaagtgctcccgatcaaacct

SEQ ID NO: 11215 - DNA, 329 bp, Homo sapiens
  misc_feature (1)...(329): n = a,t,c or g
gttgatacagaaaataatgttagatactgaacaaataattttttcttcggtaggaggtcctatattgctgttgtgtatccttagtttctttctttcttttttttttaaatgnnnnnnnctgtcacccantgtgnagtgaagnggcnnganctcanctnactgcancctccccatgtnacgnnnnnnnnnnnnnnnnnnnnnnnnnnnnnnnnnnnnnnnnnnnnnnnnnnnnnnnnnnnnnnnnnnnnnnnnnnnnnnnnnnnnnnnnnnnnnnnnnnnnnnnnnnnncnccatgctggcancaantcctganctcacgtgangcaccg

SEQ ID NO: 11216 - DNA, 290 bp, Homo sapiens
ctttatacagacatttaaaacaaacacacacaaataaaatatttaaattaaataagcattaaatgccattttgtgtgtatgtatatatataaatatacctatagaaaagggacttgctatacatatttttaaattgctttttttcatgtaactatatacatggccactttcctacaccagtccatgtagctctattgcccgctatttaataactgcatatgtgtatgtcataatttattatatggctcccatattattttaatattttttatatttggaacaatgccgga

SEQ ID NO: 11217 - DNA, 1342 bp, Homo sapiens
ctaccactgctactggggggtccttgctcccagagctcccaagatggtggtggctgcttccaagatggtgcaagcctcgtgttctctgacctggggttcttggcctcagatattccaaggaatggaatcttgggccatgtggtgagtgttatagctctattagaagcagtgggtcatggaagagaaccatggaacccagtgactagtgttcagctcaattaggatgaacccaggcacttagccgtgcaggaacaatggcaagcctttagcccaattgggagcagcaatgggcgcctcgctggatcaggagcacagcagacaccctgccagatccagagggatgggagtcagcggcaggtctgcggtggtggcaaacagcagtggtggacggtgagcaaaagctcagctcgagccgtaagaaacacagaccagaagagtgtgcagttgcaagatttaatagagtgaaatagcatgaaaacagagctcccatacaaagggaggggacccaaagggggttgccgttgccggctcaaatgcctgggtttatatcccaatcattgtccctcccgctgtgctctcaggcaatagatgattggctatttctttacctcctgtttttgcctaattagcattttagtgagctctctttactacctgattggtcaggtgtgagctaagttgcaagccccgtgtttaaaggtggatgtggtcaccttccccagctaggcttagggattcttagtcagcctaggaaatccagctagtcctgtctctcagtcccccatctcaacaggaaaacctaagtgctgttggggaggttggccgacgaccgctctaactgcttcctgctgaattggggcgtagtagaggttgtgcagctgagatttcctcaggaggggtgcctttgatgtcattaacatcagatcgtgggctagcaggccggtccaggggtcctgcggtagatcttagtcttggactgcatctggggctccatttgaagaacgatttgtagttttacagctttgattctggaagagacaaacttaacaaggaggttaaagatacagggatttaaatgtatggcctgcagtgcaggggattatttctttggcacactttacaggccctgactatctgcttgatagttttgaaaaggcctggtccagtaaataataatttggccatctgatgggtgctatcaatgcctaagtggaaggtttggtgaagggttttaagtaatttccattggttagctgcaggcaaaagtatttttccttcttcggtggctagccatctggaggggaggaaagtatgtccttgtaaggttcctcattctatttct

SEQ ID NO: 11218 - DNA, 1710 bp, Homo sapiens
agtacagctccggccgccgcgccgcctggctttcgtattcgttgttctcggcgggctgtggggcctccgcgccgcggccgttagtcatgtcggattctggaagttacggtcagtctgggggtgagcagcaaagttattctacctatggaaatccaggcagccaaggctatggacaagcatcacaaagctattctggctatgggcaaacgactgattcctcttatggacagaactacagcggttactccagttatggacaaagtcagtcaggttattcacagtcctatggtggttatgagaatcaaaagcagagctcatatagccagcaaccatataataaccagggacagcagcaaaacatggaatcatcaggaagccaaggtggaagagcaccttcctatgaccagccagactatggtcaacaagattcatatgaccagcagtcaggctatgatcaacatcaaggctcatatgatgagcagtcaaattatgatcagcagcatgattcctatagtcaaaaccagcagtcctatcattcacaaagggaaaactacagccaccacacacaagatgaccgtcgtgatgtgagtaggtatggagaagataatagaggatatggcgggtcacagggaggaggtagagggcgtgggggatatgacaaggatggaagaggtcctatgacaggatcaagtggtggtgaccgcggtggcttcaaaaattttggtggtcacagggattatggacccagaacagatgctgattcagaatctgataattcagataacaacacaatctttgtgcaaggacttggggagggtgtgtctacagatcaagttggggagttctttaaacaaataggaattatcaagacaaataagaagaccggaaaaccaatgataaatctttatacagacaaggacacaggaaagccaaagggggaggcaacagtgtcatttgatgaccctccttcagctaaggcagccattgactggtttgatggaaaagaattccatggcaacatcattaaagtgtcctttgccactagaagacctgaattcatgagaggaggtggaagtggaggtgggcggcgaggccgtggaggatatagaggtcgtggaggctttcaagggagaggtggagaccccaaaagtggggattgggtttgccctaatccgtcatgcggaaatatgaactttgctcgaaggaattcctgcaatcagtgcaatgagcctagaccagaggactctcgtccctcaggaggagatttccgggggagaggctacggtggagagaggggctacagaggtcgtgggggcagaggtggagaccgaggcggctatggtggagacagaagtgggggtggctatggtggggacagaagcagcggtggtggctacagcggagatagaagtgggggcggctatggtggagacagaagtgggggtggctatggtggggacagaggcggcggctatggtggggacagaggaggcggctatggaggagaccgaggaggtggctatggaggagatcgaggtggctatggaggagaccgaggtggaggctatggtggagaccgaggaggctatggaggagatcgaggaggttacggaggagatcgaggaggttatggaggagatcgaggaggctatggaggagacagaagccgggggggctatggaggagaccctggtggtggcagtggctacg

SEQ ID NO: 11219 - DNA, 325 bp, Homo sapiens
gctcaatctaaaatttggtcctcatttggcaaatgaatgaatttaaacattgagaatttgtggcttattcatttatgtagtaattaattcattcatagagatgggactagactgctcaggattgaaaagagttaattttcagctggagagcactttattacttgtgctctccctgaatgacaactttaaattgtttgattggttatcctttgtggtttagctattgcctgcatagtttaatgctgctttttttggaattaccatctttaaactttttgctcacttccctcaatccctctgaaaacttttataaccttttacccat

SEQ ID NO: 11220 - DNA, 486 bp, Homo sapiens
  misc_feature (1)...(486): n = a,t,c or g
ctgtcctgattagaattaattttcataaagagaacaagaatcttgactggttcacccttcaattccttgtgcccgcaacagtgaccggcacatggaaagcattcagggaataaaagcacaatggaaaattaaaacatactcactgcatgcctgccacctatagaaccaaattaaatcactgccaatatggcatggggaaaaccttcccatttttctggaataatgttacaaaggatggaaaataagtgcacatcacctggatggcatttaataaacgctgtgacccagtagtgtacatttcagtgaatattgccaaaggaagtaggccaacatcaggtaatctgagttaactttcctgtacattcgtgtattcgtttcctgattgatcaaaacttggattaattnagtctacaatgtntctttcctggttagatacgaagattatctggctctatccaatttgtggtgtgcttagctgtagaaatc

SEQ ID NO: 11221 - DNA, 279 bp, Homo sapiens
  misc_feature (1)...(279): n = a,t,c or g
gctggaagactatacaaactgatttcaagattacaaagcttcaagaatcaagaaagtatgatattacataaaaacaagagatcaatggactaaattatagaatacagaaaaacatacacatgtatttgtgtgtgtgtgtgtatatatacacaaaaaagccttttttataaacaataaactatttttgttcacaaacatgcaaaggaattcacttgagaaagagtaatttatggaatctattcaacaaatggtgntggaacagnggctcatcatacacac

SEQ ID NO: 11222 - DNA, 547 bp, Homo sapiens
atcacagaccttgatgaaaccagacaagctatagttaatgcctccaggctgcctatgtccatcataattgttggagttggaggtgctgacttcagcgccatggagtttctggatggtgatggtggaagtctccgctccccattgggcgaagtggccatcagagatattgtccagtttgtgcctttcagacagttccagaatgctccaaaagaagcacttgctcagtgtgtcttggcagagattccccagcaggtggtgggctacttcaatacatacaaactccttcctcccaagaacccagccacgaaacaacagaagcagtgaccacttcaacagaattcttttgtgttctgtggagcaatgccatctctcaccccaaatcgtgtatctgtcattctacgtactttttaccctcagcatttatgatgtaaatctctttctctatggattatatctgtttaaagcattctttctaggttattttggggggacagtgccaagtccatctttggccagtcaattcagtgattgatagcaatttacatta

SEQ ID NO: 11223 - DNA, 511 bp, Homo sapiens
gaattcggcacgaggatacctaccagggtctgaagcaggagctgaaaacggacaccctccctgtggtgattatttccaacatgaaccagctctcaattgcctgggcttcagttctctggttcaatttgctcagcccaaaccttcagaaccagcagttcttctccaacccccccaaggccccctggagcttgctgggccctgctctcagttggcagttctcctcctatgtgtgccgaggcctcaactcagaccagctgagcatgctgagaaacaagctgttcgggcagaactgtaggactgaggatccattattgtcctgggctgacttcactaagcgagagagccctcctggcaagttaccattctggacatggctggacaaaattctggagttggtacatgaccacctgaaggatctctggaatgatgggtaaggccttggtcacccttccctcatgggcttgtgcttccgggcttgagagtggagtctctgcaccctcacgtggcaagc

SEQ ID NO: 11224 - DNA, 351 bp, Homo sapiens
gtgaagatgaggcaggggctgctggtgctggcgctggtgctggtgctggtgctagtgctggctgcagggtcccaggtgcaggagtggtaccccagggagtcccacgccctcaactggaacaagttttcagggttctggtacattctggccactgccactgatgcccagggattcttgccggccagggacaagaggaagctgggggcgtccgtggtaaaggtgaacaaagtgggccagctccgcgtgctcctcgccttcagacgataggcagaatgtttcgagcttccagagtctgaaggaattcatggacgcttgtgacattctggggctctccaaggccgccgtcatcct

SEQ ID NO: 11225 - DNA, 886 bp, Homo sapiens
aattcggcaccaggcagcagctgcagtattaccactacatccccccagcacactgcaaagtaaaacctaattttccctttctactttttatgagagccagtgaacaaatggatggtgataatactacacacccaaagaatgccccagagagtaaaaaaggcagttctcccaagcctaaaagctgcatcaaggcggcagcaagccaaggagcagaaaagacagttagtgaagtctctgagcagccgaaggaaaccagcatgaccgagccctcagaaccaggaagcaaagctgaggcaaagaaggccttaggaggggatgtaagtgatcagagtttagaaagtcatagtcagaaggtttcagagacccaaatgtgtgagtccaactcttctaaagaaacctctctggccaccccagcagggaaagaaagccaagaaggacccaaacatcctactggtcccttcttcccagttttgagcaaagatgaaagcactgccctccagtggccatcagaactattaattttcaccaaggcagaaccctccatttcatacagttgtaaccctttatattttgactttaaactttcaaggaacaaagatgccagaactaaaggaacagaaaaaccaaaggatataggaagctcctcaaaggaccatctccaaggcctagatcctggtgagccaaataaaagcaaggaagtgggcggagagaaaatagtacgttcctcaggaggcagaatggacgcacctgcttcagggtctgcctgtagcggcctgaacaagcaggagcctgggggtagccatgggtctgagacagaagacacagggagaagccttcccagcaagaaagaacgatctgggaagtcccaccggcacaaaaaaaaaaa

SEQ ID NO: 11226 - DNA, 352 bp, Homo sapiens
gctaaaacctaagtcagctcttgggagctgtgcactggtgctggcacaccgctgacatttagtatcccactgacattagcacaccgctgacattagcaccctgatactagaatgttaaggatgtgccagccctgctttccactgtgtgcgctgctggctccgggcttctggagaaatcttgtctcgagcacttatagtcactcttctgttaaagagatatgaaaatataggctgttggcgatcaggctgcatagcccagttgtttctttctgcccatccagatgtaaacctgcatttctatgattttctgcttccctgtggaaagggagtgcagagagcaacatattgttat

SEQ ID NO: 11227 - DNA, 327 bp, Homo sapiens
ggagagagctagaccatgagcttcaccctgtcaaatctttgcactgtaaacagcagacccacgctcctcttttccaagatcctgcatccaggcctgccaaagcccagagctatttgtagatgttggcgaggacacgtctctctgtctgctcagtcaataattcactgcaataccaggtattgcaaaagaaggcctttgccttgccttccaataagagttacagggtagaaagcagaaacctgccctgcagctgccatgaaccccacctgagcaggcaagttaggctacacttgacagtggaagctcatcagccacagtgaagcagcc

SEQ ID NO: 11228 - DNA, 152 bp, Homo sapiens
gaaaaggcatcaaaattgaaaagaaagaagtaaaattatctctatttgcagataggatcttataagtagaaatgcctaaagagcgtgtgtgcacacacacacgttagaactaataaatgaggccaggcatggtggcttgtgcctataatccc

SEQ ID NO: 11229 - DNA, 177 bp, Homo sapiens
ttttcgtttgtttctttgttttgagatggagcctgggtgactaagtgagactctatctcaaaatgaaattaggatcaacttgtcaatttctacaacaacaacaacaaaaacccctgttgggcaccttgattgagattgcattggaatttatattaaaactgttggggaggattggac

SEQ ID NO: 11230 - DNA, 1290 bp, Homo sapiens
ttttatcaagagtattaatttattgggaatgagctgaggcgattttccccagagaaacaaaaaggtataactttaacaaatatatatttaaagaaagaaatattattgattctatagaaaaccatttaccaactgaaaggacacgaagtctagctccggacaaaagctgttagaggcccaggctgtctgcctgcggtccttcctccggccagagtggaggccccaggctgctagcacaggtggaaggctggggcccgggggcgggtgctctgccgggggctcctccgtgcttctctcctaagttctctgcgccccaagaactcgaggttgtgccttgctctcggcggccgtgtcctcctcctggcgtggctgcgtcccagggcgcgggtgggtttggtgaatgtgggtgtgtcagcgtggcagccacgtggaagcagggcatgtagcaggccaggccacgggcttgcagctcctctgagggtgtgcctggccccctctccaggggctgtgcaggcagcccatccaccccagtggagttcccacggacgcttctgctcatggtccaaggctgtgttgtgtggtcattctcgccctcccttttcctctctcctcctgccccctccaagaagtactgactggtctcctctatcgtgtttgctgatccacagtgttgggcacaactttgacgtttcttaaaaaaaaaatttaaaaaatgccgaaaaccagcgattgtggtgtggggcgggtggaggcggctggcggaggtggcgtcccggcgtgcagggccccttcctgctgtctcaccccgtgtttccctgcgagtggacgtgcccagctgtccccccaggcctctcctcagagggcggcacaggctgggctccagcaggtgggcaggggaggtctgggcaaggcgctccgtcggctgtcaataaacagcaggaaacagaggtgcctggctcactttttgggggcacatgtgttgggggagatgggactggaggccagcagcttgggtgtgacgagttgcctcctagcagggaggggaggccccggagtgggccgaagtcctggggtccaccaaaggaaactgccccatgcccccccactcacagcagccagtgcctgtgcacaccaacctcaaggccacacacagcccccttgtcccgaggagctgtccccactcacagccacagtctgtggagcatttatttcaaccaggaggtaaccaaatctacatacagtctaaaaacggtagaaaaggtgagtaaaaaggccctcgctccatctagg

SEQ ID NO: 11231 - DNA, 295 bp, Homo sapiens
  misc_feature (1)...(295): n = a,t,c or g
gacatgctcttttaaacaactagatctcatgtgaactcagcgagatctcactcattacctcgannnnnnnnnnnnnnnnnnnnnnnnnnnnnnnnnnnnnnnnnnnnnnnnnnnnnnnnnnnnnnnnnnnnnnnnnnnnnnnnnnnnnnnnnnnnnnnnnnnnnnnnaggangccangtgnggnggcttannnntgnaatcncagnactttngnangctgatnnnnnnggttcancttntntttgnattntagnnacgttttaaanatgttaangatnttaccttcnantaattt

SEQ ID NO: 11232 - DNA, 1087 bp, Homo sapiens
tttttttttttttttgtaagactctgttatgattttatttcttcaattgttccaatcacagtttctaatacagaaataaaactattcagcgtctccgttcttgcttcattttgtttcacagagatctgcatttctgagtttccaggctccaatagcagttctgttaagaacagacagccagtatcatcctgagcactgaggtatgctttccatggccgagacccagccctactcattgcgatggtctggatgttcactacttgaagagccatctggagggtgtcaggatgggaattctccccgccaaggcaacacttgctgatgagcaactttaaggctaagccaagttttctcaaaataatcagcagtaagctggcgattggggactagcatgagggctccagaatcagggagttcttgtaccctctccttgttctcttcaggaatcaagggtcctgatgcggcaaaggatgaagttttaggaagctctgggtcacaacgctctgccccctggcatttagagatagttgcccagtgggctttgccatacactggcaccagtgtgttgaagtctgaggcccagctattcacaggtctttctgccggatcctccaaaagtccaagagtagggtcagatttagggctacacagaatccgcttaacttcatcaatgccaactaagaggaggcgataatagaagagacctcggtcccgtacagccatatctttttcttcctctatgcagtaatacaacaaacgtcctagcatgtcctggcactcagcaggtcgggagaggaaaaggcgcagcgaagcagtgagcagctccatcttaacagctggaaatgtttccgacttcacattctcaacaaagtcctctaacacataaggagcattaggaattctttccccatggacaccaagtagccaaataagtgcttgcttcccctcactatcttgaatgttctcttcacagccgggcagggcctgacatacagcttcagtacactgaggacacaaccaaaccaggtctcggaaagtctgcaccaccactgtggtaatgtgctcttgtcgaagacccagcaactct

SEQ ID NO: 11233 - DNA, 1555 bp, Homo sapiens
  misc_feature (1)...(1555): n = a,t,c or g
tttctttaaccgtgtggtctttatttcagtgccagtgttacagatacaacacaaatgttccagttagaaggaattcaaacggaatgccaaggtccaagccaggctcaagaaataaaaggggaggtttggagtaatagataagatgactccaatactcactcttcctaagggcaaaggtacttttgatacagagtctgatctttgaaactggtgaactcctcttccacccattaccatagttcaaacaggcaagttatgggcttaggagcactttaaaatttgtggtgggaatagggtcattaataactatgaatatatcttttagaaggtgaccattttgcactttaaagggaatcaattttgaaaatcatggagactattcatgactacagctaaagaacggcgagaaaggggagctggaagagccttggaagtttctattacaaatagagcaccatatccttcatgccaaatctcaacaaaagctctttttaactccatctgtccagtgtttacaaataaactcgcaaggtctgaccagttcttggtaacaaacatacatgtgtgtgtctgtgtgtatacagcaatgcacagaaaaggctaccaggagcctaatgcctctttcaaacattgggggaaccagtagaaaaaggcagggctccctaatgtccattattacatttccattccgaatgccagatgttaaaagtgcctgaagatggtaacccagctagtgaggaataaataccccaccttgcccagtccacagagaaacaacagtagaaagaaggggcaactctttgctgcagagacaaagtgagtgtttttccgccatggattgcagtcctctcctccagaccagctgcttatttcctcaggggcccagggaatgttgattctggctgtaaatgtgggaggggtggagaagtgcggaaaaaggagaagaggaagagtgcaaagtagcctccagaagcagccagcctcaacagtggaggagaggacattagtctttaacaatgcttcaaggtcagcagtaactttaggaaaatcctcctcagcagttctcttcagctcctcatgcccgtggtaacagttgggggggacttgccagcaatcacaacctccttcccagagttcctttgattgagtgggataaaagaatgagaatggtgccaaaccctcattgccaggactgagggggaaagttgttcacctctgctagatcttgcattgctgagcccttgtgattatatgtaagcttgatccgcattcgcagctgttgcttctgagggttcagaactttaatgacttgtgtgatggtccccgtgttaaatgctgggacaatgctgctgctaggagacaagagctgcagctggaatgtctttggtactgcagcttggaaaacaaagtccgtcatatctagctctgtgctgttggaggcctgtatcgttatcactgttacactggggttggtatttgaccgttcaaaggtgaantctatcttcaagccantcttactgtatgctgtgatggaggggatgcctgcagcagtgcc

SEQ ID NO: 11234 - DNA, 332 bp, Homo sapiens
ggaaccacagtcacagccacagccttccccagaacttctgcttccaaattctttgaagccagaagaagggcttgaagtatggaaaaactgggcccagaccaagaatgctgaactagagaaggatgctcagaacagattggcacccattgggaggcgccaactgctgcgattccaggaagatctcatctcctctgctgtggcagagttgaattatgggctctgtctaatgacacgggaagctcgaaatggagaaggtgaaccctatgacccagatgtgctctactatattttcctgtgtattcaaaagtatctttttgaaaatggaagggtag

SEQ ID NO: 11235 - DNA, 4712 bp, Homo sapiens
gaattccgggcccccggccgtccctcttaaggctcttcctccgctccgccagtgtccggccgcgggccggccttagtgactggggcggcgggccccggggccgcggcgtggggcgggcaggcggacgccggccgcgggctgctttcgtcggctcccaagctctcccggagcgagcagccgcccgcgagccgccgcggagcctcctcgcccgctcccgccggcgagcaagatgatgtgcgaggtgatgccgaccatcagcgaagcagaaggcccccctggaggaggtggaggccatggttccggctccccttcacagccagatgcagattcacattttgaacagttgatggtctccatgctagaagaaagggaccgccttcttgatacactgagagagactcaagaaacgctggccttaacccaggggaagttacacgaggttggtcatgaaagagattccttgcagagacagctcaacacggcacttccacaggagttcgcagcacttactaaagaactcaatgtatgcagggaacagctccttgaaagggaagaagaaattgctgaactgaaagcagaaaggaataacaccaggctgctgttagagcatttggaatgccttgtctccaggcatgagcggtctcttaggatgaccgtggtgaagagacaagcgcagtctccagcaggcgtgtccagcgaagtggaagtgctgaaagcactgaagtccttatttgaacaccacaaagctctggatgaaaaggtgagagagcgattacgagtagcacttgaaagatgtagtttgttagaagaggaattaggtgccacacacaaagagctaatgattcttaaagaacagaataatcagaaaaaaactctaacagatggagtgctggacataaaccatgaacaagaaaatacaccaagcacgagtggaaagagatcttctgatggttctttaagccacgaggaagaccttgctaaagtaattgagctccaagaaatcataagtaagcagtcaagggaacagagccaaatgaaagaacgcctggcttccctttccagtcatgtgacagaactggaagaggatctggacacggctagaaaagatctcatcaaatctgaagaaatgaacacaaaattgcaacgagatgtccgtgaagccatggcccaaaaggaagatatggaagagagaatcactactcttgaaaaacgctacctcgctgcacagcgtgaagccacatctgtgcatgacctcaatgataaacttgaaaatgaaattgcaaataaagattctatgcatcgacagactgaagataaaaaccgccagttacaggagcgcttggaattggcagagcaaaagctgcaacagacactgaggaaggcagagacgctcccggaggtggaggcggagctggcccagagggtggcagcgctttccaaggctgaagagagacacggcaacattgaagaaaggttacgacagatggaagcacagttggaggagaagaatcaagaactgcagcgggcaaggcaaagagaaaaaatgaacgaagaacataataaacgtttatcagacactgttgacaagctgctttcagaatctaatgagaggcttcaacttcatcttaaagagagaatggctgctttggaagataagaactctcttttaagagaagttgaaagtgcaaaaaagcagttagaagaaacacaacacgataaggatcagcttgtcctaaacattgaagcactgagggctgaactagaccacatgagactaagaggtgcttcacttcatcatggccgaccccacttgggcagtgtcccagatttcaggttccccatggcagacggccacacagactcctacagcaccagtgcagtgctgcggcgcccacagaaaggccggctggcagccctgcgagatgagccttccaaggtacaaactcttaatgagcaggattgggaacgtgcccagcaagctagtgtcttggcaaatgtagcacaagcattcgagagtgatgctgacgtgtctgatggtgaagatgacagggacactctcctcagctcagttgacctgctatcgcccagcgggcaggccgacgcgcacacactagccatgatgcttcaggagcagctggacgccatcaacaaagagatcaggttgattcaggaagaaaaagaaaatacagagcagcgggcagaggagattgaaagtcgagttggcagtggaagtctagacaatcttggtcgttttagatcaatgagctccattcccccctaccctgcttcctcgcttgctagctcctcccctccgggcagtgggcgctccaccccacgaaggatccctcacagcccagctcgggaagtggacagactgggcgtcatgacccttttgccaccttccagagaagaggtacgagatgacaagacaaccataaagtgtgaaacctccccgccttcctccccgagagcccttcggttagaccggctgcacaaaggggcgctgcacaccgtcagccacgaggacatcagggacataaggaactccacaggctcccaggatggtcccgtgagcaaccccagcagtagcaacagtagccaggactcgctccacaaagccccaaagaagaaaggcattaagtcctccattggccgcttgtttggcaagaaagaaaagggccgacctggacaaactggcaaagaagcattaggacaagctggtgtttccgagacggataactcatctcaggatgccttgggacttagcaaattggggggacaggctgaaaaaaatcgtaaacttcaaaaaaagcatgaattgctggaggaagcccggagacaaggtttaccttttgcccaatgggacgggccaacggttgtggtctggctagagctctgggttgggatgccagcctggtatgtggctgcctgccgagcaaacgtgaaaagcggggccatcatgtcggccctgtccgacacagagatccagcgtgagattggcatcagcaacccccctgcacaggctgaagctgaggctggccatccaggagatcatgtcgctgaccagcccgtctgccccgcccacatctagaacgacactcgcctatggggacatgaaccacgagtggatcggcaacgagtggctccccagcctgggcctcccccagtaccgcagctacttcatggagtgccttgtagacgccaggatgctggaccacttgaccaagaaagaccttcgagggcagctgaaaatggtcgacagttttcacagaaacagtttccagtgtggaattatgtgcctgagaaggttaaattatgaccggaaagaactggaaagaaaaagagaagaaagtcagagtgaaataaaagacgtgcttgtttggagcaatgatcgagtgattcgctggatcctgtcaattggccttaaagaatatgcaaacaatcttatagagagtggtgttcacggagcacttctggccttagatgaaaccttcgacttcaggtgcactggcactgctgttacagatcccgacgcagaacacacaggctcgtgctgtcttggaaagagaatttaacaaccttttggtcatggggactgatagaaggtttgatgaagatgatgataaaagctttaggagagcaccttcatggagaaaaaagtttagaccaaaggacattcgtggcttagctgctgggtcagcagagactctccctgcaaacttccgggtgacttcttctatgtcttccccctctatgcagccaaagaagatgcagatggacggcaatgtatcaggaacacagaggttggattctgctacagtcaggacttactcctgctaaagtctcctgttgtttacccacactacttctacagatgattatgcagcatttgaatccaacaaagactacattttggaatccagtggaatctttaatcttgttaatacttgttatatggaccctaagatattttattacagagtttttaattagtgaaaaattcatgaataccatagagaaaatattttagaatttaatgtttcttatatttatgtaaacttatgactcttcatttatatagttacttactttttcatgtatatccaggctataaatatcctttcaaatcatgttcttatacctaattttagtctttcaaatgaatgtactgtaatgcttgtatgtataaatcctatgaatagagggcttttgtaaattatgcatttattgtaattatcattaattttttaatgataaaccatgacaaaggattttacgtttataaaattatgacaggaagccatgtgcattatcctttacggacgcagccctagctctacagcaatcatcctgaaataagcatacctaatttcaagcaattgttgtattttcatgactgaccttaactgtactttttctagcaagagatgctttattctgcagcatgaacagatttaaaatggctggtgttaaatatcagctcctaataagatgtggactgaaaacactatcacaacactatgagaagcccctagcacggttaacgctttcctagcctagtctctggaatttggggagcttgtcttcagtggctgagactgtgagctgggagcagttctctcagctggagagactcgggatggggtaacctggggaccagtctagcccctgcaccctcttcccttgcctctgctccttgggaacggggtgga

SEQ ID NO: 11236 - DNA, 60 bp, Homo sapiens
gagataatgatgatcacatagtcttgatgtacggacattaaaagccagatttcttcattc

SEQ ID NO: 11237 - DNA, 1571 bp, Homo sapiens
aaaaaaagaaaaagaacaaagaaaccctttatttcattaaatgattttttctggtggttgtcaagaaacaaaagaccaaaagagcctttttgtctttcttttttattttttaagtattggaataagtctaaagaaaagaaagtgccttattttccttcatggtcattcagtcaagtgtctcataaagatcagctcctccctcagaatacaagttaatgcatgttactcagtcgcccagtatgtgaaagaagatatgagggagacaaatgagttgatagtttgaattataggatttttgccacgttaccttgatgcaaatttgccaaatctgatactgtgaaaagatttgataacttttctaatgcctgactagtaagttttaaaacatcattctttaaaagaatagtttaatacttttggttattccaatcttcaatgttaacccaaaggattctgagataaaaattatgtgtcatctaaacttcagtttacagacaaaattagagctttgttttatttggagaagggggatgcattcatttgattttgttttttgtttttaattaattgaatataataggatacctagcaaatgttttcacaaaagtgaatctttgtgattttcattctagaaaacaatgttttaaatcacccaaatttaatcacatgtctttatatcataccagataactggtgtagtgtatccttttactgtttcaataacctctgcctcccccaccccttaactttaaaagaatgtgaaaaactagcatcatagtgcatataaatactcaaccacatttcagcttaagcttctaatttctcaagaagttgaaacagttagttatgtagttgaagcaatttgtgtgcaaagcctacatctaaacacttgagtgaataatcattaactgctcagtaccagacgtggcaaatctcaagtgacagtggaccccccccccaccgcccagcttatcaactcgtcccctcttccacaccttcccagcatcacagtcagaggtcagcaggaagctgagtcattaccttcttggtgacctcccccaccatcttgtctcacttggaaaccgttgtcagtttatttactatgcaatagacattcattgttttgtatccagctagctttggtttaatatgccactgctttgtctttctgttacacatacagttttgatttatttacaatatatgctgtgccattttgatttttatattgtttggttggttgaataaatttgcgacactcaaacacttgaggtgatagttgttaaaaacaataccagtatttgatccagtttcatctcaactatgttatacctggacattttagatgtttatcaaaggtcttttatggggaagaaagtaaatgtatgaaataataaatgtgtgacatttatagggaatgttggctctgaacaaacttttgaaaacttggttgacaaaattttggatcaactgaaaaaagcatgacttttgaaatctctgaatgccttggttctcagtattatcattctttattgaatttatttcttattacaatatgtagtttttaagac

SEQ ID NO: 11238 - DNA, 1464 bp, Homo sapiens
ctgctctttctggttccgctgctgtgggccccggctgcggtccgggccggcccagatgaagaccttagccaccggaacaaagaaccgccggcgccggcccagcagctgcagccgcagcctgtggctgtgcagggccccgagccggcccgggtcgagaaaatatttacaccagcagctccagttcataccaataaagaagatcctgctacccaaactaatttggggatttatccatgcatttgtcgctgccatatcagttattattgtatctgaattgggtgataagacattttttatagcagccatcatggcaatgcgctataaccgcctgaccgtgctggctggtgcaatgcttgccttgggactaatgacatgcttgtcagttttgtttggctatgccaccacagtcatccccagggtctatacatactatgtttcaactgtattatttgccatttttggcattagaatgcttcgggaaggcttaaagatgagccctgatgagggtcaagaggaactggaagaagttcaagctgaattaaagaagaaagatgaagaatttcaacgaaccaaacttttaaatggaccgggagatgttgaaacgggtacaagcataacagtacctcagaaaaagtggttgcattttatttcacccatttttgttcaagctcttacattaacattcttagcagaatggggtgatcgctctcaactaactacaattgtattggcagctagagaggacccctatggtgtagccgtgggtggaactgtggggcactgcctgtgcacgggattggcagtaattggaggaagaatgatagcacagaaaatctctgtcagaactgtgacaatcataggaggcatcgtttttttggcgtttgcattttctgcactatttataagccctgattctggtttttaacaagctgtttgttcatctatatttagtttaaaataggtagtattatctttctgtacatagtgtacattacaactaaaagtgatggaaaaatactgtattttgtagcactgattttgtgagtttgacccattattatgtctgagatataatcattgattctatttgtaacaaggagttttaaaagaaacctgacttctaagtgtgggtttttcttctctccaacataattatgttaatatggtcctcatttttcttttggtgcagaaccgttgtgcagtggggtctaccatgcaattttctttcagcactgacccctttttaaggaatacaaattttctccttcatcacttaggtgttttaagatgtttaccttaaagtttttcttggggaaagaatgaattaatttctatttcttaaaacatttccctgagccagtaaacagtagtttaatcattggtcttttcaaaactaggtgtttaaaaaaagagacatatatgatattgctgttatatcaataacatggcacaacaagaactgtc

SEQ ID NO: 11239 - DNA, 580 bp, Homo sapiens
tctgaacctaatccttacttctatcagaatcttggagaggcagaatatgtagtagcactttttatgtacatgtgtttacttggttaccctgctgacaaaatcagtattctaacaacatataatggccaaaagcatcttattcgcgacatcatcaatagacgatgtggaaacaatccattgattggaagaccaaacaaggtgacaactgttgatagatttcaaggtcaacagaatgactatattcttctttctctggtacgaaccaggggcagtgggccatctgaggggatgtccgtcgcttggtagtggccatgtctagagccagacttggactttatatcttcgccagagtatccctcttccaaaactgttttgaactgactccagctttcagtcagctcacagctcggcccccttcatttgcatataattccaacagaacctttcccaactacttagaagagaattggagagagaccatctcatgaagtacaaataataaaaaatatgccccagatggcaaactttgtatacaacatgtacatgcatttgatacagactacacatcattatcatcaga

SEQ ID NO: 11240 - DNA, 2191 bp, Homo sapiens
  misc_feature (1)...(2191): n = a,t,c or g
atggcggcgggggggacagggggcctgcgggaggagcagcgctatgggctgtcgtgcggacggctggggcaggacaacatcaccgtactgcatgtgaagctcaccgagacggcgatccgggcgctcgagacttaccagagccacaagaatttaattccttttcgaccttcaatccagttccaaggactccacgggcttgtcaaaattcccaaaaatgatcccctcaatgaagttcataactttaacttttatttgtcaaatgtgggcaaagacaaccctcagggcagctttgactgcatccagcaaacattctccagctctggagcctcccagctcaattgcctgggatttatacaagataaaattacagtgtgtgcaacaaacgactcgtatcagatgacacgagaaagaatgacccaggcagaggaggaatcccgcaaccgaagcacaaaagttatcaaacccggtggaccatatgtagggaaaagagtgcaaattcggaaagcacctcaagctgtttcagatacagttcctgagaggaaaaggtcaacccccatgaaccctgcaaatacaattcgaaagacacatagcagcagcaccatctctcagaggccatacagggacagggtgattcacttactggccctgaaggcctacaagaaaccggagctacttgctagactccagaaagatggtgtcaatcaaaaagacaagaactccctgggagcaattctgcaacaggtagccaatctgaattctaaggacctctcatataccttaaaggattatgtttttaaagagcttcaaagagactggcctggatacagtgaaatagacagacggtcattggagtcagtgctctctagaaaactaaatccgtctcagaatgctacaggcaccagccgttcagaatctcctgtatgttctagtagagatgctgtatcttctcctcagaaacggcttttggattcagagtttattgatcctttaatgaataaaaaagcccgaatatctcacctgacgaacagagtaccaccaacactaaatggtcatttgaatcccaccagtgaaaaatcggctgcaggcctcccactgccccctgcggctgctgccatccccacccctccaccgctgccttcaacctatctgcccatctcacatcctcctcagattgtaaattctaactccaactcccctagcactccagaaggccgggggactcaagacctacctgttgacagttttagtcaaaacgatagtatctatgaggaccagcaagacaaatatacctctaggacttctctggaaaccttaccccctggttccgttctactaaagtgtccaaagcctatggaagaaaaccattcaatgtctcacaaaaagtccaaaaagaagtctaaaaaacataaggaaaaggaccaaataaaaaagcacgacattgagactattgaggaaaaggaggaagatcttaagagagaagaggaaattgccaagctaaataactccagtccaaattccagtggaggagttaaagaggattgcactgcctccatggaaccttcagcaattgaactcccagattatttgataaaatatatcgctatcgtctcctatgagcaacgccagaattataaggatgacttcaatgcagagtatgatgagtacagagctttgcatgccaggatggagactgtagctagaagatttatcaaactagatgcacaaagaaagcgcctttctccaggctcaaaagagtatcagaatgttcatgaagaagtcttacaagaatatcagaagataaagcagtctagtcccaattaccatgaagaaaaatacagatgtgaatatcttcataacaagctggctcacatcaaaaggctaataggtgaatttgaccaacagcaagcagagtcatggtcctagaactctgcttggaccagaagatgtgaataaacttaagcttatttatttaaaattccaaatgagttgctctagattctaaaaaggtgaaactttggctgttgaaagtttcagtattagtaaacttgagttactttttcttttccattttactttgcttccctgcatttcggaagctgcctctttctgggtcctcnccactnggggccagcccccaagnacttggtgttttggttaataggnaataattttctttaagggaattggggga

SEQ ID NO: 11241 - DNA, 589 bp, Homo sapiens
tttttttggtgtttttgtttttgtgtgtgggtgtgtgtcaagttttaatacacgctagaacaagccacaagagggtgctgctaggccagaactacactcaccccaagcccaccccaggaaccccaaagcagaggtcaggaactgagtccacagctcctggggaggcccaggcacccctgaacgcttctgtcacctctgacctcccatcttgccctcagcctagactcgtcccttccctaccagtcccttccctagagaaaggcccctcccctccctgggtaccaggacttcctccctcaagggacagaggagcagatagagagcgacggttcagggccctgagggtccggctctccaggagaagctgggctctgaaccagggtgggtaaacgttgcagaagggctgtcaggacactcaggcgcccacacactccacgtagttggcagggtacaggccaatgcggccactctgcaactggccttggcaccagccctgctcgtcctcctcactcatcttcagcagctcctcccctgctcggaagctcagctcatcagcttcctggccagcgtagtcatagatgccctcacc

SEQ ID NO: 11242 - DNA, 652 bp, Homo sapiens
gactgtcctagttctgtccgaacacatgaaagaactcatactggagaaaaaccctatgaatgtaaagaatgtgggaaagcattcaattatgccagttccattagaatacatgaaagaactcataccggagaaaaacccctatgaatgtaagcaatgtggaaaaacgttcagttattccagttcctttcaaagacatgaaagagctcataatggagataaaccttacgtaaagaatgtgggaaagctttcatttatcacacaaccttcgaatacctgtgaaaatgaatagtggaggacaggtctacaagtatctacatatctaaagaatatggaaagtcttcagtttgctttctgggtttcagacttgtttgggagctcacccctttctcctgtttctcacttttggaataggaatctctatcctgtgcctgtctcatattttggaaatacatgactagtttggttttcaccggttcggagctgaagaagaattttgcctcagcatgaattgagtctcatccatatctgagtgatgtgatattgagatgacactttggagtttgagtttaaacattaggcttcatgctggaattaactgagacttttgaggcctttgggatgagatgaatatattttacatgtgatgacatgg

SEQ ID NO: 11243 - DNA, 615 bp, Homo sapiens
tttttttttttttttggcccttagtgacagtcggtcacttttattctattgattattctcctgtgtttataatgcgggcggcagggtgggggtttctttaaaatgcttctcctgagcctaaagagcctccccacccagcccctgtctgagggaaggggtagagcatacacgcccccctggcatctctggagaggaagaaggatggggtgggcagaaggggctgcccccaaacggctccccaggctggcacttctgggcctctgcccactcagtccctgttgacctcccccaccccccgcgaaagaggaaccaaaaccagaaaagaacaaagcatcctccgccccggacccttgggcatgggtctcccccagccgtgccactttcctaccaacagcctcctctcctctctgggaatcttgtcccttcttccccatccccttagcaccggcctctgccctcgtgggagcctctgtcccaactgcctggctttccgcaccacctgggggtgccctgaggttcatccttcctgcctgttgtctagaaggcccggggcactcactgagcgccctccgctggctatggcaccatgtgtcagccctgcctcgagacaggaca

SEQ ID NO: 11244 - DNA, 490 bp, Homo sapiens
ggaaagaacggtactgttaaattctgagtgtttttgtttcagtggggtggagttagtaatagcttttccttgtccaataggaagtgggtaaattgccaaaccactgagatcactattgttgactcagattcaggaataagattagcgtaggaaagctgtcgagtaaccctggaattggggctggttgtgattctgtttgctcttggctggtgaggaggctatgagttggtatagccagtggtcccaggatcctgaatgtgttgctaaaccatatactgctttccatgggctgtttttaggggccagggttggaggagatatggtgttgggtagcaacttgccctgtaatagatggagagctgttttctccatggctcctgcagtgtgagaggtgaggtgccagcttagagaaaattccagatcctcgttcatgattcttaagcagatccagattcttaagcagatccagattcttaagcagatatagcac

SEQ ID NO: 11245 - DNA, 472 bp, Homo sapiens
gcgggtcccgtctcgacaggtcttctctgttggttgaaatgtctatgattttatctgcctcagtcattcgtgtcagagatggactgccactttctgcttctactgattatgaacaaagcacaggaatgcaggagtgcagaaagtattttaaaatgctttcgaggaaacttgctcaacttcctgatagatgtacactgaaaactggacattataacattaattttattagctctctgggagtgagctacatgatgttgtgcactgaaaattacccaaatgttctcgccttctctttcctggatgagcttcagaaggagttcattactacttataacatgatgaagacaaatactgctgtcagaccatactgtttcattgaatttaataacttcattcagaggaccaagcagcgatataataatcccaggtctctttcaacaaagataaatctttctgacatgcagacggaaat

SEQ ID NO: 11246 - DNA, 1161 bp, Homo sapiens
ccagtccaggctgtgaatgttgggcagttgctggccgtaaatgccgaggaggacgcctggttacgggcacaggtcatctcaacagaagagaacaaaataaaggtatgctatgttgactatggttttagtgaaaatgttgaaaaaagcaaagcatacaaattaaacccgaagttttgttcactctcatttcaagctacaaaatgtaagcttgcaggcttggaagtcctaagcgatgaccctgatctagtgaaggtggttgaatctttaacttgtggaaagatctttgcagtggaaatacttgacaaagctgacattccacttgttgttctgtacgatacctcaggagaagatgatatcaatatcaatgccacctgcttgaaggctatatgtgacaagtcactagaggttcacctgcaggttgacgccatgtacacaaatgtcaaagtaactaatatttgctctgatgggacactctactgccaggtgccttgtaagggtctgaacaagctcagtgaccttctacgtaagatagaggactacttccattgcaagcacatgacctctgagtgctttgtttcattacccttctgtgggaaaatctgcctcttccattgcaaaggaaaatggttacgagtagagatcacaaatgttcacagcagccgggctcttgatgttcagttcctggactctggcactgtgacatctgtaaaagtgtcagagctcagggaaattccacctcggtttctacaagaaatgattgcaataccacctcaggccattaagtgctgtttagcagatcttccacaatctattggcatgtggacaccagatgcagtgctgtggttaagagattctgttttgaattgctcggactgtagcattaaggttacaaaagtggatgaaaccagagggatcgcacatgtttatttatttacccctaagaacttccctgaccctcatcgcagtatttaatcgccagattacaaatgcagacttgtggaagcatcagaaggatgtgtttttgagtgccatatccagtggagctgactctcccaacagcaaaaatggcaacatgcccatgtcgggcaacactggagagaatttcagaaagaacctcacagatgtcatcaaaaagtccatggtggaccatacgagcgcttt

SEQ ID NO: 11247 - DNA, 727 bp, Homo sapiens
tttttttttttgtgcgcaggcagcttaagttcataggaagaaataaggttctgatatgtttagagtgcacattttaaaacaacaaaataaaaatttcaagcatgtgataaaaatattgatttttataatacagtattgctttataaatatagatggaaaagctataaactttactggtctttggtgcatccagagagggataaataatttgccatttgtaaattagaaatccaaattttttcttttgttataaaagtccattacatgaggcgtgtgtgtgtgtgtgtgttgcttaaaatataattaacacacacatcaggttcagaatcagacccaccaagtggtacagcacagtaacaacccatggaagcttgggtctgtgacctggaaaattctactatgggtccaacacagcctctgaccactgagagtaggagagatacttgttaagcagcactccagctgaccccccggcagtcataaaattaagtgcataacacaaaaagaacaggggaaaatagagaaaatattttatgtcactaatctataggccagatccaaagccaattccactgtgaaactcaattcttgcccccactactttcagtatcactggaacaaacacatcgtcaatttctaacaatcgtttctcaaaaaggtaagctgagtaaataagttgtataaaacaccaccaatctagctttacaaagattgtgtttgacgggtt

SEQ ID NO: 11248 - DNA, 495 bp, Homo sapiens
ggaaaaagaacatgatttagaacgacggtatgagctgctgaaccgggaattgagggcaatgctagccattgaagactggcagaagaccgaggcccagaagcgacgcgaacagcttctgctagatgagctggtggccctggtgaacaagcgcgatgcgctcgtcagggacctggacgcgcaggagaagcaggccgaagaagaagatgagcatttggagcgaactctggagcaaaacaaaggcaagatggccaagaaagaggagaaatgtgttcttcagtagccatcagatcagaaagaatctctcccaacattttagagtcttgcttcccaaaccagaaaaagtcagactcattgttgatttaaaacttttaacattttgtttggctggattgtactactttacctctactttaccaccaccacccttttcctccctcctttccaaataatatacagaactccaaaatagcttcatttaaggatttttttgtgagt

SEQ ID NO: 11249 - DNA, 875 bp, Homo sapiens
aatgtggtacaatattattttttgacactcaaaatattatttttatttccgaacaagattgtaatatctcctggtttctcttacagagacccatactactcggaaggcaggatatgccagttttcctttgtggaaaagtgtatccaggcagcaaacttaatgaggagtgggcagttttgtccttaaaaaactgcagggaagggttctttccagggagtggtagttggtgctccaggtgctggcagggacaggacagctgattgatagaagtgagggctctaacaaagttcactatttacatcaaaatgacttgatgggggctctgggcctctgggcctttgttaaaagatgatgctgaaccatgtcttgaaaccccaccagcattagggcttaggtactaagcaagtccgggactgtatcccgggcttcagtgactgacccaatcacaacacgtgccccagttgaaatagtgactgtaacagatcacccacttttaaatgctccccagaagaaatgcagcacacaaaaactagctgcagaaaagccctttccccacatcctcctctgcctatgtgggcactgcaggcaactgccctgactgtgaaagttcaccccttgtgaataccactctttaaatccaaattgcttcattgagatcttaaaaggaatcttgaaatccagatgattgggtagaaaatgtgacatggaattttactctagcgtcaaaacaacttttaaaatagtcctgcttattcaagttagtttctcctccagaaatctgaaattagatttgataagttaaagattatacaaacagggtggctttcaataatttaattagactcatgccaaaaaaatgagcttccaggaaatat

SEQ ID NO: 11250 - DNA, 7756 bp, Homo sapiens
gaaggaaggagcgtgaccagcctgtggactgcgcccctggctgggaggaaggactgggggcccagatcctccactcccagtgccccacaagggcgtcgcttcctaagtctctgtgaatttgttggtcagtggacgattctcgtgtctcctcctgtgtggggccttggggtagccagggcaggccgggcctccggtggccaaggtctcggaggccaggatgcctgccctggcatgcctccggaggctgtgtcggcacgtgtccccgcaggctgtccttttcctgctgttcatcttctgcctgttcagcgttttcatctcggcctactacctatatggctggaagcgaggcctggagccctcggcggatgcccccgagcctgactgcggggacccgccgcctgtggcccccagtcgcctgctgccactcaagcctgtgcaggcagccaccccttcccgcacagacccgttggtgctggtctttgtggagagcctctactcgcaactgggccaggaggtggtggccatcctggagtccagccgcttcaaataccgcacagagattgcgccgggcaagggtgacatgcccacgctcactgacaagggccgtggccgcttcgccctcatcatctatgagaacatcctcaagtatgtcaacctggacgcctggaaccgggagctgctggacaagtactgtgtggcctacggcgtgggcatcattggcttcttcaaggccaatgagaacagcctgctgagtgcgcagctcaagggcttccccctgttcctgcactcaaacctgggcctgaaggactgcagcatcaaccccaagtccccgctgctctacgtgacgcgacctagcgaggtggagaaaggtgtgctccccggcgaggactggacggttttccagtcaaatcactccacctatgagccagtgctgctggccaagacgcgctcgtctgagtccatcccacacctgggcgcagacgccggcctgcatgctgcactgcacgccactgtggtccaggacctgggcctgcacgacggcatccagcgcgtgctgtttggcaacaacctgaacttctggctgcacaagcttgtcttcgtggatgccgtggccttcctcacggggaagcgcctctccctgccattggaccgctacatcctggtggacattgatgacatcttcgtgggcaaggagggcacacgcatgaaggtggaggacgtgaaggccctgtttgacacacagaacgaactacgcgcacacatcccaaacttcaccttcaacctgggctactcagggaaattcttccacacaggtaccaatgctgaggacgctggggatgatctgctgctgtcgtatgtgaaggagttctggtggttcccccacatgtggagccacatgcagccccaccttttccacaaccagtccgtgttggccgagcagatggccttgaacaagaagttcgctgtcgagcatggcattcccacagacatggggtatgcagtggcgccccaccactcgggcgtgtaccccgtgcacgtgcagctgtacgaggcttggaagcaggtgtggagcatccgcgtgaccagcacggaggagtacccccacctgaagccagcccgctaccgccgtggcttcatccacaatggcatcatggttctcccacggcagacctgcggcctcttcacacacaccatcttctacaacgagtaccctggcggctccagtgagctggacaaaatcatcaacgggggcgagctcttcctcaccgtgctcctcaatcctatcagcatcttcatgacgcacctgtccaactatgggaatgaccgcctgggcctgtacaccttcaagcacctggtgcgcttcctgcactcctggacgaacctccggctgcagacactgccccctgtgcagttggcgcagaagtacttccagatcttctccgaggagaaggacccgctctggcaggacccctgcgaggacaaacgtcacaaagacatctggtccaaggagaagacgtgtgaccgcttcccaaagctcctcatcatcggcccccagaaaacaggcaccactgccctctacctgttcctgggcatgcaccctgacctaagcagcaactaccccagctctgagacctttgaggagatccagttttttaatggccacaactatcacaaaggcatcgactggtacatggagttcttccccatcccttccaacaccacctccgacttctactttgagaaaagcgccaactactttgattcagaagtggcgccccggcgggcagcagccctcttgcccaaagccaaggtcctgaccatcctcatcaaccccgcggaccgggcctattcctggtaccagcaccagcgagcccatgacgacccagtggccctaaagtacaccttccatgaggtgattaccgccggctctgacgcatcctcgaagctgcgtgccctccagaaccgctgcctggtccctggctggtacgccacccacatcgagcgctggctcagtgcctatcacgccaaccagattctggtcttggatggcaaactgcttcgcacagaacctgccaaagtgatggacatggtgcagaagttccttggggtgaccaacaccattgactaccacaaaaccttggcgtttgatccaaagaaaggattttggtgccaactgcttgaaggaggaaaaaccaagtgtctgggcaaaagcaagggccggaaatatcccgagatggacttggattcccgagccttcctgaaggactattaccgggaccacaacatcgagctctccaagctgctgtataagatgggccagacacttcccacttggctacgagaggacctccagaacaccaggtagccgtggccaccacagccagactgaacgtttgtgaaagctgggacatcccaccacacgctgagccagacctggcagagtgggaagctggaccaggggcagctgcgcacttatgagcaatactctgtggaggtctggtggggctgggggagcacccaggcggatctgcaagcacctcggagcacccaccgctgggtctgcggcctaagggacctccctcgccagcagaggtccattccgttcccagctgctcctggggaggccgcttcctggtaggagggagtccacgagactcttttctgtccctcactgtgttccgccgactgtcccctctcgtcacccatcactccctgcttccgcagggcgcccctcagtattcgctgccatatgtccctgtcctccaggctgtaggggaggagagcctggccgggggagacagactggacatttccctgtttcgagccaggctcttccaaggggccagctgggtccccggagtcagtcctaggctggatgggagggtggccccctcaagaggactcccagcctccacatctggttcctaccttcacatctcaccctcccgttctggggaagaatttctggttcctacagtatccactccatcctcaaggcttcccgcagggccttggggcactgccttgcccatcgggcccagttctccgggccccacctgcacccctttcttccccctggggatatgatgtgtggtgtttcctgtggtaaaagactgaggcaggcccaggggtctgccagtaacatgttcccatgtacagacacggtccccacaccctcccagcctcaggcccaggcagacatgggcgagctggtgagactgcccagccacggctttgcttagccacctgtggccgagggctctcagagacccccttaacctcccaaatactaagaagctaaaatattttaatattttgtttttttttttcttggtgccagagtttataccctgggtgctggggtcgcactgtgttatatatatatatatatatatataatgtgtatatatatatattctattttttttggttgggttcgtttttaattcagtcctacaaaatggtggtaagccccagtctcaggggtcaccctgtcttagagctagagatgaggtggcagggagggaggctgtgtcctcagtggcctggggctgagcagaccttaggaagggaccctccccagtgccgtggctgctctggggctaccccaggtgaacagaggtggtgagatgcgcagggaagaccagctctctccaggacatcgggctgcgtgaagtccagtgaccctgaggggattttggccaaaggaaacagccagggctgggctaggagagctagggtcaaaagctgccccacccactctccctcacatggtgctaggctgggagctgccctgagagctgggatgcccaccaaggcccacagaactgtctccaggcccttgtagacagtgggatctctgggctgatttctggttggggtctgctcctaccccaccccatttaacaatgtgaagtgactgaggctggggtgcctctccctggccccctccaactgccaaattctgcttccctctgaaccccaggaaatactttctggagaggcttgtcttgttcagaagactctagcatcttggggctggaaggtcctttgacgggtatgaaacaggtccagaaaggggaggtggcctgcttggccgacgtcatggagccagctgggagcagggctgagcgttgaacccgaggctcccggttccaagtcccatcgtgctcctcttccaatgccacactgcctctgagcccatccttggaccctactctgtgccaggttcctgtcccttcctccgtcacagcatggtcattccaggatatgggacaaaccactccttcccagccagggtgcctttgagccttctcattccgaggtctgcgtttgcatccctgtcgtgttctccctcgaggggtccttccccagcctgtgggggcctgggtctgttctgagctgattcccttttctccagttctctgctgggatgaagaaagttggacactcagtgggaccagctgcaggtggtttcactgtgtacacagcagtgtccccatcatgcctctcaatggggcctgcaagcctgggaacttgggcatcgttgggccagcaggatgagcagcaaagagtctgaggacagggtggcatgtctgcttgtgtgctcatgaagacatgcccacgccatggagccaggggcttacagagaggggcagtgacttccagagtcccatccgtcagtgaggggactgggctgcgggatgggtgaggatcttacagctcccaggttcggaaatctaccctctaggcctggaggcctctctcgcagagcatggaaggcaggagaggtgggctggcctagggcaggagctccacttctctctgcctctggctatgggaaggagcaggcggttggaaatcctgtgacaacagagatcttctggatttttgcctggacccttctgcaagcctggagactggacctgccacatgttccaagtctgtctgcctaggtcactgctgccacttctcctcccactaacagacctttcttgaagacccactaggtccagacactgccgggacttgcaggtatggggggtagaaggagaggcagataagctgcctggggggctgttagctaatgggtacaaggacaccccctcccgagaagagaagccacagatgagtgggccagcgaggccagtcttcaatgtccactaattcactctaagcatttggccaaaaaaaggagagagaaataactgaaattgttcaggtggctccatcgtctattctgtggtcccctccatgagcctttgccccagggtgggtgcaggtgcgagtgtcacctgcagctgcctcagtcattcagagttccagagccttctgtggtggagcatcctgctgcttggaggatgagtctgaagtttaaaaatgggccttttctgagcccccctgatgagcagtcagtgcttctgggcccagctaaggaagccatctgttcccagcagaggagagctgctgcgctgacctgcagaggttggtggtcccagcacagagctgtgcccatgggcttgttagtgggaaaagcaaatacaacaatgttttaccaaacatttaattatgaatgcccactccccagcatctagatctaaaattattaacattttgccacattctttttctctctctgtgtatgtatatgttttctctgtcctaatttaaaagtacattgcaaacatcatgaaacttgatccctgaaagcttcagcctgcatctcctaagagttagggcattgtcctacacgttggcccagtatcacagccaagacgagaagtcatttcccagcgatgtctgctatctaatctgtattcaaatccccccaattgtctcccaggtaacttatgtgtctggttttggaatcagcatccagtcacggtgcacacattgcattttctaactatgtttttaaaacctctttgaatgctgaaaggtcttccctcagctcactttgagtttttaaatgacattgtttttgaggccctaggcctgctgtctttttgaagccccacattctgaatttgtcagattgtttgctcatggtgtcgcataaccacttcttctatcccctgtactttcaaggataatttaggctacatgagattttgccttttgtgctgacttgacagcttcacttctgcctaagatgcgcctccactgtcacctgtaccaagtgccaaaacagcagaggggccagttagaggcaagagctctgggggggccggaaagtctccctggagaaggccgtaatatctgggccttggaaggaaggacacagggctctggaaggaggaggctgcatgcctggaaggctgggccttcgaccctggggggatgggccacagggcaccaaacacatcatatgtcctctctctttctaatttttggggtcccagggttttcatttcctggagacccgtggtctgtgtgcactggagcagagccaggctctcagttgcagcagggaaaagcctacatggggaactgcctcccgcaagctgtggtgtgagaagagccctggctggcagcaggagctgtgaagtttcatcccagccgggtgcatttagtagctgcctgaccatcttcctcccaggccctcagtttcttcatctgtagaatgagcagataggggccacagcagggattttcacacatcaaaggaggcagcctctgctctagttgatgtgaggatgagggggcggcctagaccccctgctgcccaggccgttgaggcaacactgggttcctggcttgacagctgtgggctggctgcccttgccagctcagacggctggcgagttttcagcttccctaagggactggcatagggttttgtggggtcaatgccaggaacctgggggaaactggatgcgttttatcctaagaagttcatccctcctgctcttactgtttccggccctggaggagaatgagggaggagagggttttctatgactgtgttagcttttattattagcaagagggctccttttgtaatttgtgcatgaaattcatgtcatttcctgggagaggagagggccgactggagagggtggggggcacactggggaagcaggcagaggtttccttcccttgtaggggggtggggggagtggggagagggggggctatccagttcgcctgatgagggctctcgaaccagccgttttgggttgtgttaaaggtgagaccttcctccattaatgtacaatctcgaactaactgctaataaagtggggttctgtttgta

SEQ ID NO: 11251 - DNA, 499 bp, Homo sapiens
ctgactgccttgaagttgaaggctctgtggctatctgacaaccagtcccagcccctgcttacattccagacagacacagactacaccacaggagagaagattttaacctgtgtcttacttcctcagctgccttctgaacctacttgtcaagagaatctgcctcgctgtggtgcactggagaacttggtaaatgatgtctctgatgaagcctggaacgagcgtgctgtcaacagagtcagtgcgatccgatttgtggaggatgagaaagatgaagaagacaatgagacgagaacacttctaaggcgagccactccacacccaggggagttaaagcacatgaaaaagacagtggagaatttacggaatgacatgaatgctgctaaaggactggactcaaacaaaaacgaggtcaatcatgccattgaccgagtgaccacttctgtgtagagttttcacctccaagttttacctcctgtgtcttcctctgctgtcgagacgt

SEQ ID NO: 11252 - DNA, 341 bp, Homo sapiens
gcagattctgatgaacatacaccagtggaggatgaagagccaaagaaaagcactacttcagcttctacttcagaagaagaaaaaaagaagaagtctagccgttcaaaagaaaggtccaagaaaaggagaaagaaaaaatcatcgaaaagaaaacataagaagtattctgaagatagcgacagtgactctgattctgaaacagactccagtgatgaagataacaaaaggagagcaaagaaagccaagaaaaaggaaaagaagaagaaacacagatcgaagaaatataagaaaaagaggtctaagaagagcagaaaagagtccagtgattcaagctctaaaga

SEQ ID NO: 11253 - DNA, 3335 bp, Homo sapiens
cagagaagctaagaaaagcacctctccgcgcgccccacctcctccgcctcgcgctcctcctgagcagcgggcccagactgcgctccggccgcggccctcgcccccgcggagccctcctaccccggcccgacgctcggcccgcgacctgccccgagccctctccatggaggcagcccgcccctccggctcctggaacggagccctctgccggctgctcctgctgaccctcgcgatcttaatatttgccagtgatgcctgcaaaaatgtgacattacatgttccctccaaactagatgccgagaaacttgttggtagagttaacctgaaagagtgctttacagctgcaaatctaattcattcaagtgatcctgacttccaaattttggaggatggttcagtctatacaacaaatactattctattgtcctcggagaagagaagttttaccatattactttccaacactgagaaccaagaaaagaagaaaatatttgtctttttggagcatcaaacaaaggtcctaaagaaaagacatactaaagaaaaagttctaaggcgcgccaagagaagatgggctccaattccttgttcgatgctagaaaactccttgggtccttttccacttttccttcaacaggttcaatctgacacggcccaaaactataccatatactattccataagaggtcctggagttgaccaagaacctcggaatttattttatgtggagagagacactggaaacttgtattgtactcgtcctgtagatcgtgagcagtatgaatcttttgagataattgcctttgcaacaactccagatgggtatactccagaacttccactgcccctaataatcaaaatagaggatgaaaatgataactacccaatttttacagaagaaacttatacttttacaatttttgaaaattgcagagtgggcactactgtgggacaagtgtgtgctactgacaaagatgagcctgacacgatgcacacacgcctgaagtactccatcattgggcaggtgccaccatcacccaccctattttctatgcatccaactacaggcgtgatcaccacaacatcatctcagctagacagagagttaattgacaagtaccagttgaaaataaaagtacaagacatggatggtcagtattttggtctacagacaacttcaacttgtatcattaacattgatgatgtaaatgaccacttgccaacatttactcgtacttcttatgtgacatcagtggaagaaaatacagttgatgtggaaatcttacgagttactgttgaggataaggacttagtgaatactgctaactggagagctaattataccattttaaagggcaatgaaaatggcaattttaaaattgtaacagatgccaaaaccaatgaaggagttctttgtgtagttaagcctttgaattatgaagaaaagcaacagatgatcttgcaaattggtgtagttaatgaagctccattttccagagaggctagtccaagatcagccatgagcacagcaacagttactgttaatgtagaagatcaggatgagggccctgagtgtaaccctccaatacagactgttcgcatgaaagaaaatgcagaagtgggaacaacaagcaatggatataaagcatatgacccagaaacaagaagtagcagtggcataaggtataagaaattaactgatccaacagggtgggtcaccattgatgaaaatacaggatcaatcaaagttttcagaagcctggatagagaggcagagaccatcaaaaatggcatatataatattacagtccttgcatcagaccaaggagggagaacatgtacggggacactgggcattatacttcaagacgtgaatgataacagcccattcatacctaaaaagacagtgatcatctgcaaacccaccatgtcatctgcggagattgttgcggttgatcctgatgagcctatccatggcccaccctttgactttagtctggagagttctacttcagaagtacagagaatgtggagactgaaagcaattaatgatacagcagcacgtctttcctatcagaatgatcctccatttggctcatatgtagtacctataacagtgagagatagacttggcatgtctagtgtcacttcattggatgttacactgtgtgactgcattaccgaaaatgactgcacacatcgtgtagatccaaggattggcggtggaggagtacaacttggaaagtgggccatccttgcaatattgttgggcatagcattgctcttttgcatcctgtttacgctggtctgtggggcttctgggacgtctaaacaaccaaaagtaattcctgatgatttagcccagcagaacctaattgtatcaaacacagaagctcctggagatgacaaagtgtattctgcgaatggcttcacaacccaaactgtgggcgcttctgctcagggagtttgtggcaccgtgggatcaggaatcaaaaacggaggtcaggagaccatcgaaatggtgaaaggaggacaccagacctcggaatcctgccggggggctggccaccatcacaccctggactcctgcaggggaggacacacggaggtggacaactgcagatacacttactcggagtggcacagttttactcagccccgtcttggtgaagaatccattagaggacacactctgattaaaaattaaacaatgaaagaaagtgtatctgtgtaatcaagatgaaaatcacaagcatgcccaagactatgtcctgacatataactatgaaggaagaggatcggtggctgggtctgtaggttgttgcagtgaacgacaagaagaagatgggcttgaatttttggataatttggagcccaaatttaggacactagcagaagcatgcatgaagagatgagtgtgttctaataagtctctgaaagccagtggctttatgacttttaaaaaaaattacaaaccaagaattttttaaagcagaagatgctatttgtgggggtttttctctcattatttggatggaatctctttggtcaaatgcacatttacagagagacactataaacaagtacacaaatttttcaatttttacatatttttaaattacttatcttctatccaaggaggtctacagagaaattaaagtctgccttatttgttacatttgggtataatgacaacagccaatttatagtgcaataaaatgtaattaattcaagtccttattatagactatttgaagcacaacctaatggaaaattgtagagaccttgctttaacattatctccagttaattaagtgttcatgtggtgggaattc

SEQ ID NO: 11254 - DNA, 424 bp, Homo sapiens
  misc_feature (1)...(424): n = a,t,c or g
agtaagtcgctgattttgtttctttttttcaaacagttttgatttgaagttcctttaaaggctgttggagcttttgcaaatacccagctaatgaaaggcacttaagattgggcccatctgcatcatcacattgaagttttctgtctaaaggaaggttccagctacctgttacccttttgctaaacacagttgcagtgttgcagtgtatttcatgacaaaagtgcactctagttttctgtgaaatgattattttctctgaaatgattcttggtcatgttgaggtnctacaatgttgtaaaaggagaacagagctgctttnttgacctgggggaaatcanaatctggataccatggttgctgaacagaccatcaggaagaactgaaaagttcaggcaacttgagaaaaataaagtcaccaccagca

SEQ ID NO: 11255 - DNA, 91 bp, Homo sapiens
tattagggtgagggaaaggagataggggaccctaggaggtagagtgggaccatgtcgtgaggcagttgaagagttgaggaaaggttttttg

SEQ ID NO: 11256 - DNA, 364 bp, Homo sapiens
atccaattgcaacaagatgatcttggggcagctttccagacgtggatggacaccagtggagcactcaggccagagagttacagctatccagaccggctggtgctggaccagggaggagagatctttaaaaccttacactacctcagcaacctcatccagagcattaagacgcccctgggcaccaaagagaaccccgcccgggtctgcagggacctcatggactgtgagcagaagatggtggatggtacctactgggtggatccaaaccttggctgctcctctgacaccatcgaggtctcctgcaacttcactcatggtggacagacgtgtctcaagcccatcacggcctccaaggtcgagtttg

SEQ ID NO: 11257 - DNA, 315 bp, Homo sapiens
  misc_feature (1)...(315): n = a,t,c or g
ggcaaaggagagggaagctggaagcacctttggcccgggacagaaatctggagagcttggctacctccatcctcctcaggccggagcaggcttcctgagagagtccaggtcgtaggagttttacgacttagaaaagcgggctgcagattccttcctgggtgtttggttcaagccttggctccagcctcactctcagtcttcccgggagttcgtgggatttggaccttagattattagtattattttgagggcctcctgtgtgtaagcactggttgtgcgcagatggctgtgcagaagggccntgaggtagaggct

SEQ ID NO: 11258 - DNA, 475 bp, Homo sapiens
tcttttggcagagtgaaattagggccccaagttttgattggcctttcacaattcctaaggctctgcgtatgtgtgtatatactacataggcctgtatggattagaaattgtacgtgtgtggcagggagcaggctccatcccgctgccacctcagaagtctgtgtccaagactctggtggacacccctggctccactggccactgaagcaagccaatggcagatcacatggaaagcctgctggccagactagaaactaacaaagctaacacactgtcactaaatgcatcaggcttccacacagggcagggcattctcaacacagggggaaagtctagcctgagctgagggttgctggagaggagcagtcacaggagataacttgtctcgtgccatcgtgttcaggtcccttccgtggccttccacaatcaggagccctcatctgtgggccagaaagacaggacagcgctggcaagg

SEQ ID NO: 11259 - DNA, 998 bp, Homo sapiens
ggacacacataaacctaaggatagtaatcaaactccgcatttgttactaactgaagatgatccccaaagtcaacatatgacattaagccaggcatttcaccttaaaaacaatagtaaaaagaaacaaatgactacagaaaaacaaaagcaagatgctaacatgcccaagaaacctgtgcttggatcttatcgtggccagattgttcagtctaagattaattcatttagaaaacctctacaagtcaaagatgagagttctgcagcaacaaagaaactttcagccactatacctaaagccacaaaacctcagcctgtaaacaccagcagtgtaacagtgaaaagtaatagatcctccaatatgactgccactactaaatttgtgagcactacatctcagaacacacaacttgtgcgacctcctattagaagtcatcacagtaatacccgggacactgtgaaacaaggcatcagtagaacctctgccaatgttacaatccggaaagggcctcatggaaaaaggactattacaatcaaaaacagctttatctagtgtcaaaaccagttcttctcaaggtataataagaaataagactctatcaagatccatagcatctgaagttgtagccaggcctgcttcattgtctaatgataaactgatggaaaagtcagagcccgttgaccagcgaagacatactgcaggaaaagcaattgttgatagtagatcagctcagcccaaagaaacctcggaagagagaaaagctcgtctgagtgagtggaaagctggcaaaggaagagtgctaaaaaggccccctaattcagtagttactcagcatgagcctgcaggacaaaatgaaaaaccagttgggtctttttggactaccatggcagaagaagatgaacaaagattatttactgaaaaagtaaacaacacattttctgaatgcctgaacttgattaatgagggatgtccaaattgaagattaaaaaaaaaaaaaaaa

SEQ ID NO: 11260 - DNA, 433 bp, Homo sapiens
attcaaggtaaaaattgtgacagtggagaagaaagtaaatgagatcctgaaccgattagaaaagaccaaagtcgagcggttcccagacctagcagcagagaaagaatgcagagatcgtgaagagaggaatgagaaaaaagcccaaattcaggaaatgaaaaagagagaaaaagaagaaatgaagaagaagagggaaatggatgaacttaggagctattcatcactaatgaaagttgaaaatatgtcttcaaatcaggatggcaatgattcagatgaattcatgtaaaaggagaaaaggagaaaaggacctttgaaagatgtgaatgtagagacaattgcagaccttttggtttcatctgtgttctgaagtataaaatacaaccaaaattctaccttcatcctacccagaaattattgattttcaagttttaaa

SEQ ID NO: 11261 - DNA, 754 bp, Homo sapiens
acttagaacctcagcactttcagggggtggccagactaagagaaaagaggccagaaaaagcttcagacaattccagtcaagcaaggtagaatgcagagctgccttctgaattgcacttgttctggaggagaagttaattcttcacttttgtcagggagtcctctacagaagtgttatactcatgagccacatgttcttcaagactgatgaggttaatacacctaacatgctaagtttgccagtttgagaataaaggcagcatggtcaaagcaattccaatcacctcatccctttgcaaaaacagaaaaattacatttcacaaaagtgaaaactttgtatgcatacactcttgcccaggaaatttataagatctcccccataacatttatagtttatttgacaataaaactggttaagactttgaactgaacacaaaacaaacaataatacaaaaaagttttaaaaacttaaaaactatgtgtttggagccattttccttctcttcagccttgctctccaatcctcaggaagggcttcaaaattagcatttctctctgccatgccactaaccagctgctgctgtttccactcttcaattcgcttctgtgcagttgattcccgatcctcttcactggaactagaattgtcctcttcatctaactcacgctggatactctgccacttttttaccaaagatggcattttggtcttactcttctttgcctgtagctatagctgactggctatagagaac

SEQ ID NO: 11262 - DNA, 842 bp, Homo sapiens
ctgggttgccccggccaggcctgcgaggaagggctgaggtggggccggcaggggcgccaggcagccgtgatcacaggtgacgaccgcaccggccgtgggactgatgcgggatcccgagggccttcctgcccacatgccccgggagaaaccgaggcccctccctcctcctggaacagcttccggctctcaagcgtcaccccaggggcgtcagttttacggactcaaggtcacctcaggaagaggcagggccaggttttgggataggctttgcctccaggatgggctgctcctgggcctggtgagctactgcccccaacctaccctctagaggggctgggaagggccgttctgggctcacctggcctgggagacccatctggtccctgcgtcctctgcccctcactgctctgtgcagatcctgtcgccctcagctgcctcctcccgagacctaatggtccctgctgggctcgagtctgcaggcccggctgcgtgtgccttggcctcactgtaccagtggttccctctctgcccggattctgagctcagtgtggtgtttggtgcacaggggttggtcaggggccatggccaaggccctgccacgcacgcccatccctcagatccactgtgagcaccaacctgctgcagtctcttgggcccctgctggcagctctgcccacgtcaccgcctgcctggctcccacacagccatgcattgtcactctgcctccgggaccccagcttgggagctgtgggtctgccaggtcccacctcctctgtcccccatgccacaacctgggctcctggctacagcagggctccagggactccaaataaatgttcagt

SEQ ID NO: 11263 - DNA, 205 bp, Homo sapiens
  misc_feature (1)...(205): n = a,t,c or g
ggggttacctaaccacaggtactgtgataccgtgacagtcaatctgataaccaagacagctattgagtaacaggcacatagtgtccacagcatgggtatgctggacgaagggatgatttatatcccgggagggatggagtgggacagtgtgagatttcatcatgatactcagactggatnggcacacattctaaacgggtnttcc

SEQ ID NO: 11264 - DNA, 741 bp, Homo sapiens
gtatactgtgacatcgaattggctggcattaggaactgtcttcctgtttgggctcttgtcattttctcgctctgtggcactgttcagaggatatcacgggccccttgatttgtatccagaattttaccgaattgctacagacccaaccatccacactgtcccagaaggcagacctgtgaatgtctgtgtgggaaaagagtggtatcgatttcccagcagcttccttcttcctgacaattggcagcttcagttcattccatcagagttcagaggtcagttaccaaaaccttttgcagaaggacctctggccacccggattgttcctactgacatgaatgaccagaatctagaagagccatccagatatattgatatcagtaaatgccattatttagtggatttggacaccatgagagaaacaccccgggagccaaaatattcatccaataaagaagaatggatcagcttggcctatagaccattccttgatgcttctagatcttcaaagctgctgcgggcattctatgtccccttcatgtcagatcagtatacagtgtacgtaaactacaccatcctcaaaccccggaaagcaaagcaaatcaggaagaaaagtggaggttagcaacacacctgtggccccaaaggacaaccatcttgttaactattgattccagtgacttgactccctgcaagtcatcgcctgtaacatttgtaataaaggtcttctgacatgaatactgg

SEQ ID NO: 11265 - DNA, 627 bp, Homo sapiens
gcagttcacactccgggtcagagttcctggcccggtgcacctgagaggtcgctctccgactcccgcgctggaccctcttgcgccattgaaccccctgatccgggggcctcggaccagggtctcaggaggactgaaccaagacttacccgaagttgccgcggggccttccgatcccctaggccattgcccaagtctggccaggctgatgggaccagcgaggagtctctgcaccttgacattcagaaactgaaggagaagagggacatgctggacaaggagatctcccagttcgtatctgaaggctacagtgtggatgaactggaggaccacattacccagcttcacgagtacaatgacatcaaggatgtggggcagatgctgatgggcaaactagctgtgatccgaggtgtcaccaccaaagagttgtatccagagtttgggctggacatgaatgactgagcaggctcatcgccccttgtccacagctcccagggacagaagggtgtggacatgataaacactgagagcccaaccagcacacctacagagtttccagcgagacaatgccagaagcacttttctagagagcccaagcccaatcaggaggaggctagagaagaggcgggc

SEQ ID NO: 11266 - DNA, 416 bp, Homo sapiens
agacttggcatgcatgttatcatagctggaaataatgacagcaaaccaaacaagttgtaagcaaaataaaagaagaaaccttgaacgacaaagtggaatttttatactgtgacttggcttccatgacttccatccggcagtttgtgcagaagttcaagatgaagaagattcctctccatgtcctgatcaacaatgctggggtgatgatggtccctcagaggaaaaccagagatggattcgaagaacatttcggcctgaactacctagggcacttcctgctgaccaaccttctcttggatacgctgaaagagtctgggtcccctgggccacagtgcgagggtggtcaccgtcttcctctgccacccattacgtcgctgagcttgaacatgggatgaccttcagaggcagtgcctgct

SEQ ID NO: 11267 - DNA, 926 bp, Homo sapiens
aatggtggtgcttggggccctgggctgtcccaggccttcgtgggccagaagaactccttcacctgtggactgcagcaaagcaggcaccaacatgatgatggtgggcgtgcacggccccaagaccccctgtgaggaggtgtacgtgaagcacatggggaaccgggtgtacaatgtcacctacactgtcaaggagaaaggggactacatcctcattgtcaagtggggtgacgaaagtttccctggaagccccttcaaagtcaaggtcccttgaatcccaaaagtgcctccccagcctcagcccccacctccagccacacacacattacacacacacacacacacacacaaatgtgccacacccagacacgcacagaatcagacactacaaacacctgccttgggggtgaagtgaaggcccagcctccccaccccaccgcgccccaggggttggaggaccttgtctgtgtcaggacagtgtccctccctgggaatgtgacatgagggccgactggggccaggctcaggggcagaggctgggacacaaggggctggcgagggctgcgaggcccagggaagccctgagtttctggcggggctgagcagtgggggagcattgtgttgtgggtgtctgtgtgtgaggtcaccctcaaactgcaccgccggccagataccctcctgaccccgaggacttggtctggtctctctggtggctacaaccccagagttttaaggacttggaaaggaaagcacaatcagagaagaaaacagcccccgaaccagcaaggagtggcctggcacatggaccggcctgagcgattgtgcactccacccaagccaggcttcccagggggcctgatttctctctcactgtctcttttttttaaaatggttgcacggctctgccccatggggggctttttttacac

SEQ ID NO: 11268 - DNA, 916 bp, Homo sapiens
  misc_feature (1)...(916): n = a,t,c or g
gtaacttttaaaactcaagttttattgcaatacatcttgcattacattctaataataaacggttgaagtataaattttgaaattagttaccaaaaatcatttactaaacagtagttttactaaaaatactaggattgggaaaaataaacactaatagaaagtactccaaaatgttaacaacgtttctatgggcattgggattgggggtggtttatactttctcattttctgtattaccaacacttacaattcacaatcaggagaaaaacctattatatgatacttaaaacattaaatctctgattgtcacctataggaaaaggcaactcactatccatttgaaagatccctttagacttctgatcgacctcactcgataactgcacaacctctggacacaaagaggccgaattgtccccccaatttcacctcccctaattacccacaacagcagtgatatgggttgggctcttgtgtccccacccaaatctccaataggtaatccccagggtggttgaggggaggggtcgtggtggggaggtgattaggatcatggggagcagatttcccccttgttctcatgatagtgaattctcnatgagatttggctgattgataagtgccctagcatttcccctgcactctctcttgccaccttgtgaagaaggtgcttgcttccccttcgccttccaccatgatttaagtttccnnnnnnnnnnnnnnnnnnnnnnnnnnnnnnnnnnnnnnnnnnnnnnntttttttttaataaattacccagtatcaggtagtatcttcatagcactgtgaaaatggactaatacaagcagtgatcaccaagtcttctttagaaatgacactacctaggatatcttagaagaggaatcaaactttcttttaggtattaattgccctcag

SEQ ID NO: 11269 - DNA, 6554 bp, Homo sapiens
cgtttgaatagtagccttgaaaggcggggtcgacggatagaccacgtactcctaaatgctgatggcattcgaggttttccagttgttcttcagcaaatcagtaagagtctcaattatctgcttatgtcagccagtcaaaccaaatcagagagtgtggaagaaaagggaggaggccctccacggtgcagcatcactgaactgcttcagatgtgctggcccagcctaagcgaggactgtgttgccagccacaccaccctctcccagcagctagatcaggtccttcagtcactgagagaggcactagagctgccagagcccaggactcctccactgtcttccctggtggagcaggcagcccagaaagctccagaggcagaggcccaccctgtgcagatccagactcagctcctccagaagaacctgggcaaacagaccccatcaggcagcaggcagatggactacttgggcaccttcttcagttactgcagcacccttgctgcagttctccttcaaagtttgagctctgagcctgatcatgtggaggtcaaggtaggaaatccctttgttctgctgcaacagagctcttcccaactggtgtcacatctcctgtttgagagacaagttcccccagagagactggcagcccttctggcccaagagaatctcagcctaagtgtgccacaggtcatcgtcagctgctgctgtgagccccttgctctttgctcatcccggcaaagccagcagacctcctccctcctgactcgtctgggtactctggcccagctacacgcctctcactgcctggatgacctcccactttctacaccgagctccccgaggacaactgagaaccctacattggaaagaaagccctactcctccccaagggactcatcactcccagccctcacctcctctgccttggcctttcttaagtcacgctcaaagctcctagctacggtggcctgcctgggggcttccccgaggttaaaggtcagcaaacccagcttgtcatggaaggaacttcgtggccgcagggaggtgcctctggctgcagagcaggtagcccgggagtgtgagcgccttctggaacaattccctctgtttgaggccttcctcctggctgcctgggagcccctgcgagggtctttgcagcaggggcagagtctggcagtgaatctctgtggttgggccagtctttctaccgttctcctgggcctacattctcccattgccctagatgtactgagtgaggcttttgaggaatccttggtggccagagattggtcccgggcccttcagctcactgaagtgtacgggcgagatgtggacgatttgagcagcataaaggatgcagtcctgagctgtgctgtggcatatgacaaagaaggttggcaatacctgtttcccgtgaaggatgcatctctgagaagtcggctggccctacagtttgtggacaggtggcccctggagtcatgcctggagattctggcctactgcatttcagacacggctgtccaagaaggactaaagtgtgagctacagaggaagctggcggagctgcaggtgtatcagaagattctgggtttgcagtctcccccagtgtggtgtgactggcagaccttgaggagctgttgtgttgaggacccatcaactgtcatgaacatgattctagaagcacaggagtatgaactgtgtgaagagtggggctgcctgtaccccattccaagagaacatttaatcagccttcatcaaaagcatcttctccaccttctagaaagaagagatcatgacaaggctctgcaactcctgcgaagaatccctgaccccaccatgtgccttgaagtgacagagcaatccctcgaccagcacactagcttggccacttctcacttcttggccaactacctcaccacccacttctatggacaactgactgctgtccgacaccgtgaaatccaggcgctgtatgtgggatccaagattctgctgaccctgcctgagcagcaccgggccagctattcccacttgtcctctaaccccctgttcatgctggagcagctgcttatgaacatgaaggtggattgggccactgtggctgtgcagactctccagcagctgctggttggacaggagattggcttcactatggacgaggtggactcactgctttccagatacgcagagaaagccctggactttccataccctcagagggagaaacgatcagattctgtgattcacctccaagaaattgtccaccaggctgcagatcccgagaccctccctagatcaccatcagcagagttctctcctgctgctcctcctggtatctccagtatacattcccctagtctaagggaaaggagtttcccaccaacccagccctcacaggaatttgtgcccccagcgacaccccctgccaggcaccagtgggtaccggatgagactgagagtatctgcatggtctgctgcagggagcacttcaccatgtttaacaggcgtcatcattgtcgccgctgtggccggctagtgtgcagctcctgctccactaagaaaatggtggttgaaggctgcagagagaaccctgctcgtgtgtgtgatcagtgctatagttactgcaacaaagatgtaccagaggagccttcagaaaaaccagaagctctagacagctccaagagtgaaagccctccatactcgtttgtggtgagagtccccaaagcagatgaggtggaatggattttggatctcaaagaggaggaaaatgagctggtgcggagtgaattttactatgagcaggcccccagcgcctccttgtgcattgccatcctgaatctgcaccgggacagcattgcctgtggtcaccagctgattgagcactgctgcaggctctccaagggcctcaccaacccagaggtggatgccgggctgctcacggacatcatgaagcagctgctgttcagcgccaagatgatgttcgtcaaagccggccagagccaagacttggctctttgtgacagctacatcagcaaggtagatgtgctgaatattttagttgctgctgcctatcgccacgtgccatctttggatcagatcttgcagccagctgcagtaaccaggctaaggaaccagcttttggaagccgagtactaccaactgggcgttgaggtctccacaaagactgggcttgataccaccggggcgtggcatgcttggggcatggcctgcctcaaagccgggaacctcactgctgcacgggagaagttcagtcgctgtctgaagcccccatttgacctcaatcagctgaatcatggctcaaggctggtgcaggatgtggttgagtacctagagtccacagtgaggccctttgtatccttgcaagatgacgattactttgccaccctgagggaactggaagctacccttcggacgcagagcctttctctggcagtgattcctgaagggaaaatcatgaacaacacctactaccaggaatgcctcttctacctgcacaactatagcaccaacctggccatcatcagcttctacgtgaggcacagctgcctgcgggaagctcttctgcaccttctcaacaaggagagtcctccagaagtttttatagaaggcattttccaaccaagctataaaagtgggaagctacacactttggagaacttgctagaatccattgatccaaccttggagagctggggaaagtacttgattgctgcctgccaacatttacagaagaagaactactaccacattctgtatgagctgcagcagtttatgaaggaccaagttcgggccgccatgacctgtattcggttcttcagtcacaaagcaaagtcatatacagaactgggagagaagctctcatggctacttaaggccaaggaccacctgaagatctacctccaagaaacatcccgcagctctggaaggaagaaaaccacattcttcagaaagaagatgactgcagctgatgtgtcaaggcacatgaacacacttcagctgcagatggaagtgaccaggttcttgcatcggtgcgaaagtgctgggacctctcaaatcaccactttgcctctgccaaccctgtttggaaataaccacatgaaaatggatgttgcctgcaaggtcatgctgggagggaaaaatgtagaagatggttttggaattgctttccgtgttctgcaggacttccagctggatgctgccatgacctactgcagagctgcccgccagttggtggagaaagagaagtacagtgagatccagcaactgctcaaatgtgtcagtgagtcaggcatggcagccaaaagtgacggggacaccatcctcctcaactgcctggaagcgttcaagagaattccgccccaggagctggagggcctgatccaggcaatacacaatgatgacaacaaggttcgggcctacctgatatgttgcaaactgcgttctgcctacttgattgctgtgaagcaagaacactcacgggccacagcccttgtccagcaggtgcagcaggccgccaagagcagcggggatgcagtagtgcaagacatctgtgcccagtggcttctgacaagccacccccggggtgcccatggcccaggctccaggaagtgaccttgggcagtggggccaggaacacgtggcctgagagctgggcaacagcagtgatggcgatgccctccacctctttcctccagtggagtgggacttctctggctctgccctaggttggaaagagttggattggaccctacttgccttcccgggcaaggataggacctttcacgcaagtgccatgtttctctaaaattgtggaatctatgtgtgtttgtctggagatggccagttctttctacctcagagtgagtgagtgagtatgtgtgcacacacgtgtgcatgttcctgtgcgctgatgtttacgcccaagcatttctgaacaaatgaaactcttctccatttaaaagaggcactttactttagacttgccactctgaaaaccttccctgcgttttggttcttgacccgggttgtcctgtttgtatagtcccccctctgtggacgtgctttagtagctcctcttacctagagggcttttacagagaattagagcaacaccaaaaggattgcctcttttccttccttcccattccaaaattcagagatggctttggggcaagtgctacctgtggaataaacctgttttccaggtgtctcttctcccaagcacaagaagtcctggagtctttggaaggtagtctgaatagaagggttttcaggtgcaggcatctgaaagctgtgggtatgtgtataaatgatcaggtctgtgaggctaacacgggcaagagggaaagaaaggctaaccatccaaacagggatacaggggaggcggtggggggtggtggggggagcgggtgctcacaagcacagagctgcctgttgtgaatgtccctgctgcaaagttggtgggtgagagaatgggacttcctctttgagagtctggggagagaaaaggtggccaggatcctaggactgaatgactcgattttacctatttgagctgcagtcctgtttgcgctccttgaattggttaggaagctgcttccttttccctcctgcttcccttcagtctcttcaggaccacaggatggatatgcagacatgtggggtcattgggaagggagtgcgcttcttttctctgtcttagaaaagggagtcaacgggtcggatattggaattgggcctctggacagagtcagaatgagggaataatgaataggtcacatctggttggtggaaaactaggtgaagtgcttctttaatatgcactgtcttgtcttcccacgcaagatgtgacaatgtttgagaaaaggtgtgtcatactcagtgacttcaatttgcaaatgtggggcctaaagaaagctctgcagctctgaacctctcactggccagagctcagcctattggtcccatccatgacgctgagacaaacagaaactggaagctgaagtcagtgtctctggtgcttagaaaccctgtggatttccctctgaaccaagatttttagtagtaaaataaacaactcatggacatctgtcagatgagaagttttggtcctgttagagaggagaaagactgtaatgaaactactagacccatttgggctaaagtttggcttttccttccttgagtcatagaacatatccatctcccaggaaatgtccttctctggcgtctgcttgcccttctgagtctgccttttttgcactgaacataagcactttatactaatgggtcacaaatcttgcagcccttaatttgggataagaccagattttcctgacattttcctctaactcattgaactatcaaattataggcaaccactgactagactgatatgagatgaggctaaaagcctttgaacaccacgctgtagtctccaacagaaaaacaccaccaaaacagatacccatgttgaggggttgaatgttttactacaaacaagccacaataaagtgtctatcaacatgaaaaaaaaa

SEQ ID NO: 11270 - DNA, 1536 bp, Homo sapiens
tttttgtttttgcagacaaaaagtggtttatttagcacccactatgtaccaggcacttgggaggtattttctcacactttcgctttccatcctcacaatatcccttatgaggtagggactaccctcatttttacaggtgagggaactgaggcttagatgttgacagacccatccaaggtgacccagctggtaatggtagacttcatcctgctacacagtatttaaggggcctaaaccataaacaatttttaaaaatttgggaaagtcacacataaaggagatgtttcaataccttctctctccaggtatgaacagtattgagcaagaccccacaggcagcaataatcatttatcctgatgaaaggttcctctgtgaaaggtaagggggttgggggagacctaaagccttctgcagacccacatttaaatgagctgacagtcccagcaggactacagaggaaccagctaggggaagctgccaggatcttagacgtgaaattaaaaggagatcatgcttcttacccaggaagtggggaattcagttgacccttgaaaaaactgaataaatttaacatggggaaaaggctaattacccatgccccagtgctggggtggagaaacagagtggccaaggttgtagcaccctgggcacctgctgaggccccattcagcgggagagccaccagttgggagtgtggacatgtatggccctaccagctctaagcaggagctggtaagggacttcccaaatgcaaacccttggtgaatattctagcagtgagaggaggtgagcaccagaccactggacaagagaggtcagagtcatacatagcaatctggacaggaaatggcatgaggagctgtgagtaatctgggggctatggctagaaaaacagggcacgagctggggctgagaagaggtgagcatccatcaagctgaaaggtgggactcaagccccctcagcactgtgaccccgttcctgtacaccaagctctagttggtgaatgcagtcccctggaccaagaggaagagaaaggcccagatgctttctcactgtctctgctatagcctaaaaacctgaacttttctatagttcccttcttgagccttggtgggttttatttttccttactgcctccagaagaagcttgagaaccaaaggatgtttcagtggatgtggggctcctttctctcatcagaagcttccccatggcaagaggaatgactgccagggcatcattaactatggatctagagaataaggtctcaaaatatgcagtgaactgtcaccacactatgtcccccaccaagggatatatacatggccctgccctatgagggaccggtgccccctcatctggcctgagacagatgctggagcccaagtcccaggatgtcccagccctttgaagggtcctggggcttgagaggatggggccttctactctgagtctgggagaggggctggttggggtggcttcggtgacatgaaggataatgcaagagtggagacaggccaggggacctcaaagcag

SEQ ID NO: 11271 - DNA, 504 bp, Homo sapiens
  misc_feature (1)...(504): n = a,t,c or g
tccatctttaaggaagaagaatgtttgatggagaaaatttgtggccaatgaagtctgaaatacttcctgtcatctgcccctttccagaaaaacttggccgacccttggtctacagcacgggttctcagtcgggcgacgatttggctgtctaggcgtnnnnnnnnnnnnnnnnnnnnnnnnnnnnnnagttagaatggggggaagatactcctgacttgtaataagaagacatcagagatgctgctaagtcggctccagcacacaggagccccccacaacgaagagttagtgcccccaaacgtcactgttgctgaggttgaaaataatcatgcagtcattcctcaattactgcctccagcaattcctccatttttatgaatcttgtgagcacttacggctaggagaaatttctttttacaaaaactttttaaaatacaatttagtgctgataattcctatgtggaaatgattccagccatggtcccctcacttgagcatgtgaat

SEQ ID NO: 11272 - DNA, 157 bp, Homo sapiens
ctgggctggcctcagttgaaggatcatgcagtagatagaggggaggcagggagagcttgtgggaccttcagtgctgactttagccaccatttccattcctatacaggatgtgaaggtcagaaggcagccaattgttggtttaatttttttttttttt

SEQ ID NO: 11273 - DNA, 334 bp, Homo sapiens
gaggccctcctatgtatttcaaatgtggagaggcatatacttctactcagattgaaagatttatcttggaaatccttttttggtttcctttctacataatatgacttcttatttcattccaacttaattccaaaaatatttatccagcacctactgtgaaccagtactgtgctaggccccaggtattacagtagttatcaagacagacatgacctctgcctctaaggagcttagagcctagcaggggaacaggaacttagacaaatttaagtgctgttcccgtagggtactttgaggtcaattagtaggaggcactttcacgtaacataggagg

SEQ ID NO: 11274 - DNA, 718 bp, Homo sapiens
  misc_feature (1)...(718): n = a,t,c or g
gaactgtccttacgtgacctaaagctggagtattttgagattggagaattaaggctacagagaaacaaggagacgggagagccttgaaatggaccttcaagattacaatgtgtagctgacattgtcagttaagttgggcagatctgacttcgctgattaagtgaatgtatgagccgatcctccccagaagctgggatcagcttccccatctgatgagccagtcttggtgctctgtgttcacctggttcatctgaggagctgcatctaccctgcccatgccatagatcctgccctgtttgcttctcctgttgctgctagtggacatgagaaggacagaataacgggctcccagattcacaagccccaccaagaggatcaccccaggaacgcttggaggctgaggagttcactgaggctactgcatcttgagactcaggatgaagacccagcttggggctgtcaaaggttttttgcatgtctgacacccatgacttccacctggaccttatggctccacccagaagcaatttcagcccaacagggagggacagctttcaaccctttacggttttcatcttctggcccccaaccatttcaggccagcaagcacctgtttacctgttccacccncacccctttcccccaaactgccttttgaaaaatccttaaccnattgaggtttgnattaaggtgagtacggactttattggccctgtgg

SEQ ID NO: 11275 - DNA, 118 bp, Homo sapiens
gaatgtgttgtattttcgacaggtcgctgccagagagcctgcttcctgctgcctgccgaaatttcactttgcggagttggtccttaaaactgggcggtggccgggcgtggtggctcac

SEQ ID NO: 11276 - DNA, 920 bp, Homo sapiens
tttttttttttgcaggttaatctgtttattttttcaaaacaaaactaaaaatcgccactcaatgtatctgagcagactgcctgatcacagttaaaagctttctgtaatgcgcaggggaacgtcatagcctggtggtcagaaatgagtgcttctggcgctgctggactgtggcccgcagcctgagcaccccttcttctcctccctctgctcatattgtccttgtgctgccatccagtcagcagcggacagccagcccaatgctgctcaggtctgtgggcatccagagataaaagggcgtctccgctccccgcagggttttctgctttgcccacctggtggggtacgcgcctgggcacgccacccccactggaggtcctgaatggtccacagagaaggcgtggggcaaggcctcaagtgctgatgctctgagaataaaaattaaaaggcagctctgccctgaagcgtcaccccacagggctcattccttggctgtgccctcctggggtcccggggtggacacatggatttggtgtcatcatcgctcgtgcttgatgttggcttcacttcgctccaaggccaccccgctgccgttccgaggggcgtccttcttgctccagtccttttcagtgtagaactcggctagcactgggcagtgttcagaagccaccccgccccaagaccagttatccggaatccaagggttcgtgaggccttctctcaccacagcccagtgacctgtgaaaaccttctttaagcttttactgatccagatgttgtccagagacttcgagccttgagggttcttggtgctgatgttggtgaaggtgtgcgcggggatcaggtggtggaacttttctttcctcaggatatcatagtcattgctgctcctgccttggccaaaatcccctaagataatgacc

SEQ ID NO: 11277 - DNA, 333 bp, Homo sapiens
aataacacttccatcagtacagataaccacatgtgcaatgttgggatgttattttgggcttggcttatcgagtagtcaatggaaggattcccgtcccctctctcggcagcttagtaactgctgtagccagctcggctcccttccctgtgtatctgtgtcctgctaacagccaagagatgttgcaagggaggaaatgtgagagaccttgaacctgtcaggtttatttcttttgtttttaaaggcatgttgaagtttagttctttacccttctcctaaaatctttttttaatcagcctcaaggttaaaataaggagtgactacagtatgtaaaat

SEQ ID NO: 11278 - DNA, 425 bp, Homo sapiens
taacctcagtgcctttgaaatatggctttaagcgtttgagaactgagatttcctgaaaccataggcccttgccccaggggtttctccacatccgggtgttaagacacctgatggcactgttggtttgtcccctataccccagaaaatctatcctgcaaggtagctacttcaatcttgtcattaaaatgtgtcaagtcacagctcgcaatgccaaaggaatgctggggcagtaagtgaggtggataagtgagaagggcctgggtggtgaaagcggccagggaccagaatgctccagacctacagagctggtcaaggtttaagtgcctttaaactttaccaatcctgggctcagttctcctttgaaaggagaaagtctttgtcctctacttaggcagctgggctagaagtgccttttgacttctaat

SEQ ID NO: 11279 - DNA, 1153 bp, Homo sapiens
tgcaaagaacacatgatttattcaagacaactcgtcatcaacagcactgactcaaggaacaaaacagatgaaaaaactaaagcaaacgttctgaccctctggagtgagacccgctgaattcatacagctcaatctgtaagtgtccaagatccagggggcaggttctcaagcaggaagcctcaggcactctggctctgtggggacctccccttggggcatctgccttgagaatctggggaagggacattatcagggcaggtcctttctgcagggcggtgtcctgctgggagctcagcctaaccaaggcctggtccctgtgctcttgaccttcatctcaaggtcaaggagagggcacttggacccaactctgccaggcgagggcaaagtaatggtgattcaagtagtgtggttccaggagggaaggtagggggcagacaagagtgagtgcactaaagagtcctgggcagtgtctgctggggtcccaggcagtggcccaagcttatgaaggggttggagaaggggctgaaccaccagctgacaagtcctggagagagggtggcccaggtgagcaggaagcatcatgcctctgcctcatcctggaggtcctggagtcagcccagttctcttcccatctttacactcaattccagtacagaactcagagcccgctcagccaggacctgcttgaaaaccaggcagttcctagaagcatggggagaagaggctgactttgatcttggaaaatgaagaggatcttgtctccaactcctttctcccttcctatacccatgcctcatccccagagcacttgccaatgtgcaatacatagccaggagtctgaataaatagtcaaagtctcccaaatactgtgctctgggagaggagacaggcaggtgcggaaatccaggcggcatcaaaggaaaagcctggtagaagagccacctggggaagcctttcctggcccaaagccgggcttggaagggcagcgagaagtcctgcccaccagactcggaaagctttgggggcaggagggctgctggggcctgactcctgccagccagtctggaggacgagggtcctcactatggcacccggcttccggaggcaaaccttgtacaaggagggaggtgcctgcgtgccaagacttgggcgg

SEQ ID NO: 11280 - DNA, 1956 bp, Homo sapiens
taaaggcggatttcaatcttgctgactttgagtgtgaagaagacccatttgataatctggagttaaaaactattgatgagaaggaagagctgagaaatattctggtaggaaccactggacccattatggctcagttattggacaataacttgcccaggggaggctctgggtctgtgttacaggatgaggaggtcctggcatccttggaacgggcaaccctagatttcaagcctcttcataaacccaatggctttataaccttaccacagttgggcaactgtgaaaagatgtcactgtcttccaaagtgtccctcccccctatacctgcagtaagcaatatcaaatccctgtctttccccaaacttgactctgatgacagcaatcagaagacagccaagctggcgaggcactttccatagcacatcctgcctccgcaatggcacgttccagaattccctaaagccttccacccaaagcagtgccagtgagctcaatgggcatcacactcttggggctttcagctttggaacttgggacagtgggcacagagatgcagccctgacatcctcccagatgccttccctctctgttttgtctgtgtgcacagaggaatcatcacctccaaatactggtcccacgggtaacccctcctaatttctcagtgtcacaagtgcccaacatgcccagctgtccccaggcctattctgaactgcagatgctgtcccccagcgagcggcagtgtgtggagacggtggtcaacatgggctactcgtacgagtgtgtcctcagagccatgaagaagaaaggagagaatattgagcagattctcgactatctctttgcacatggacagctttgtgagaagggcttcgaccctcttttagtggaagaggctctggaaatgcaccagtgttcagaagaaaagatgatggagtttcttcagttaatgagcaaatttaaggagatgggctttgagctgaaagacattaaggaagttttgctattacacaacaatgaccaggacaatgctttggaagacctcatggctcgggcaggagccagctgagaccaggccctgcctaggccctgccgcagaaccaccatccctgggaggccctgcagagcccacctgtggggaaagagaaggggcagcttccggattttcttttgggggttagaaggtcaggtgtggagactgctcgccagtctctgtgagcctaggccctgagctggggaggtggggaagattcgggcatgtgagtgcccccagaactgtcctggctccttccgtattaaacgcatttgcattttgagaagtgtccttcccacttcagccctccggagagactaccctagtctttctggggtgtttatgtcctcagctgaagcctggcctagttgctgagaggggctggggagatggggcgggagggccagactcagtgctgctgtggagctaggtgcttcccccttcccctgagactggtggactgaactccagtcaagttgagttcaagtgaaagattcttccagggttttattttttcccctcctaacaaagtctcatagtgttaacactggttctgcaatatctctgaggtgcaaagaatgcacttttccctatggggcccagagtttgccttttctgccaggcagtcaccatgcttccctaccccagcctgtttcttttggcttggtttggaccacagtcctctgctacccagggttttagagcccctgctctaggaaacagtttaagaaatcattggccccttcccagcacattgaatgggtaagcagacaggccatgatttagttggccagcactaactccacctctgttctccttgaacagcttcccctccagcccactgctttaggatgacacaatgaataacacctagtcatagaaatcagtctctctggtttgttttgtattatgttgtacatcattaa

SEQ ID NO: 11281 - DNA, 149 bp, Homo sapiens
aagtcctttgtgtccggagcctttcctggcctgtgcctggagggtagcacatctttccagcctcccagggctttgcagcctgcagatgccacctgtccctgagagaagttagcgtccctggccctggcggttggtctctcatccttgtg

SEQ ID NO: 11282 - DNA, 1481 bp, Homo sapiens
cggacgcgtgggcttttaactacggcctctccatcgaagaaaaaaatgaaaatgatgaaaactcattaagcagttcctccgacagtagtgaagacaaggatgaaaaaataagtgaagaatgtgatattgaagaaaagactgaagtgaaagaagaaccggagcttcaaacaaaaagggaaatggaagaaagaacagtaactctagaaatccctgaagttctgaagaggcagctggaggatgattgttactacattaatcggaggaaacggttagtgcaacttccatgccacaccaacatcataacgattttggaatcctatgtgaagcattttgctatcaatgcagccttttcagccaatgagaggcctcgtcaccatcacgttatgccacatgccaacatgaacgtgcattatatcccagcagaaaagaatgttgacctttgtaaggagatggtggatggattaagaataacctttgattacactctcccgttggttttactctatccatatgaacaagctcagtataaaaaggtgacttcgtctaaattttttcttccaattaaggaaagtgccacaagcacttaacagggagccaggagggaactctctcccagtccgcctttgttgaatccatccacgccacagtccacagagagtcagccgaccaccggtggaaccagccacccccaaaaggcgcaaagctgagccagaagcattgcagtctctgaggcggtccacgcgccacagtgccaactgtgacaggctttctgagagcagcgcttcacctcagcccaagcgccggcagcaggacacatccgccagcatgcccaagctcttcctgcacctggaaaagaagacacctgtgcatagcagatcatcttcacctattcctctgactcctagcaaggaagggagtgctgtgtttgctggctttgaagggagaagaactaatgaaataaacgaggtcctctcctggaagcttgtgcctgacaattaccccccaggtgaccagccgcctccaccctcttacatttatggggcacaacatttgctgcgattgtttgtgaaacttccagaaatccttggaaagatgtccttttctgagaagaatctgaaggctttattgaagcactttgatctttttttgaggtttttagcagaataccacgatgacttcttcccagagtcggcttatgtcgctgcctgtgaggcacattacagcaccaagaacccccgggcaatttattaaaatgttgttggttctgtaagagcaactgctctgtctagtttggcgctctgggttccaggtgaataactaacaaggtggtgggtctttacccacagcgcaaacacaatgcccaccttggggctctgttgtttgagttgcccacatactgcagttattctgttagggaatgattccctgggtgcctgaaagtgctctggacacgacacttgttaactttgcaggccatctgt

SEQ ID NO: 11283 - DNA, 763 bp, Homo sapiens
gaataatacttgacattttccaaaggcaaatctcattctgcaaggagattgtggcaccatcctgtttgactctcagaaacctcttgtaattctgatgtaaaaactgtagaatgaagatgagaaaattctcgcaatgagtggatcatgacaactgtaaattagaacaatcagatttaaaccaattccgcaatcttctatatctttgtaaaagacaaatccttgatgttgtctgtgtgcaaccttttcataaactctggttttatgactagtacaaaccaccaaaaaagccatgtgatcaatagtctgtgtcctgttataacatggctgtgggttgagccatcttgtttataaataatagagctctcctgaatttgtggcataggacttcttggttcctggcttttgttttttgtatcaagagattgtgatataaaacagcagaagataaatggaaaccttccattttaacttacgttgtttctggggtaatgttagaaccttgaaagatgcattcaaagactgtatcttattttgcccttggctattagtgtctcacatatgtgtgtaaatgttttcctaccttctttttgctcagcaaaggcaagcaagtaaaatatatttgctaagtgattagtgatgcacatttggggctagatttttttggtacttttatgtaaagaaaagtggattttgcagtaagggattggcatgagcaggcgtcagaatcacaatcatgattttctacttgaataattacaattca

SEQ ID NO: 11284 - DNA, 668 bp, Homo sapiens
ttttctttttttttttcacttcagactaaattttatcaaatatggtgtcatttggctacaatcggtttgtctttataaaactaagtaacttattttgtagtaaaaacaaccccaacccactgcccctctttggcagcccttgaaactcagttcaaagctaggcctggctcccggccatggccctgctgccttcacctgctgagcgctctagggaagcctcccaaatcccaagtgtcaagccccccgagtccatcacctctgcctcaaacagcccaagcccaggggctttggggccgcaggtatgaaggcccctccagtagccacacctgtgtgcagggctggtgccctggggcctgggccaacatcccccctccccttgaaccatcaggaactgggcaagacgcccaccagaggcttgaccacagggggcgtgcatccccttctgagcctgggagaccctaggggagtgggtagcctgggctggacccctggtgggcttgtgttctggatgtcgctatggcactttggtcctcaactcaaacccccacccctacccaggagtctgagacctcggccttccctggacttgttgggcagaaaaaggcaccaaggacaggatgagaaacccggaggggcagccccacaaatgagggcgctctgacctgtcc

SEQ ID NO: 11285 - DNA, 618 bp, Homo sapiens
gaatacatgtaaattgtagtgagaaagaagttcatagaaaaggtttaaatacattgcatatttgaatgtatgcttttatttatatgtttcctttgaaactagaagggcttagcagtaagcccccttgtcacaaaaagtacctttagacaaatttagtcaaaaaattgaatttctcttcatttttagcaagaggcgtagtaatcaatcacatgagtaccttactgagaaaataaagcctagatttgcttttgtggggagaccctctttactgattttctgtagttttgaaagccatagtctggggaattccctgaatttccagaaattacattggaatgcttatttgaaacacatccttcaaattaataaaattaagatattgatttacatccctgaaaatattttcctatctgttacagatttggggagatgttaggtgtgaggaatagtgttcctcataggatggttgctttcagagggcagtgtttgtggtactcctgtggcagaaaaaaagaattcgtttctcttaccttaccattaggtaaacatagtaatttagggggaaattcttgtaagtattagttcacaaaaataaatgacctaagaaatttatctgcc

SEQ ID NO: 11286 - DNA, 331 bp, Homo sapiens
  misc_feature (1)...(331): n = a,t,c or g
gcagaagtcgcaggcagcctctcagaaagtttcacccccagaggacgaagaggtcaagaaccttgcagaaaagttggccaggttcatagcggacgggggtcccgaggtggaaaccattgccctccagaacaaccgtgagaaccaggcattcagctttctgtatgagcccaatagccaagggtacaagtactaccgacagaagctggaggagttccggaaagccaaggccagctccacaggcagctttcacagcacctgatcccggcctgaagcgcaagtcccttcctgagggccntgtnagggtccttacccccagccaccaactgccccg

SEQ ID NO: 11287 - DNA, 2125 bp, Homo sapiens
cttctccgcctcccctgtcccttctcctccccgtcccttctcctcttccctgaccctcagagctctggagaccaccccccatccccagaccagctacacattttacaactagtgcacttaagttggggaggggtctgttgtgcgtcggtggggcccacgtcctcctcacaacttcttggaatcagtgacccgtgctgtcctggctgccgggcttaagcctccgggaccaaagacacaagctcgagtttcctctaagaaaagaaagcgcccaagaatgtgggggtgaaactcccctgtaattaggatcgccagaatgttatggaacagttcaatcctgggctgcgaaatttaataaacctggggaaaaattatgagaaagctgtaaacgctatgatcctggcaggaaaagcctactacgatggagtggccaagatcggtgagattgccactgggtcccccgtgtcaactgaactgggacatgtcctcatagagatttcaagtacccacaaagaaactcaacgagagtcttgatgaaaattttaaaaaattccacaaagagattatccatgagctggagaagaagatagaacttgacgtgaaatatatgaacgcaactctaaaaggataccaaacggaacccaggattaaattagagtcttttgggaaatcccaagctgagttgaagaagatcagaaggaaaagccaaggaagccgaaacgcactcaaatatgaacacaaagaaattgagtatgtggagaccgttacttctcgtcagagtgaaatccagaaattcattgcagatggttgcaaagaggctctgcttgaagagaagaggcgcttctgctttctggttgataagcactgtggctttgcaaaccacatacattattatcacttacagtctgcagaactactgaattccaagctgcctcggtggcaggagacctgtgttgatgccatcaaagtgccagagaaaatcatgaatatgatcgaagaaataaagaccccagcctctacccccgtgtctggaactcctcaggcttcacccatgatcgagagaagcaatgtggttaggaaagattacgacaccctttctaaatgctcaccaaagatgccccccgctccttcaggcagagcatataccagtcccttgatcgatatgtttaataacccagccacggctgccccgaattcacaaagggtaaataattcaacaggtacttccgaagatcccagtttacagcgatcagtttcggttgcaacgggactgaacatgatgaagaagcagaaagtgaagaccatcttcccgcacactgcgggctccaacaagaccttactcagctttgcacagggagatgtcatcacgctgctcatccccgaggagaaggatggctggctctatggagaacacgacgtgtccaaggcgaggggttggttcccgtcgtcgtacacgaagttgctggaagaaaatgagacagaagcagtgaccgtgcccacgccaagccccacaccagtgagaagcttcagtggagaggcctaactctaatgtcgcctgcttaagcaaatcatgcttctctgtttcacgtagttgggttgacaagtttctgcctttaagataaatgagtaatagtctaatgaccagctcagccatttaaaatattttcttcctattctgttcaagaaacagtaaacttggtttcaatctttactgtattttttaaatgaattttttccttaataacagccagaataagggatagtctatgctttcaggactggctttctgcacctgatatgaatgagaccagttttattttataaagcatgtgctcttaatagcattatgtctaaagaagatatcacgtaagtttgcatcttagcatgcaaatcataattttaagcaatataaattatgaaaatactatataaatgtaatttaacttaaaatgtttaagtgtagagcttccagagatggagaaacccccaccctccctccaaccacgccagagctgtagagtgctaagacgctttgcctggcccttatcacagccacacgtagcactcgacgaaatctcctccgagagctccttttcttggtagttaggagtcgccaacggattcgctg

SEQ ID NO: 11288 - DNA, 2050 bp, Homo sapiens
tgccgggcggtaggcagcagcaggctgaagggatcatggtgcagtacgagctgtgggccgcgctgcctggcgcctccggggtcgccctggcctgctgcttcgtggcggcggccgtggccctgcgctggtccgggcgccggacggcgcggggcgcggtggtccgggcgcgacagaagcagcgagcgggcctggagaacatggacagggcggcgcagcgcttccggctccagaacccagacctggactcagaggcgctgctagccctgcccctgcctcagctggtgcagaagttacacagtagagagctggcccctgaggccgtgctcttcacctatgtgggaaaggcctgggaagtgaacaaagggaccaactgtgtgacctcctatctggctgactgtgagactcagctgtctcaggccccaaggcagggcctgctctatggcgtccctgtgagcctcaaggagtgcttcacctacaagggccaggactccacgctgggcttgagcctgaatgaaggggtgccggcggagtgcgacagcgtagtggtgcatgtgctgaagctgcagggtgccgtgcccttcgtgcacaccaatgttccacagtccatgttcagctatgactgcagtaaccccctctttggccagaccgtgaacccatgggaagtcctccaaaagcccagggggctcctcagggggtgaaggggccctcatcgggtctggaggctcccccctgggcttaggcactgatatcggaggcagcatccgcttcccctcctccttctgcggcatctgcggcctcaagcccacagggaaccgcctcagcaagagtggcctgaagggctgtgtctatggacaggaggcagtgcgtctctccgtgggccccatggcccgggacgtggagagcctggcactgtgcctgcgagccctgctgtgcgaggacatgttccgcttggaccccactgtgcctcccttgcccttcagagaagaggtctacaccagctctcagcccctgcgtgtggggtactatgagactgacaactataccatgccctccccggccatgaggcgggccgtgctggagaccaaacagagccttgaggctgcggggcacacgctggttcccttcttgccaagcaacataccccatgctctggagaccctgtcaacaggtgggctcttcagtgatggtggccacaccttcctacagaacttcaaaggtgatttcgtgggacccctgcctgggggacctggtctcaattctgaagcttccccaatggcttaaaggactgctggccttcctggtgaagcctctgctgccaaggctgtcagctttcctcagcaacatgaagtctcgttcggctggaaaactctgggaactgcagcacgagatcgaggtgtaccgcaaaaccgtgattgcccagtggagggcgctggacctggatgtggtgctgacccccatgctggcccctgctctggacttgaatgccccaggcagggccacaggggccgtcagctacactatgctgtacaactgcctggacttccctgcaggggtggtgcctgtcaccacggtgactgctgaggacgaggcccagatggaacattacaggggctactttggggatatctgggacaagatgctgcagaagggcatgaagaagagtgtggggctgccggtggccgtgcagtgtgtggctctgccctggcaagaagagttgtgtctgcggttcatgcgggaggtggagcgactgatgacccctgaaaagcagtcatcctgatggctctggctccagaggacctgagactcacactctctgcagcccagcctagtccagggcacagctgccctgctgccacagcaaggaaatgtcctgcatggggcagaggcttccgtgtcctctcccccaaccccctgcaagaagcgccgactccctgagtctggacctccatccctgctctggtcccctctcttcgtcctgatccctccacccccatgtggcagcccatgggtatgacataggccaaggccgaactaacagtcaagaaacaga

SEQ ID NO: 11289 - DNA, 808 bp, Homo sapiens
tctgaacaatatatacttatagaattcagtcaaagatacacaatctgaaacagcttcatggggtggactctaacagtagttgcaatgttttagaatgagacttacttctctgctatctagatctgaactccttggcttctttacttagttcaagccccagcctaggaaagccagttacataaaagttggctcaggagtcttagagctttacctaaatatgagcccagaaaacggaggatgggggtggggcgccttcctggaggtgacacttgatgggggtgtgttctggttactgttctaaggctgtgccatcagctccttcctcccctgttcattctgcattctctagtcagttggctaagaagtgactcttgcaactaaaaaaattaagaaattcacttcccctctaggaggtgatgatagggtttctaatggttatatgtatatcacattcccatttgcttagaaagtctgattgtagctatgattgtccgtaggcccatactagagttcatggatatgttatactgaaccaggccagagcaaacagaaaaagaaggttgagggcaatggacaaggaaggaataaagggagaagagggaaaacagaaaacctgatgctggggacacagcatcagctcaagacgtcaccctccattctgcactcagaaaatggcacttgggggactgggcgcagttggtctttaaccacttttcaatgtctaaaaacatttgtttgtggtctctaagatgaaacatcatttcaatcgtaaaatttcccattaaagaagtttttttttctaaaaaaa

SEQ ID NO: 11290 - DNA, 541 bp, Homo sapiens
gctgttagcttgcagactttcctatgcttcatttctcctgttgctttcaaagaaggcaggagacacgtttaataacggagtatctggtgataagaattgcttgggcaaaccagctcatctggactctttctcagtcttggaagtgggaagaggaaaacttgtttccttcctgcttcttaaggatattctgagggtacactgatcaataacactaaatttggaatgaaaataccatgtgatgagtttagcctgctgatgcttccagtagatccttgtatagtttcaagatttaagttttccgatttcatataaatttcttaaagtcgaggaccttataagggtgcaatggatgtttgctaaatatgaaaaactgacttgaatttgcactctttaatgttgcgtatctgctctagtgggcaggacctagggcttaaaggggaacttcctttctccaattctaggaactgggactctaaaatgagaagctggttgtctgaaggtaaccctgccaggtgttggttggggaaggtctgtttttctt

SEQ ID NO: 11291 - DNA, 809 bp, Homo sapiens
gggaaaaaacattcttatgaaggagataggttctcttctgagtttgtcataatatagattggtgtctttggaaaatggccacaattttaagaattcaattatgcatataaaatgataattattggaattccacagtaacagatttaaacagtcttaaattgtttatctcctttactgtaatgtattgaaatttttagagaaattttagttgttaacattttattaagtgccagtgtcagaatataacaaattatagtttcttatgaatgacaggcctacagttattattctggattatttgatggaggacaaacttacctgtatttgttagtcaagctgtgaaaataaggtggattacaaaagatgtgaaaaaaattttagtctgtagactcagtaattttctataatttactgttaatctcatttgaacatggattaggtacaatttataaattaattcaagtcagggtctttaggtatcaggtgccagagagatatttaacagatttccctacctaaatttatgtatatgtactgtctaaaacaatacttttttaaaaaaaaggaacagttgggagaaaataaatataatgaaaaattcccagaggctaggcacttggattctaacacgtatgctattgtattatccattagttctgtaatatttaattttagattcttttatttttttaattggcaaagcacaaggtgctgtataacagtgtcatttagagttttataggaaagcttcaacctgagtcctgcgttataaagcctgggggaaagctaagcttaggaccataacttgc

SEQ ID NO: 11292 - DNA, 434 bp, Homo sapiens
ctgtcttcagcagaccattccatcgtcctattatgcccgctattcctgggtgatgggggatatgctaagaccagtgcactcaagaggcataagcccccattaccccacttcttttatggtgaaatgagtttgtcaatcagaagtcgactgtgcagacaggtacataagacacgtagtaagtccggtagtaagtccgtggattgtggtgctggtaaggcactgggaagaactcgttacttcccagagttgggaggtgcatcattctcatactcacagtgaaaaaaaaaaaaaaggccagattaacttcaaagtcctatcttttctcataactcaccaaagaactgaggtcacagagcaataaaaccttccttacagagatttgaggagagaggagacatgtacctcattcacttcctgggagcgaaattaaatca

SEQ ID NO: 11293 - DNA, 390 bp, Homo sapiens
ggcagatttatatcaaggttctttgacatcttgaacttcagatcagaggatggagttcttctctcattgccttgagcaagggcttataaccagagccacattaagaactcagatcatgctccctaattgaggacacatagcaagcttcaccaagccctccactacaactataccaatttgtcttcctgtagacttacaaggtaccactagggttcctttggagaactcaggagtccagtataacttggagtgataataccacattgggaactcacaactcttctaactccaggggatttgaatgtgatttcttcttttttaattcagagtaggcgtaatgattcctacacttggggcatatttgtcttgggccccacttcccaaaggcaa

SEQ ID NO: 11294 - DNA, 250 bp, Homo sapiens
  misc_feature (1)...(250): n = a,t,c or g
ttgtttttttgtattataaattatctttatatgaatataaagactttccctatttcaattgcgaatatacagatctgtgcactcaaaaataacaagcctattaggactcaaacagtnnnnnnnnnnnnnnnnnnnnnnnnnnnnnnnnnnnnnnnnnnnnnnnnnnnnnnnnnnnnnngtgtccattaatggatgaactgataaacaaaatacggtatttacatactacggcatatttggcctttaagag

SEQ ID NO: 11295 - DNA, 1883 bp, Homo sapiens
ccggtgccgccgccaccgctgtctgtgcgcccacctctgctgctaccatggggatcttagagaagatctcggagatcgagaaggagatcgctcggacacagaagaacaaggccactgagtatcatctgggcctgctgaaagctaagctcgccaagtatcgggcccagctcctggaaccgtccaaatcggcctcatccaaaggagagggctttgatgtcatgaagtcgggtgatgcccgtgtggcgctgattggatttccctctgtgggtaagtccacattcttgagtctgatgacctccacggccagcgaggcagcgtcctatgagttcaccactctgacgtgtattcctggggtcattgaatacaaaggtgccaacatccagctcctggaccttcctggaatcattgaaggcgcagcccaaggaaaaggccgtggccggcaggtgatcgctgtggcgcgcacggctgacgtcatcatcatgatgctggatgccaccaagggagaggtgcagaggtctctgctggagaaggagctggagtctgtgggcatccgcctcaacaagcacaagcctaacatctacttcaagcccaagaaaggtggtggcatctcctttaactcgacagtcacgctgacccagtgctcggaaaagctggtgcagctcatcctgcacgaatacaagatcttcaatgcagaagtgcttttccgagaagactgctccccggacgagttcatcgatgtgatcgtgggcaaccgggtgtacatgccctgcctgtatgtttataacaaaatcgaccagatctccatggaagaggtggaccgcctgggccccgaaaacccaacagtgtggtcatcagctgcggcatgaagctgaacctggactatctgctggagatgctttgggagtacttggccctgacctgcatctacaccaagaagagaggacagaggccagacttcacagacgccatcattctccggaaaggggcctcagtggagcacgtgtgccaccgcatccaccggtcactcgccagccagttcaagtacgccctggtgtggggcaccagcaccaagtacagtccgcaggcgggtgggcctgacccacaccatggagcatgaggacgtcatccagatcgtgaagaagtaacggcgcctgccgggcctcccgcccacctgcctcgtctccctggggaggtggtcccactgggacacacaaacacccaaacagaaaaatacaaatacacgtaccccaggaaggggtccctcaagtctctgctatttacagaagtttcttcagtaggcagacgaagagtgtgttggggcaaaggggctcggttggaggcatttcccataagactgagccctctcatgggggttttgagtttgtagtgctgagcctgcatctgtgcctcccagccccctgcactgagggagcaagttgcccacatgcccgccagccagggcctaaagcagatggcatgctcagtgccaggctggtagctgggcctgtttgggtccctggaggctgtggctgctgtcatggcacctcactccctcagctcttgccagcttctctgacacttgggttgggggcccttccaggaggaaacccccttgggtgccccacacagggctctccatgatgggaaccagtggttagtggcttcaaaggcccagctgacaccctccacagcctaaggggtgtcctaaagtgcctccccctgtattccccctcccagggcagcccctgcccagcacaaaaccccaggaccctggctctgcacgcctggggcagggacttttgagtttaggatctgtattttctaagtccccagttctcctggctctcctttctgaaataaaggattgaaaacggttcctgttc

SEQ ID NO: 11296 - DNA, 889 bp, Homo sapiens
ctattactactaaacttgcggccgcgtcgactttttttttttcttttttttcaaagtcaattaaattttatttcaaccaagaatataaaataaatgcaatgtaatttattttagttttaacagtcatttcaagaaggaagtcaggtcaactcaaaagcgaggaaaccctcgctccaaagcagtagctcgtcctgcactccatggagcaggcctcgctggggtgcagcggctcgtgagcacaaacctcgcagtggagcacgaaaagctacagtcatctctataaccatataaagggggatgcgtgcagaaaatgactgaaaaaagagacaagaacaggtacacttcacaaataggaattataggaatatacaaactaggcagtttagaaaggatatactacataacatatataaaaagtactttaaattgttgttaaaaaggacaccttcagtccagattttgtgtaatacttttagtgtctacacagacaaatctttaaaaaaattaaatagtattaatttactaaatatttaggagataacagtgcattaagggtttttttttttatataatacatacatatcacccctttgcagtgatagcatagaagagtaagtatggccttaggtacaacacgttttttaaaaaccctaaaacaatgaactttgttatatttgtgactatttttgaggattatggggacctaaactgctatgttttatacaaaatattacttgtacttgaatccttcaagcctctgttggtctaactgccatttcactgcctttctctactccctaggaagacatcatcatagagttttggatttgtaatttccatagaattcttccttcattgtatagtttctgctgcataaatttactcaaaa

SEQ ID NO: 11297 - DNA, 259 bp, Homo sapiens
ggggccagagacctgggtctacagggcagacatcaaggctgagccagtcagacagtgtttgtcaacactgggctctcaccaggctccctcaggccgaggtcagcagccagggatctgtcatgtgtgaggaaagtgtctgttcaggttaggtgtgtataatgcagcctttcagagccgcgtctgtctgaggtcctaggagctggaatcagacaggtttgtatggctgggtttttaggggaggcctgaggagccaagactg

SEQ ID NO: 11298 - DNA, 455 bp, Homo sapiens
cacagtcacatcttgttatccacaacctatttgaaggaatgatctggttcattgtccccatatcttgtgtgatctgtaatgacatcatggcctatatgtttggctttttctttggtcggaccccactcatcaagctgtccccgaagaagacctgggaaggcttcattgggggcttctttgctactgtggtgtttggccttctgctgtcctatgtgatgtccgggtacagatgctttgtctgccctgtggagtacaacaatgacaccaacagcttcactgtggactgtgagccctcggacctgtttgcgcctgcaggagtacaacattcctggggtgatccagtcagtcattggctggaaaacggtccggatgtacccccttccagattcacagcatcgctcctctccacctttgcctcgctcattggcccctttggaggattcttcgcaagtgga

SEQ ID NO: 11299 - DNA, 276 bp, Homo sapiens
tttttttttttttttttttacatctgaatgtattttaatataaaaataacagctttcccccaattctcgctctaggaaaatgtgccgtagaaggggaggtaggataagaagaagcgggcatagaagctggcggcccagagcaaatccgcccactgcatgcacaccagcatgtacgccagattttccacttcaaagttcaccagggtgagcagcggcgggccgatcaggaagaagtacaggtgctgctggttgtagggtaggtatctgcgtttcttc

SEQ ID NO: 11300 - DNA, 102 bp, Homo sapiens
tccactgccatagagtgtaagtgcaagaccctcaataagatctaaagggcttagaagagggtttctcaacctcaacactactggcgttttgggtcagacaat

SEQ ID NO: 11301 - DNA, 796 bp, Homo sapiens
tttttttcaatataaatgtgtaattttaatatttaatttaaaataaaaccaaggctggattggattgggaaagaacgtttgatttgcagaagaatataggaatttttttaatcacgacattacaagtcatttgtgaaaacagccttcctcctgccaccggtccctatacaacctgcttaggaaatatggaggtgaatcatcccccttacctcttccctaccagggcttggttctccccaaaatccaaaggagaaataaatgtcttccgttgcctcttcccatttttacagtcagcttctaaccccttgcaaagccctgaatcagagccaagcacctcagaaaatgagggtcccttggttctcttattgaagttgggcacatgtggtcagagaagccccaaggaaggccacagggactgacacctttacttttggaatttgtgcagccagttgtcagggctcccaggtgcaaccaccttataaccatatccacagtcacagaggagggagaggaggaaggatgaaaaccctgagcaggaccagacccccgccactttatcatgaccctaccaaagtccctctcccaggggtcattggcagagaaaccccaacagctctctcaatcaatcactggggcagcagggaaggctgagggccctggctggggaaaagctggtctttggagaggtatgaatgtgcagatataaaaagcaagaagagcatccttatctccttgccttggctaaggcactgacaggaaaaatgcaaggtaggaatggcaaagaggggaaaggaag

SEQ ID NO: 11302 - DNA, 700 bp, Homo sapiens
gcggaactggagcaggaatttccccagtgatcctcaattcaggagagggcaaagaagtagacattttacgaatgctcatcaaggccaaagacgaatacacaaagtgtaaaacctgttctgagccaaaaaagataaccagttcctctgccatctatgacaatccaaatctcatcaaaccaattccagtgaaacccagtgaaaaccagcaacagcgtatacctcagcccaaccagaccttagaccctgaaccccaacacttatccttgacagctctgtttgggaagcaggacaaagctacatgtcaggaaactgtggagcctccgcagactctccaccagcagcagcagcagcagcagcagcagcagcaagagaagcttccaattaggcagggggttgtacgctccctgtcctatgaggaacccagaagacactcaccccccattgagaagcagctctgtccagccattcagaaactcatggtcaggagcgcagacctccacccattgtcagagctgcctgaaaaccggccttgtgaaaatggcagtacccattctgcgggagaattttttacaggacctgtccagccagggtctcctcacaacattggaacttcttcgtggtgtacaaaatgcttccagaactcagaacctgttcgagaaactttcagagttaccccagggggcagcaaacaattgtgacc

SEQ ID NO: 11303 - DNA, 1246 bp, Homo sapiens
gccatgtgcttctttgcccttctctgtcctgttccaatcttctgcctcccagtcactccctggggactatgggatcactgtccccccacctgtgtggccacaccatgtgtcctgtcaatccagaactgcctctgagctccaggctgaccacagatcagccacagcctgatgcctgcagccccactttgctcacccttcccctcccctcctccttccttccacacagcaagcctacctttctccatccatgctcaccatagcccccttccttgtgacctggaccctccattgtacctggctgagactgtcagcctcctggaggagtggggtccaccttcttcttgccctatgcagtgcaagctcacttctcacccagcaaggttgactcatctgcctccatgtctctggggctttgctgttgccctgaaacctagctgggctggtcttgctcccagcttgcttccccctcctcggatgtccctttgcagggcccctgtcgttcctccggcaccagtgtccttggctgccatggcaagctcatcaggggcttgtaccctggtcaccaagcatggtagcagctgcctgcattgtatctccatctggtcactgcaggtgccaacccttcatcccccatgttttcctgggccatggagggctgacctccgtttctggggaatgtgggctgagctgtggtaaccagctacaccccaggtgctctttccatggtggtgcctgctcatcttgctgatgcaaactaggaagttaggctgcatctcggagtggctttcgctggagaggtgctttgctgtctctcagactcagtcactgtgttccctccccgcctctcttatctccatgggctgtttgcagctctcccaggtactttggggtctgagctggaattcctttgtggtttgctcttctgcttctcactcttgtattaagaaggattccacaaagggagagtggcatccctgctgctgctgtgccagaccagagtttcctgaggggccctgaccctaaccctccagctcagccctgtacacctgaccctgtaaatgagtggggtttgctgactgtaatccctgacaccagtaaaaccaaaaggactcttgggggctcagtgtgagagccagggttacctactctgccaagtgaggacaaactgctaggctgtatcccataatttcaggatgagaaacattaacaataaaaatttgtagtaaacataacctcatgaagaact

SEQ ID NO: 11304 - DNA, 1180 bp, Homo sapiens
gcagagcagcggactgaggaagcgatggccccagagaaagggcccctgtagcctggctctcacacagtattttatctttgattctgaataaatattttttgtggggtttttttttttggtggcagttgtttgttttaaactgaccacttggaagaaacaccttggttatctgtggttttcttgccttgtccttgcctctacccccaccccttttgagtcgggtgactcatttttctgtgtagagactcggtggcccaggcaggaggtgaaagcggccatccggaaggccctggggatccttgtgcctgttgctcgccttcaggtcaccagctgagctgcgataggaaaatctgaatggaggcagcaaacagccaaaacaaacattccccacccggccctgtgcatatgaagtcgttcttcccccaactcttgaacgatgatgatattcagacgaagcattgatgttatggaagaaagaaagaaacaaacaaaaaatatatatatatgtccaaaaacagacaaatccaagggtgtgaggtaaacgagtgtctgcatttagattccacaaaaccaaaatccatgttgaacaaagttaagtccgtacacagtgactttttgggtgagccgtgtgtgtctgtctgttgtgtgtgtgcctcaagccctgttttcctgtgaagatactttgagtggcagccattctctccacgtgaaccacacgtctggagcacagacaggcctctcaaggtcattgatcttacgcatttactgtttaccgaacaaatgtctgactgtgtactcgggtgtactccgcagcattgtcgactgcagtcccctgtgtttgccagagatactgtgctcgaagtaggaggttttactctacttcatcactgcggatttgcacattgctccgtgggacactcgggagggcctgcgttctgttccctattaaatgggaaggcgtgctctgagcctgtctgcctccctcgggctgctgctggtcctcagtaccagcgcccgggggtgttccacaaccacttgggacagaagaaggtggaatttcagacagaagcttgactgggtcttcaatgacaggcttggactagctgtggcccagacatcggccctgcccagaattgccaggaggaggctttgcaaggctctagaggagccgcaaggcctg

SEQ ID NO: 11305 - DNA, 353 bp, Homo sapiens
gcctgtttctgcagcagccaccagctcccatcaccccttgaccctccagctcatgctggagaagagggaattttggctgtttaaagaacacagttgtgaatctcagaatgtgcctgaaaggaatactgacagataaggccggaaacaaaactgatggcttgaaaaacatttttatggaatgtatttactatcattttgttttactatagaggtagatgggactcttaacttttgggtacatggaaacatgctgaaaactgaacacaatcctgatcatcactcctgcctggctgtctcctgggaggctgccgggtgccacggagctgggacacagcagagcccgctaggtgttg

SEQ ID NO: 11306 - DNA, 349 bp, Homo sapiens
gcaagcattggcccaaataataattggacaaagttcctaaagttgtcaagtgtgtaagaattaatgaggtagctgttgaaaatgagtgaggatggtatttgtatttgtaataagcactgcaggtagagatatttcatgggttataataagagaaacacagatgagatgtagatggtaaggagtcttactgttgttggggtccttcctttctccttcttttttcccccttacccctcccacaatttcatgaagtcttttaaattaaatatatagctgaattgtgttgtgaatcagacctgaggactattttttcgattatgtgtgttcattctttgttcaaatatttgcc

SEQ ID NO: 11307 - DNA, 752 bp, Homo sapiens
tttttttttttttttttttgcagctgcggagcgactttattgtcttctccttcgacagcttcgttgtacatagctgggcccccgaggcctgaactgtccctgggaaccaagccacgtggggtgaagctactttgaaacctcacccacagttcacacgtggtgaaagagaaaatctagcaaagtaaatccaacaacaacccaaattaacagtattattaacttcctaccccaagctggctctcccccaggccctgaactggctcaggaaggaggcaggaatgagctgaccgagacaaggcatcctccacccacacatcccatcttctgagtggtcccagagctgtgcgccacccctgtgggacaatcaggcactcctgggtctctaccagctgtgatgagacgtacaagaggagggtctgagcccagaataaacaagagcatcctgaggctggagaggcaggcccagtgtgcccggaccaccctgctctgcctgagaggatgggctgggttccagctggcccggccgccacctagtgactgcttgggacagtggagatgatgacaggatgcccactcgccctaggcagtcagaagcggggtacacacaaacactctagaagccacacttagcaggaattcccagtcttccggcccaggggagggtgccaccagctcaggcagccctcaagaggaggccgggagcaacttctccagggccttcttctgcttctcggtggctgcagccagggccc

SEQ ID NO: 11308 - DNA, 521 bp, Homo sapiens
ggcaaccaactatatctgaggaccagagccattttggggcaccagagcttgtgacctctccatctccacccagctgggtccaggggccactctcagcactcacctcagcagctgacatcataaagcagacttgggaacctggaagcactctggagaacctttccctgagacatggagctttggggccgaatgctgtgggccctcctgtctggcccagggaggaggggaagtacccggggctgggccttcagctcatggcaaccccaaccacctctggctgggttatccagtgccatagaactggtcagccactggactggggtctttgagaagaggggtatccctgaggcccgggaatccagtgagtacatcgtggctcatgtccttggagccaaaacatttcagagcctgaggccggcactttggacccagcccttgacctctcagcaactacagtgtatccgggagctgagtagccgtcgattgcagaggatgcccggtgcagtacatccttggagagt

SEQ ID NO: 11309 - DNA, 1090 bp, Homo sapiens
agaatcagtattgtcatatcttgataaggaggataccttcttctactcattggtctatgacccctcattgaaaacactattagctgacaaaggtgaaatcagagtgggacctagatatcaagcagacattccagaaatgctgttagaaggagaatcagatgagagggaacaatcaaaattggaagttaaagtttgggatccaaatagcccacttacggatcgacagattgaccagtttttagttgtagcacgtgctgttgggacattcgccagagccctggatttgcagcagttctgtgaggcagcctagtttgcatatgagtgctgctgcagcttcccgagacatcaccttgtttcacgctatggatacattgtatagacacagctatgatttgagcagtgccattagtgtcttagtaccactcggaggacctgttttatgcagagatgaaatggaggaatggtcagcctctgaagctagcttatttgaagaggcactggaaaaatatggcaaagacttcaatgacatacggcaagattttcttccttggaaatcattgactagcatcattgaatattattacatgtggaaaactactgacagatatgtgcaacagaaacgtctaaaagcagcagaagctgagagtaaactgaaacaagtatatatcccaacctacaaaccaaatcccaaccaaatatccactagtaatgggaagcctggtgctgtgaatggagctgtggggaccacgttccagcctcagaatcctctcttagggagagcctgtgagagctgctatgctacacagtctcaccagtggtattcttggggcccaccctaatatgcagtgtagattatgtgcaatttgttggctttattggaaaaaatatggaggcttgaaaatgcccacccagtcagaagaagagaagttatctcctagcccaactacagaggaccctcgtgttagaagtcacgtgtcccgcccaggccatgcagggaatgccagtccgaaacactgggagtccaaagtctgcagtgaagacccgccaagctttcttccttcatactacatatttcacaaaatttgctcgt

SEQ ID NO: 11310 - DNA, 732 bp, Homo sapiens
aggtgctctccttctcgtgcaccacatccaagtccacccaccgtggacgcagtgatgactaaatgctggccttgaagagaaaccctcagccagcttgtctgttgtccaggtccctcagtgtctctggtttccctgccctgcataatttaaggcattagtgccaaatacatctgtcatattcctctccctggaagactgcgaaatgtccagactttttcagactagtggagggaaggaatgttacataactaagtggaggcctgggaactgtcaggatttgacagggctggaccagagacccttccgcctctgcctagtgtgtctgtcaggcaggcagcagccatcaatccaagaatgagccatggcggcaagcactgtgtggagaaagggaacccagccgaggtctgagtttcagacagaaactggggagttgggacatcttctctgtgccaggcttcattgacaccatcgctccccacagcagctccttggggcagggggctcacctgtgcagccacccttactcacagtagcatcccattcttcacactgcaaccccccagcactgtggacccttccagggaggtgacaggagccagcagacacatgacattcccagaaacccccatcttatccagacaggcttccctccatacttctttccacagttttaccctcagaaaaaatgttggctggcagtcttcccttcctttcacctccaacctgggggaa

SEQ ID NO: 11311 - DNA, 182 bp, Homo sapiens
gaaagaagctagagggaggtcaggagaagggtaacagggaggatgcaaagcagacatctaccctggtcaccccaggatcaggatatctgtccttgtttcatgttgaattcaaaaattggatctcacttaggctttgaaggtgacagccatctctgatagctgagcataagtaaagaaaggtg

SEQ ID NO: 11312 - DNA, 348 bp, Homo sapiens
gcatggctaaaatggctgaacaccctgaaggacatcatgacagtgctctaactcatatgctttacacagccattgccttcttaggtgtggcagatcacaagggtggagtattattgctagtactggctttgtgttgtaaagttggttttcatacagcttccagaaagctctctgtcgacgttggtggagctaaacgtcttcaagctttatctcatcttgtttctgtgcttctcttgtgcccatgggtcattgttctttctgtgacaactgagagtaaagtggagtcttggttttctctcattatgccttttgcaacggttatcttttttgcatgatcctggatttcta

SEQ ID NO: 11313 - DNA, 3137 bp, Homo sapiens
gcgccgacttggagagccagccccatcgggttccccgccgccggaagcggaaatagcaccgggcgccgccacagtagctgtaactgccaccgcgatgccgaaggcgcccaagcagcagccgccggagcccgagtggatcggggacggagagagcacgagcccatcagacaaagtggtgaagaaagggaagaaggacaagaagatcaaaaaaacgttctttgaagagctggcagtagaagataaacaggctggggaagaagagaaagtgctcaaggagaaggagcagcagcagcagcaacagcaacagcagcaaaaaaaaaagcgagatacccgaaaaggcaggcggaagaaggatgtggatgatgatggagaagagaaagagctcatggagcgtcttaagaagctctcagtgccaaccagtgatgaggaggatgaagtacccgccccaaaaccccgcggagggaagaaaaccaagggtggtaatgtttttgcagccctgattcaggatcagagtgaggaagaggaggaggaagaaaaacatcctcctaagcctgccaagccggagaagaatcggatcaataaggccgtatctgaggaacagcagcctgcactcaagggcaaaaagggaaaggaagagaagtcaaaagggaaggctaagcctcaaaataaattcgctgctctggacaatgaagaggaggataaagaagaagaaattataaaggaaaaggagcctcccaaacaagggaaggagaaggccaagaaggcagagcagatggagtatgagcgccaagtggcttcattaaaagcagccaatgcagctgaaaatgacttctccgtgtcccaggcggagatgtcctcccgccaagccatgttagaaaatgcatctgacatcaagctggagaagttcagcatctccgctcatggcaaggagctgttcgtcaatgcagacctgtacattgtagccggccgccgctacgggcttggtaggacccaatggcaagggcaagaccacactcctcaagcacattgccaaccgagccctgagcatccctcccaacattgatgtgttgctgtgtgagcaggaggtggtagcagatgagacaccagcagtccaggctgttcttcgagctgacaccaagcgattgaagctgctgggaagaggagcggcggctttcagggacagctggaacaaggggatgacacagctgctgagaggctagagaaggtgtatgaggaattgcgggccactggggcggcaactgcagaggccaaagcacggcggatcctggctggcctgggctttgaccctgaaatgcagaatcgacccacacagaagttctcagggggctggcgcatcggtgtctccctggccagggcactgttcatggagcccacactgctgatgctggatgagcccaccaaccacctggacctcaacgctgtcatctggcttaataactacctccagggctggcggaagaccttgctgatcgtctcccatgaccagggcttcttggatgatgtctgcactgatatcatccacctcgatgcccagcggctccactactataggggcaattacatgaccttcaaaaagatgtaccagcagaagcagaaagaactgctgaaacagtatgagaagcaagagaaaaagctgaaggagctgaaggcaggcgggaagtccaccaagcaggcggaaaaacaaacgaaggaagccctgactcggaagcagcagaaatgccgacggaaaaaccaagatgaggaatcccaggaggcccctgagctcctgaagcgccctaaggagtacactgtgcgcttcacttttccagaccccccaccactcagccctccagtgctgggtctgcatggtgtgacattcggctaccagggacagaaaccactctttaagaacttggattttggcatcgacatggattcaaggatttgcattgtgggccctaatggtgtggggaagagtacgctactcctgctgctgactggcaagctgacaccgacccatggggaaatgagaaagaaccaccggctgaaaattggcttcttcaaccagcagtatgcagagcagctgcgcatggaggagacgcccactgagtacctgcagcggggcttcaacctgcgctaccaggatgcccgcaagtgcctgggccgcttcggcctggagagtcacgcccacaccatccagatctgcaaactctctggtggtcagaaggcgcgagttgtgtttgctgagctggcctgtcgggaacctgatgtcctcatcttggacgagccaaccaataacctggacatagagtctattgatgctctaggggaggccatcaatgaatacaagggtgctgtgatcgttgtcagccatgatgcccgactcatcacagaaaccaattgccagctgtgggtggtggaggagcagagtgttagccaaatcgatggtgactttgaagactacaagcgggaggtgttggaggccctgggtgaagtcatggtcagccggccccgagagtgaagctttccttcccagaagtctcccgagagacatatttgtgtggcctagaagtcctctgtggtctcccctcctctgacgactgcctctggcctgcagctgacctggcaaccattcaggcacatgaaggtggagtgtgaccttgatgtgaccgggatcccactctgattgcaacccatttctctgaaagacttgtttgttctgcttctcttcatataactgagctggccttatccttggcatccccctaaacaaacaagaggtgacccacccttattgtgaggttccatcccagccaagtttatgtggcctattgtctcaggactctcatcactcagaagcctgcctctgatttaccctacagcttcaggcccagctgccccccagtctttgggtggtgctgttcttttctggtggatttaatgctgactcactggtacaaacagctgttgaagctcagagctggaggtgagcttctgaggcctttgccattatccagcccaagatttggtgcctgcagcctcttgtctggttgaggacttggggcaggaaaggaatgctgctgaacttgaatttcctttacaaggggaagaaataaaggaaaggagttgctgccgac

SEQ ID NO: 11314 - DNA, 488 bp, Homo sapiens
ttttttttttacaaattcttctttattgcagacagttcaggcacaggtacatggaagaagccgtattgcagattttacacaaggtggtttgaggcagcaggcacctaccctcttccccaccccccacttccccaaatacacatcagcctagagatcattcccactgaaatctcctgagcatgctgtcctctcaaacagcacaccatccagccctgtgcccaatgtcaccaggcaatctgtgggatctgaggaggtccttagcctccacccgtagtgggacaggggaagggtatccttttacatgtcagatttagctgtggtgtccttaccaatcctaaaacccttaacagggcactgacccaaatcttggggtttggttctagcctatggttgctacattgccactaggtttataccatccagaagtctgtgggacaaggggctagatttgtactgggcaaggcctttgtccccaaaatggagaagca

SEQ ID NO: 11315 - DNA, 449 bp, Homo sapiens
  misc_feature (1)...(449): n = a,t,c or g
cataagggtgtgattgtatattcagccaagacactgtatctcccttatgccttttattttcctgacatagcatgctgctggatcaatgtgtgtattgttgctactctgcctatgccagaggtggtgactcactcacacatataaataattttagttgaatgtttttataggttgtgtattccttacttgaaaggcttgggaccagaagtgttgcagatttcagatnnnnnnnnnnnnnnnnnnnnnnnnnnnnnnnnnnnnnnnnnnnnnnnnnncaaacctgtttaatcatgggacagcataaaatattgcccagtggagaacaatgcacatatatacttagatacaatgtttgcgtgaattttttattgttgtttttgagaaaaaaaatcatggtaaatattactacttctgtgtttctgcatacataaactttgagttaaagcaaa

SEQ ID NO: 11316 - DNA, 336 bp, Homo sapiens
aattcggcaccaggggagattgggggagagatgacagctgcagggatggttgtgagccgctagtgatggagagcagagggaaagggccaggctccagactcccacacgcccacacagcacctctgccaggcctaggagaggacaggtgcagctcttgcagctctgcgggtgtgcggccaaaggcaaggcccacgggctggatgtcacttccccgactgtctcttggttggcttgtccttgtgcaagacccagcctgtcacgacagagcctgggcacttcagaggaggagccaggatcgaatggaaggggggaattggggtccaccatagtcttctg

SEQ ID NO: 11317 - DNA, 295 bp, Homo sapiens
  misc_feature (1)...(295): n = a,t,c or g
gcttgaggattttggcttctagtaaaaattttaatttcagttcctggggaagacgttcttgacgtgttttaacagcaacagcaattttatcctttaatgtgaccttaaatgtgtcaccaaaatttcccttgcctcttgtaacgtggcacctttatgattgagaacccatttcttattctcctaatgggccatactgtgataccatggatggctctttaattgggaacattggacttttttttttttttggcaattttaaacaattgggggtaaantccatataacatcaanttac

SEQ ID NO: 11318 - DNA, 1299 bp, Homo sapiens
  misc_feature (1)...(1299): n = a,t,c or g
tagttagaactcaactttattgttacaacgaatttttatttacagaatataaatctcttcaaaaagatacattccttcatttaatcaatggtaaaaagccttattaacagaaataaagcctaaacatcacttatatttgaactgaaagacaaacagcttcattaaaagtttatgaacacatagtgaaaatgtatttttacttaaccagttacatgaatgaggctgtttttaattttcttcactgccaacctcattttatccacagaacaaattttatttaaattaacagtagtaaaaatgtaaaacttaaattttgaacatgaaaatatgaaacaagaaaacaggaagtatctcattatcaaacagattaacaaattctcagacagatattttctgagggcatagcaaaacacctacatccaaagttgcattcattaagaggtatccatacttttcagtgctgagactatttggaggcacttacattatatacaaagcagcattatactactatggttcacatttgataaacacgaanttaagctttatgccacaatttcccaattcaacataaantaacgcaatgacagttacccaatttcattctttttcttctgaaactgaataaggaaattatcatttaagcacatggaataatggccatgtctttttccttttaataacagtatatttttaaaactcaaatacttcatatcatggaaatttgaccaagctgtacaaaggctcctaaatacagtacagtcaaaaagtttcctctttgcagactcaatttatagtcaatttagtacagataaatataggaaactacttcagattattggacaaataagaatttcagtgtgtcactacctataattaagtagcagcacaccacaaccacagcaagtaaacactaatctcctctactgcctttttggggtcttttccagtcacaggagctaatttacagggataccactgggtttcaaccaatctctgaaagttcctttattatgagttttgaaatttaactaatgcatcacctacaattctgttggctagtttttttcttactcttcactaattagttttaaatacaatatgtaatgttttcaaatttttataaacataggtgttgtactaaaatgattaatggcatttgaaatacaacaaatgggtaagatgttaaccaaaacaatgggattaagagtattttagaaagcgattttttgttaactagaaaagctacaggattcacaatgaatacagatacaatatttttaaccctgctcttttatt

SEQ ID NO: 11319 - DNA, 671 bp, Homo sapiens
  misc_feature (1)...(671): n = a,t,c or g
gacaaatgcagagatataagtctctggtctttaatcactgtgggggccattttgtaaaacacacatactgtccagcagactcctttggtcatcccaaatacctctgaactccagggaatatgcattctaactccacgaacttacctattttgttaaccttgattagaccttctggagaagtaaccaatttgtccatcttaggagcaatttggaatgagagtttttatttttttctgtaacgcccatcctgcctgcagtagaccctttgggcttaagaggtcctacagattctaatagtttcctctttgtagatgtgttaacatatttaaaatacttaggacatggcctggtacgtgacagatggtgtttaacatcattgtcatatgaagaacactctctgtgggccaatggaggtgtgccttaaaattcttcatcttgcctgattttgtttgcataacttctggagaagtctgtgtcctcctcatctaggccacctttccattttttgtgaaagatgaccttgtccctgcagtctccgccaggagttcacacagcttttcacagcagctgccatctttaattctttttcctgagaattccagcaaggttngtgacagttggtcacttttttgttctagactccttttaaattntctgcaatttgcctgaaa

SEQ ID NO: 11320 - DNA, 216 bp, Homo sapiens
gttcttgcacgatttcctctgaacacagggttccagagtacttaaacacaacattttttaaatcgtgatttcggcctatttccttgccaggcctgtttccccaccaggaaatgagataggaggactggatgaggatgtcctgttatagttgctgtggaggaagttcctctggttaaattctcatcagcgtctgcagaaaagaaggaaagaggggca

SEQ ID NO: 11321 - DNA, 66 bp, Homo sapiens
ggattggagcttaggaagaaactcagctgcaagcctttcaaatggtaccttgaaaatgtctatcca

SEQ ID NO: 11322 - DNA, 878 bp, Homo sapiens
tgcggtccggcctgcgggagaactgggtcgtcagtcctccgagtggtggggctggggactttgagggagttggctctagggcacagtccctgcctggccaggtcggaggaacaagtgctgggatctggcgtgtgtgctccaggggctctttccgcggccctttccacctcttttcactttggggacggtaggcctttataaacggactaatgctgggtgatttgttcctgtggttgttgatgccgaggaaagactctgggccccaggactcacctaaactggagttcgaataactgttcgctcgctgtgtgaccttggaaaaaataacaagcttttctgaagtgagaagctgttctcagccacgagtcctgtgcaagatcactaatgattacctggcatttctgcgacacaggcaggtcctcagggtttgtgcaagtttgcaaacatgttcaccctgtctcagacctcgagagcatggttcatcgatagagcccgtcaggcacgagaagaaaggcttgtgcagaaggaacgggagcgggcagctgttgtgatccaggcccatgtccggagttttctctgtcggagtcgactgcagagagatatcaggagagagattgatgacttttttaaagcagatgaccctgagtccactaaaagaagtgcactttgtattttcaagattgccaggaaactgctgttcctattcagaatcaaagaggataatgagagatttgagaagttgtgtcgcagcatcctgagcagcatggatgctgagaatgagcctaaggtgtggtatgtgtccctggcttgttctaaggacctcaccctcctttggattcaacagatcaagaacattttgtggtactgctgtgattttt

SEQ ID NO: 11323 - DNA, 724 bp, Homo sapiens
tttttttttttttttttgatatgatttttttattaacatataataatatatttaataaaaaatagtatccactctggctctctcctccactgcaaggggaagagtggtgaggaggggctggcactgcccacccctaggcatccggaaaaaccctgcttccagggctcccctctacccctgctttccaacaggctctgacctccagacagacggttcaaagttacaagtgctttaggccctcccttgagttcccccaggcccatcccttgcgcagaattcaggggccacctggacaaaccccttgctttttctcattcttggcatccttcattcatgctagaaagaggatctggggacagagagtagagtctctacctgccagggggaagggaggaaaggaatggtggtgggggatggggccaagaagagggatggtgatgaggtgccctcattggagccggtcactgcggaatgactcctccacagcaggatcaggcagcagggcacaggggtcactcagcatgtttagcccttccaggcccagtggctccatgcgcagctcatcttctagcccaagccctagctccaatccagctgctgacacctcaaagccaggcactccggccagggctgctgcaatctccttagagaaacctggagaggagtcccctgtgaggatgatgttaggccctgagccatggcgggaacagtgggtcaagttctg

SEQ ID NO: 11324 - DNA, 1616 bp, Homo sapiens
  misc_feature (1)...(1616): n = a,t,c or g
tttttttttttttgtattccctcaaatatttaagggtttgttctgaaatatacttcattaacttggaaatagtttaatctcttcaaaatttgcttttaaactttgttaggctggtctagaacagctgttagtctagatttttcttttcttttcttttctttttgcctctggttccagttcttgtgatagaattaatttgatcccattactgtggactctattcaatgcctgtcatgttaagaggtatttccatacagactggtgagaacatgaatgttctctgtgtgagctctggaaactgttctgtctgctgctttccagtgattttttccctgacttccagtagtctcctcacacaaaagggctgatcaacgctcagctgctgactcatgagcaagtctatgcagctccccagagagttctctctgtgcagatctttcctctccagtactctggacctgcaaaattatcgccatctcagcctccttgaaagatgaactttgtttcttcaactcaacaacatctccagcctctgtgtgcagcctggaaattcccaccccaggcaagtaaggtggagtgctccttagggccccatctcatttgtttccctttcctttcagggatcattatcagcaaggcttgctgtccaacgtctgaaaaccactgttttatatattttgtctgctttttttgacaggagggtaaatctagtccctgttacagctttttggctggaggcagaaatcttgtttgtgatttttaagaattactctcttaaatttaattttgttttataattatgtaaaatacaaagctctgaagttaaaacaaggtacagtaatattctatataacattttggtcagtgatgaaccacatatatgacagtggtcccataaaataatacattttagttgtaccttttctgtgtttagttaaacaaacactaggtgttacattacaactgcctacattattcagtacacaatnnnnnnnnnnnnnnnnnnnnnnnnnnnnnnnnnnnnnnnnnnnnnnactgcgatgtnnnnnnnnnnnnnnnnnnnnnnnnnnnnnnnnnnnnnnnnnnnnnnngcacaatgatggtatcacctaatgacgcattctcggaatgtatccctatcattaagtgatgcattcagaaaagtctagggtctaaccctttgcttttccctacacactcactgaggtaaacattaaaaaaaaaaatttccccctccaccccttttaagtttttattatttccatactattgtttttattattaacataaacaagtatatacatccacttacatctctactttcttcttaggtgattagcagcatactacaaaattctctcaaactactgttttacttagtaatttatcctgaagatcactccatacaagtatatagagatagtcttcattgcctatcttttgaatttataacttaaaagaaggaattaaaaatgtaaaaacattatcactgatattttcaaggtctttacttacgccatgctgaaagagggttttgcatcctggtcagataaagaagcaatggtgtgctgaggaaatccttcatagaagaaaatgtattactttctttttccaag

SEQ ID NO: 11325 - DNA, 432 bp, Homo sapiens
  misc_feature (1)...(432): n = a,t,c or g
gagagagttgtaggcgcaaagctgaggaaaggagagtgtggagaggggcctggtgtggtggggcccggtgtttgggaccggagggtgttgacggctgatgagttccttgggtttgctctttcttcacctgaaaagaagactccaggaagggcagcacatgccggagaaagatgaattccagcttgaccgcccagaggcgcggcagtgacgccgagttgggaccctgggtgatggctgcgaggtccaaggacgcggcgccgtcccaacgcgacggacttttgcccgtgaaagtggaggaagactcacccggaagttgggagcccaactatccccgcggcttcgcggaccccgaaacttctcgactgcactttaggcagctgcgttaccaggaggtggctggaccngaagaggcgctgagccggctccgagaac

SEQ ID NO: 11326 - DNA, 539 bp, Homo sapiens
gctggagagcagcaacagcacggactacattgccatgcacgacgttgacctgctccctctcaacgaggagctggactatggctttcctgaggctgggcccttccacgtggcctccccggagctccaccctctctaccactacaagacctatgtcggcggcatcctgctgctctccaagcagcactaccggctgtgcaatgggatgtccaaccgcttctggggctggggccgcgaggacgacgagttctaccggcgcattaagggagctgggctccagcttttccgcccctcgggaatcacaactgggtacaagacatttcgccacctgcatgacccagcctggcggaagagggaccagaagcgcatcgcagctcaaaaacaggagcagttcaaggtggacagggagggaggcctgaacactgtgaagtaccatgtggcttcccgcactgccctgtctgtgggcggggcccctgcactgtcctcaacatcatgttggactgtgacaagaccgccacaccctggtgcacattcagctgagc

SEQ ID NO: 11327 - DNA, 376 bp, Homo sapiens
gcagctttacaataataaaaaaaggactttggtttaaagtagcaggtttaggttttgctacattctcaaaagacagcaggagtatttgacacatctgtgatggagtatacaacaatgcattttaagagcaaatgcaacaaaacaaatctggactatggataaataatttgagagctgccacccacaaatataaatacagtactcatgctgactgaaataataagacatctacaaatttataaacaaaaagtgattgtcattatcctgcttatgtactagattcaggcaagcattatagactttttggttgcggtggcttttgcatttatattatcaatgccttgcaggaacgttgcattgataggcccattttatt

SEQ ID NO: 11328 - DNA, 926 bp, Homo sapiens
ttttttttttaatttccctgctttcaaaagatgctgcaattcccaaatctctctttgggttttgctaagagccctctagaggaggggctgccaacatacctcgtaggggaaattcaaggcctcttcatccactctgtctctctgaacgattgctttagccgtgaacccgcctgctccttcttcatctagctccaaattgtcagtaaaatcttctaactcatcgagcactgcatactccactctcttttcctgatccagctcattctcctcatccttcttatcagcactctcaccccctatgcctaccccgtcaccaacactcccgccaaagggacaagcatgcacgtccccactgacagggcttaaggagcagaccgcactccgcccgcacgtcgcgctctgctcctgtggtacagcaccttcctgtccttactcctggcagctctcgggtaaagctcacggttaatcttttacatccttaagcaacttaagggtcagggggagaacttccggaccgcaggtgcgtggccgggcggtgcgcgggctgtggccactacagttcgggtctatgaggaggcggcccttagagaaggatcctttggagagaagagaagctccgtagaagttgaaggggtcctcagcagggagttcggactgtccatcaccaccagagccaacgtccattacctctgcaccactggacgtttgcaggggaagttgttgaagactgctcacggggcagcgcttggaaggggcgagctcggctctccatcaccgcttctcctgcgggcccacacgggagcggagaggggctctcatctgtctccatattaaaagcgcttaagactagtttacaagaccagagttttacaagccctcacataaatctacacagctaacatgcacaagtccgctgagacccgggc

SEQ ID NO: 11329 - DNA, 375 bp, Homo sapiens
  misc_feature (1)...(375): n = a,t,c or g
gcagaaaggagaacgggaggtccaactctttgccgatcaagaaaacagttcactttgaggctgacacctacaaggatcctttctgcagtaagaacctgtccctttgctttgaagggagcccaagagtggcaaaggaatcattgaggcaggatggacatgtcttggcagttgaggttgctgaggaaaaggaacagaaacagggaatcctcgaagattccagaatcctcctctgacaaggtcgctggtgacatttttttggtggagggcacaaacattaatttttcagtcttttttcctgtaatgggtggtttaggaggagtacagcccgccacgatggaagaaagtcatttttttttcacccccnggggaaattat

SEQ ID NO: 11330 - DNA, 516 bp, Homo sapiens
tcaggttgacttatatccaaaattctacaaattcttagctatgttataaatgtagaaagaagtgaaaaatcaaaatatgattatgaagattttcttctcttccgagtacaaagctctgctaaataaggatttacccaagatgcccacatccacatacttatgtgtcagtgctttggagaattaactttgactttattctactggaagtatagattaacactgtgctttctgggattttgcttttcatgggttgctgatttttaattttgctaaataagcacatagtccatcaccagcatcacctgccctctgttcctcccccgtcccccagggataagaacctgttatccaccatcagtaacattttatgaaagatctacttatttgtctgttttgcagacattttaaaattcgtaaagtgggatgcttctttaatttaaatacatttagcttcatgaaaaactcactacacagttcttgttcaagcattattgggaaaccaccagagggcactct

SEQ ID NO: 11331 - DNA, 821 bp, Homo sapiens
  misc_feature (1)...(821): n = a,t,c or g
gccacagcagagccacaagtaatgtgtgtcaccccacttccatttctgtggccaaaggaagccacagagccacacctgagttccataggacggcagcagctgatcatcctatgggctggggtgctcagtatggagaagtacaagcagccacccagcgtggggctggttggtgctgctgaggatgggaggatgggaggggcctgcatccatcccagggcaacatacctgtttgtctgctggggctgcctgacaaaggaccgcaggctaggggacttaaacaacagacatttcctcatgattctggagcttagaagcctgacnnnnnnnnnnnnnnnnnnnnnnnnnnnnnnnnnnnnnnnnnnnnnnnnnnnnnnnnnaagccatcttcttgccgtgtccctgtctgtgtctgtgtcctaatctctcataagctcactagtcnnnnnnnnnnnnnnnnnnnnnnnnnnnnnnnnnnaaccctgaattacctctttaaagaccctgtcttcaaatgtaagtactaggggttaggacttgaacataaaaatattgaagggacatagttctgcccacagcggtgcccgcgataggcttctctggttttgtctttgctgttcctggcagcgctatattgggcaggcttctgtggtctccacatgcctgtgtgcagagtcccccaggccctgggttctggggcccatactgaggagtggggatggccaagccttggctgttgagtaggcactgcccagttgtgctgtatgggatgctgtttctcacttaagaaatctttccctacctggggggtacaaaggcattat

SEQ ID NO: 11332 - DNA, 483 bp, Homo sapiens
gtgtggatcggaaaaggaccacttttattctgatgatgacgcaatagaagctgacagtgagggtgatgctgagccctgtgacaaagaaaatgaaaatgatggagaatcaagtgttgggactaatatgggctgggcagatgctatggctaaagtcctcaacaagaaaactcctgaaagtaaacctactattctggtcaaaaataagaagctggaaaaggaaaaagaaaagttaaagcaagaaagactagagaaaataaaacagcgtgataagaggctggagtgggaaatgatgtgcagagtaaagccagatgttgtccaagacaaagagacagagagaaatcttcagagaattgcaacaaggggtgtggtgcaattatttaatgctgttcagaaacatcaaaagaatgttgatgaaaaggttaaggaagctggaagttctatgagaaagcgtgctaagttgatatcaactgtttccaagaaaga

SEQ ID NO: 11333 - DNA, 815 bp, Homo sapiens
tttttgcaatacagttgtatttataaaattttgtttacacacaaaaaatgtattttgcttaaaaatataatttacatatatatacaaccacacaagggaaataccaaaatgttaatactagctaatttctatagagttggcatttaagtcagaggggtattgatgaatagatgtagtttattaaatttttttctctatttcctaaactttctataaagaacttgtagtatctttataataggaaaaaatgtgattttaatgaacactccatatactttcaaagtagactaaattcaaaatatttacacttactcattttcatcttcgttgtcaaaagaaaggaggctactatttttaaatttgtttttggtgagttctttttgaccgagtcctgatttacttccatcttcatttgggcttcttcttttttgagcttgctgttaaacctgaatatttttcatctgagggatgcttgactggttttcgatatatgattcttccatcggctggagttggttcttcatctgctttggcagcctttatttctgctttaattttcatgacttcttcaactgacaggtctcccttttttaaaaccaccacttgaggctgttcatcttctttgtcactgtgatccccatcttcatctgggggctgaggctgaattctcttagtctctacggtgggtccctccctgtagccgacccgttccttgaagcgggccagaaacgccggctcggctggccgcacgtacgatacctggttccgcttgctcatggtagctctgggtaaagacaggttccgcgacggattcc

SEQ ID NO: 11334 - DNA, 130 bp, Homo sapiens
aaacttgattcagaacactaacatcgacaatggacaaaagagcagtgatggacccatacagcgctttgacaagtgcctggaagagttctatgcactctgtgaccagctggagctgtgcctgcgcctggcg

SEQ ID NO: 11335 - DNA, 862 bp, Homo sapiens
  misc_feature (1)...(862): n = a,t,c or g
ttttttatgaaaattgtttttattttaaatcaaagtaccaggcagatacttgcaaaacaacatacaaagcaaaactcaaacatggcccttccctagggcgcctctgagcaggcacagagaagttctcaccctctgcaaaatccaatccaatcctatcttctcagaaaaccaaaccaaaggcagccatgaaaacccgtgttctgtacgtggttgagtaaggtcctcctctctgagtactggctggccccaaggcgcagaacttgggaggtccagggaaccctgcccccgaggagccagcaggacctggaggagccgggagcggtgctgacaacaaccttccccacccactgcagtgtggttcccatgaggatgagggcttctccagggcccttccccacgctgggggcttggagcccctgccagaagcagctgggttggcggtagatgtccccgagggccttgggaagcactgggaatgggctcccagcccctggtggaatgggggattgggaattaattctgaagctggttgtggcttatttttgtatggctctgaaattaacttcctctccctatgcctcagtagctaaggggcaggggccagaaaaggtcccaaccctgttcttaaaaagaaaggaaatgaacccacaacccactggaagttctgttgacgagggctgtcaaggcagacgcactcgtgactttgacaaagggaagcagctggaaggttgcgggtcccagggtcacaggcagctgtattagtgacaggttctgagctggtgggtgggggncgcagggctctcctgaccccgtagggtcataaccgctcatgctgcagaactcaactagagtggaaatgagc

SEQ ID NO: 11336 - DNA, 433 bp, Homo sapiens
gcataagatagcacgactgtgtatgctctggaggactgaaaggctgtacaagcctatgtattttttttcaaatatacatatgcatgggtcttgctgctgcctcttttgctgactgtaattggactttgaagcttcgaagttatatcataaaaatttgtaacctttgtctgagagagagctcagctaagcaatcactttccacttcttttcacaggataatataaacgttttcttgaaagcttgtgaacagattggattgaaagaagcccagcttttccatcctgggagatctacaggatttatcaaatccgagtcactgtcaagcaagaagagactgacaggagagtgaaaaatgttttgataacattggtactggctgggaagaaaagcacaaagcaacccgtactataatggtccccatcttaatttgaag

SEQ ID NO: 11337 - DNA, 360 bp, Homo sapiens
gcaaatctgtaatactttggctaaaattcataaagtaagccctagaggaaatacttgaccaccaaatttttgcccaactatcatcacctcccttcccccgcctctgttcttgccttttgacatctacatggaagacaagttctttacagcaaatggtaagaggcaggtgacctggtgtgtttgctgtgttgtagttcattgcctggggcttgggactccttttttaatggagagactagctgtgcaggtgtgtgttggatagggataaagtgctcacccctgccctctctacagtagttggtggtagatttctctctcattttgcctcataaatcactttcgagtgcatgtatttaccta

SEQ ID NO: 11338 - DNA, 679 bp, Homo sapiens
  misc_feature (1)...(679): n = a,t,c or g
tcttggctttccgaagccatgaaaccaaaaaagaaaactaagaagagaagacacaagtcgaatagtcctgagagtgagacagaccctgaggagaaagctggcaaggagagcgatgagaaagaacaagaacaggacaaggacagggagctccaacaggcagagctccctaaccgttccccaggctttggaatcaagaaggagaagacaggctgggacacgtcagaaagtgagctgagtgagggtgagctggagaggcggcggcggacactcctacagcagctggatgatcaccagtgacccaatgagctgttctctgcctcgggtctgtgtgaggccatggctcctgggccaccctcaccgtctgcctcagacttcttccttagtctggtctgtgtccactttttctaaagtaaccccacccccagcacaccattgttggcacctctcaaggttgctcttggtgttcaagggtcccctactccctggactaagtgcagttcttgccctcaagccccagaccaagagatggggtggtatatgccatgtggggttgggtgaatgccagtaagataaaaagttgttgagaagaaagggggtcttccaaggggaagagtcacaggctttgtttggacccaanccctggggtnggcaaaagggcaagggtcatcanccctcctat

SEQ ID NO: 11339 - DNA, 495 bp, Homo sapiens
tctgcctctgcctctgcctcaccctgctggctcctggtgggtttcatcccaggcagagttgacattgctggaggggtttggtggactcctaagaatcatgaaaccacaggagcatgtttaggaagagatttgtctctggtccctgtctctgaaaggacacagatgctaaatatttattgtcttagatcatggattcctgatacctctcactcaaggggaccaaaagggacccccccgtgttcatcccttgtaaggtgagttcagtctacgttgtctctttccagtcactggatgcgtggcaccaactggtcaatgggtgcttggtgccataccctgctcaccctagtctctgcaggccatgtcctgaagggttcctcaggaggtcgggactagggtggggagaggcactatctgagacctgcaatcactcttgttggtcttgagcccattcatttccaaaacatccatctttctccacttcccccaggtcttggt

SEQ ID NO: 11340 - DNA, 830 bp, Homo sapiens
aataaactagcagctttattgcccttcaggggccatgtcttcacttgagatgtcgaattgcttgagggaggaaaacctgtaagaaatgatggagatcagggaacaggccttggggatcctggagcggggtcacagtgagcattcggtcagccggggagacagacgccacaaagctcagcaggggctcagtttctggcctctcttcgccaccactcagtcctttcagctcctgggtgacctgagcctcagtcgccagccacccggctggtcacattggctgcgacattgtgactcaggtcaaaagggtcctggagattcagggggccaaggcgcagaccctcccagagattagaaggcaggccccctgccacaggcagtgccctgaccctcccgcagggacagcagggagccacgaagatcccaacaagatacacaggagaagaactgggctaagcaagggaactgaggggctccacatttatgctgggctccagtcttgaggcatccctggggaaactgcagtcccagccatcgacttccacctgttccccctctcctgctttctgggtgagctgggacacagtgggcaacacaggagggtccctggtctgaagaaaatagatcaccagcaaggtcagggcgtagttactgagaagggggccactccctgacagcccccgaccctgagcccagcagcggagggtgtacacgaggggccggactcgaccatccagctcagagcagagactcaggaaacgggagttatgcagggccagccggttactgagggagacatcaccgtggagaactgaaggccgatgacagaactt

SEQ ID NO: 11341 - DNA, 727 bp, Homo sapiens
  misc_feature (1)...(727): n = a,t,c or g
ccaattttaatgaaataattctaaacaaatgcgggtcaatggcactttatcagtgactacttatagaaggtaagccttggggaaatcatagcatcacagtatggagcttttctcaccttttcaattaaaggtgtacatatagtaagaaagaaagaccttccacctcataaggcaggtgactcaggatattttaaactaagatcagtaaagttcccatccactttctttgaatcatcaaattttatcgagacccatctctcagcttttagtaaatttcttcttaaaataagcccacatgtaaaacactttcctagttactttttgtttgtttgtttgagtctcgctctgttgcccagggtgggagtgtagttgcacgatttcggcttatttgcaacatncgccacctggggttcaagcaattctctgcctcagcctgcagtagctggggattacaggtgcccgtcaccatagccagggctaaattgtttgtattttcagtaggagacgggggtttcaccatcttgggccagggctggtcttaaactcctgacctcacaatccacccgccttcagcctccctatctctgtattcttaatggaagganttcccttttcctttcctgaagaagctggccataaagtccttaaacattttaaatccatccngaacccttttcctggtaagcnggaaatgtggaanggtttttcttggaaagtacaagggtac

SEQ ID NO: 11342 - DNA, 994 bp, Homo sapiens
ttttttttttttttaactggaaagtataccaatttcactttattagcctaatttaggaataggatgaggagagcggggttgaggtcaggcatgaaggaagagggtaaaaacttgtgatggttaagatcccttcagaactctggtgcagtcctcaatcactgcagctttactgtcagtcagtggagctgcaatccaaaagacggaaaatcgactcctgttttccatttctgtgtccagtgactcttcagttacagtgtgatgaggtctaccaggttgcctttaggaggagtcatgctgtcaggaaagaaatttactaaggtgtcaaagagctgagttctttgagcataggtgtgatccacatcagaaaagcccagagctgtaaaatctgaaccagatttgaatagagctgatgccaggagctgaaactcttttgtctcttctgggtctgaatgatccacagttatataaagatcattttgtaaatatttcagagcactaaggggatccacttgggccttttcttcaaacctgtgttttcttatgaggtacttgcaatgcctcagtaaataatcttttgaaggtctacacaacttcagtgaccagaagtcatctaatctcatctttggagagcaagattttcctggattcccaccaaataagtaatgaaccttgtgtagctcatcgtatacaagctgatgggcaaaccttggacatggttcttcttcctgaagacttttagttggattatcctttgcagcttgatcattcttatagacacaagaccaactattcctcacaatgtcataaatccagaatgaatttctaacattttcttccctcttttccttatctttgctgagtccagataagacgtgtatttcattcagttctggatcaatagttgctctctgtgtaaatcctgtcattggaaccatcccagagtctttcttggtgccatctgatattatgtctacatgatcagagtccacatcat

SEQ ID NO: 11343 - DNA, 185 bp, Homo sapiens
ggactcttagtaaatttgagagtttatatggaacacaaaccctacaaatataaagaatgtgacaaagctttttaaggaagttctcaacccttattacacataattcataccaaacagaagccctacaagtgtgaagaatgtggcaaaacctataaacctataacaagttctcaattccttttttt

SEQ ID NO: 11344 - DNA, 366 bp, Homo sapiens
gggatttttaaatgtaaatctatttttgtaactttgttgcgggatatagttctctttatgtagcactgaactttgtacaatatatttttagaaactcatttttctactaaaacaaacacagtttactttagagagactgcaatagaatcaaaatttgaaactgaaatctttgtttaaaagggttaagttgaggcaagaggaaagccctttctctctcttataaaaaggcacaacctcattggggagctaagctaggtcattgtcatggtgaagaagagaagcatcgtttttatatttaggaaattttaaaagatgatggaaagcacatttagcttggtctgaggcaggttctgttggggcagtgtt

SEQ ID NO: 11345 - DNA, 747 bp, Homo sapiens
gaccaaagacgacatgtccatgtcctcctactcgggggtcagcacgggctccctgcaatgtgaagaccttgcagacgacacggtgctggtgggcggggaggcctgcagccccacagcgcgcatcggcggcaccgtcgacaccgactggtgcatctcctttgagcagatcctggcctccatcctgacggagtccgtgctggtgaacttctttgagaagagagtggacattggactcaagatcaaggaccaaaagaaagtggagagacagttcagcaccgccagtgaccatgagcagcctggagtttccggctgatgcctgcagctgtgaggcctggcccaaggtgtcatcagtggggctggcctcatctcctcctgcctttcctcccttatcagtttctctttaaaggtgtgcccctcctgctctcccaggagcagtgagttgtgagtggaaagaaggctggtgcagacccagctgccttagacagattccctgggcctgcatctcctggcgccggctgcttctgggcccaggaagaggctgtggctcccaccttccttacacctggtgggaagcccgccttcgcaccagctgcacctgcctaagcattagaaggctctcagatctgcccttgcttgcctcatacctctgtgctccacactgcgggcccaggcccagctggagtccctcccatccgtggatgctttcctggcagctatgtggtatgggggtcattcctgcctcttgga

SEQ ID NO: 11346 - DNA, 468 bp, Homo sapiens
gaaaataactaatacgtccaattttgcttctctgccaaatcagcaagctttagtaaaaacccccagttacagttctgctccaggtggcactaccattcacacggcttcggcaccatccaatgtaactagtctagtcgggagtcagttcagtgaaccttgtattcagcaaaaaatagtcatcaataccagtacacctttggcacctggtactcagattatgattaacggaacccggtttattgttccaccacaaggtcttggagctggcagccatgttctccttatatctactaatccaaaatatggagcccccttagttcttaacagtgggccaaggcattcaatctacaccaatagataactctgcccagaagatcacactaggcattcaaataattccttaagtgggccaacctcttacaacatccttcttaaggaaggccctacaaaatttattaaactcttttg

SEQ ID NO: 11347 - DNA, 141 bp, Homo sapiens
gacattttcatgggttgattgcattttcaagctctaaaggattgaaaggataaatcttcacgttaaaggtgagagtgaagtatctgctcttgggttacagaaccagatagtactagaactaagattacagggtaaagctgc

SEQ ID NO: 11348 - DNA, 371 bp, Homo sapiens
gcaggaccgctggtcggacctgagagtcccagctgtgggaagctcagctgtgtaatttgtagtaacgaagcagaagttacaacgaaaagacaagttttcctgtgcttggcagggcccccctcccccccaccaaggcctgcagtggatagagcctagcagatcctggacaatactatcctaaaagctacatctctgacagtgatttccagcgactttgtcaacacggtccgcccccagcaagtataagaggaaaaacaacaaatgtctttactgccttgtctttcccccttgccacttgtcattattcaagttttgtaagttcctgatttccatttcagtgcagctgcaaggttaccagctgtgcttgcgtt

SEQ ID NO: 11349 - DNA, 872 bp, Homo sapiens
ttttttttttttgtgtgcacgcctgcatgccccacaacaacacaactttattcctctcccaaacatctgtcaggcctggccttcctgagcaggagctgagcaggaacagggcctggctgcctctcctctgccacagctctgacctgggcaaggctggaagctggcatcgtaatggatgggggagtgggtggaggatctgagggtcccctgcgtaggttccgataccttggacaggtgggcctcatcctgacttagaactcggggaggggccactcttccttccccttcttccagcagcagctccaccaccctccaccttctgtcctcgacatgtgtcccagaaaacccagccatgaggaccgctctgagaagggtctataggctttgcaagcagaaagaaaggtgggctgacctctgacctggattcagggggtgtctggggtcatccccaaagccaagtatggttggaaaggagaaggactgagaaaagacgatggccctggcatcagcaggtgaggcccaggatgacccatgctagaatctgggggaggacgcgggccctgcccagccagcagttggtcatctctgggggccacacaggcccatgccagtcagcttcgctctcgcaccgggcccggccatggaagaagtgcctgatgaggttctgggcctcttctttcacgctccttccaggagaggtcttctgagtcagcaagtgtgagaggtggcgggcaaagcctttaaacaactccttggaagcaaacttgccctccttgtagaaaggggtgaggcacttgaccacaacatttgcagcctccttcaaggagacgccaggagcggagagctggaaggggtcttgagccgtgggattc

SEQ ID NO: 11350 - DNA, 851 bp, Homo sapiens
tttggacttcagaacaaatgtttattactgcttaatggggccaaaggggcaacacaaagcattgaaaacatcactggctcacaaaaacagtcaccttgttaccttctcagttgcatttgtttatttcacaaggcttcattcacacataaaaacaagatactaatccaattcaagttcataacgattataaaagtaaacatttgttgggacaatgtacaataaattgcactttttagacaagcattacatttacatttatagagtgtactatacataatacatggaattacggaaacgtctaattggtcattgtttatagaggaagaggctgatcactaacgtttattttgtagttaattagtactgttcagactaatcaactcctttattctagaacctgttttcattagagatgccatggacaaaataatggaattcataaaaatagacaattccagaatctctactacctcctctgcaagggaaaggtaggagttagaaagaaaggaagtggggctgactgagaaactttgtccctcatttgaactaaggatccatgcattatgcaaaataccaaaaatagagaaactgatacaaaaggcttttgggacatcttggatctgggaccatctccagccttattcttgtgctttcatgacaccagagtctttcgatgcatttatattctcacaattcagtccatatattttatcccatatataatatatagttattaaaagttatacagtttaatggaaaagattttacatgttaactaattgccaatgaaaaaggaaaataacttaaaatgttcactttctactcaatgattcttttttcttaagcttttc

SEQ ID NO: 11351 - DNA, 390 bp, Homo sapiens
  misc_feature (1)...(390): n = a,t,c or g
cgcgagttgagctcctcttgcctaagtggtcgcgccccctttaagagcagcgattgtaaggagaggcggtcccggtgtcctcgggtcccaggtgattgtgaagtgctgaccaattgccactggacatacttgaaacaaaataggaaaatggcagcaaactcttcaggacannnnnnnnnnnnnnnnnnnnnnnnnnnnnnnnnnnnnnnnnnnnnnnnnnnnnnnnnnnnnnnnnnnnnnnnnnnnnnnnnnnnnnnnnnnnnnnnntttcaaaacaaaaatagagttgcaatcttggcagaactggacaaagagaaaagaaaactacttatgcngaaccagtcttcaacaaatcatcctggagctagcattgcactctcgagaccctct

SEQ ID NO: 11352 - DNA, 2758 bp, Homo sapiens
  misc_feature (1)...(2758): n = a,t,c or g
atggcgaccgccacggagcagtgggttctggtggagatggtacaggcgctttacgaggctcctgcttaccatcttattttggaagggattctgatcctctggataatcagacttcttttctctaagacttacaaattacaagaacgatctgatcttacagtcaaggaaaaagaagaactgattgaagagtggcaaccagaacctcttgttcctcctgtcccaaaagaccatcctgctctcaactacaacatcgtttcaggccctccaagccacaaaactgtggtgaatggaaaagaatgtataaacttcgcctcatttaattttcttggattgttggataaccctagggttaaggcagcagctttagcatctctaaagaagtatggcgtggggacttgtggacccagaggattttatggcacatttgatgttcatttggatttggaagaccgcctggcaaaatttatgaagacagaagaagccattatatactcatatggatttgccaccatagccagtgctattcctgcttactctaaaagaggggacattgtttttgtagatagagctgcctgctttgctattcagaaaggattacaggcatcccgtagtgacattaagttatttaagcataatgacatggctgacctcgagcgactactaaaagaacaagagatcgaagatcaaaagaatcctcgcaaggctcgtgtaactcggcgtttcattgtagtagaaggattgtatatgaatactggaactatttgtcctcttccagaattggttaagttaaaatacaaatacaaagcaagaatcttcctggaggaaagcctttcatttggagtcctaggagagcatggccgaggagtcactgaacactatggaatcaatattgatgatattgatcttatcagtgccaacatggagaatgcacttgcttctattggaggtttctgctgtggcaggtcttttgtaattgaccatcagcgactttccggccagggatactgcttttcagcttcgttacctcccctgttagctgctgcagcaattgaggccctcaacatcatggaagagaatccaggtatttttgcagtgttgaaggaaaagtgcggacaaattcataaagctttacaaggcatttctggattaaaagtggtgggggagtccctttctccagcctttcacctacaactggaagagagcactgggtctcgcgagcaagatgtcagactgcttcaggaaattgtagatcaatgcatgaacagaagtattgcattaactcaggcgcgctacttggagaaagaagagaagtgtctccctcctcccagcattcgggttgtggtcacggtggaacaaacagaggaagaactggagagagctgcgtccaccatcaaggaggtagcccaggccgtcctgctctaggcagagtcccgggaccatggcctcctgccacacaacacgcagagaggactcaagactcccgctggccatggagttgcttgnaaaggagagcaagaacatgtggatctttgataggattgttaccaaatggtgtcagtatggaccaattgtgtgaccatgagaaggatgcttattttttttaaaaagaaaacacatctaaaagcccaggaactgatttttttaagaggaaaactaatgacagtgtataactgatgtttaaattgtgcatttagtactatttaaatgttttcttatactagtattttatattcttttgttgtcgtttaaaactggagcttcagtgtctcttccctccctctaatagtaatggttcagtaagcactccttaactccttagtatttcatagaaaaatgactgcaacattaaagctaagagggacactttcaacatatgtggtacaaatttatattgaagatctaaataaaccacgtattttccagtcctcgttgtgtgaagctaaatggtggctaaaaggaacactttttgtgtgattattataaactttgcattgtatttgaatcttaagaacttttgtacacactaaatattgatgtcacaccatttctaatctgagcatccttagccagagaatattcattatacttcctaagtgagcaataatttaaatcagaagctattttattttaatgtaattaacctttctttacatttcttatgtgttcacctctaatctgttttaggaagagagttggttattatgttgatcccataatataaatcatatcctttatattttagaatatctcaaatgtattccttttttgtatggtgggtttgcctagggacgtgtaactacaggcttttactaagccaaggaaaaagagaatttttcttttcatcttacaaattccagatatctacaaaagatgtgaaagcactaaaaataccatttttaagcagtactttacctgttttttctttagcaaaccaggttatgtggtgtaaaggtttgttatacgtgccacaatatagcatataaatattatgccatcattccttctcttgttaaaggtagaagaataaaattgtgatttttataacctgtgcttattactcaaatggtcttcaacatctttttaaacaacacatactttttgaatgttcagtttctattttgcttgaggtattttgtacatatgtgccttgtgattgctgctgctttaaaggataaagtactctttgggggatgagtctggtttgttttgttttattttttaatgaaataaacctatattcctgattaaaaaaaaaaaa

SEQ ID NO: 11353 - DNA, 991 bp, Homo sapiens
ttttttttttttttttaaggtaacaaatttctggtttatttcaaatgtatacatatactcaacacttatagaggtttgctctctggttttactctcatcttgccacatgactataaacaaaaagacatccctttttcattagagatccatctgttctgtgatttttttaccttgtgatttataaaaattaggacctaaatctataatataaacttcttggatgccagtcttactcatagctgacacattttagatcctactggaaaactaagcaaatgcctcttatttcaataatccaaaacttaacatactcttagtaaattcttactttgctttattcacagaacacagaccaccagtgcaaaacaagaaaaagcaccaagtaaaaagccagtgaaaagaagaaaaaagaagagagctgccaattaaagctaacagttgtatatctgtatatataactattaaaagggatatttattccattctgagaaccctgggtattttttattcacaaatccattataaaatctagcaggattttaaaaatagttttttgtttttaatgtgctttaaaataataaaccttctggagcatttctcgtctgttaatttgcatataagcttcccaccctcttccactcccaacctctgttgagtttacctcgcaaaacctaaacaaacaggttttacaaagagcgaaaaagtctggggaatctctactgtatctatctctgaatactgtattcagatatgcttagattagattatgcccaagtcagcaaattgatccagttgcttaggaaaatgaatgtcagaatttgagggtctgttttcctaaacctactttaattttagaggaaggcttttcacttcccattatatagtaaaccaagtaaacttctttactaagcaaaatcctgaagaagttaaatttgacttgcaaagttttccaaatcaatttattatcctgacagctggcaacattaatact

SEQ ID NO: 11354 - DNA, 768 bp, Homo sapiens
taacaatccctaccccacatagcccaaaatataggaaccagggatgttcattataagtggtgttaatgttcacccaagcatcctaaaaagtgtaggaccaaggtgaatgatctaataaccccattccaatcaaagctgtcaagaggaagtattgttgctttagttttctactcccaaaacagcacttaaagggttaaatatcctgatggtactcagctgaccaaaataaactagtaggtcagtgagtattgctttaatggtcaatttacctgggaatattggcgctagagaacagtgatataatttgaggtgtctacaaatgttgtctaaaaaacctctctcctctcatccccatgtttcctctgttctctactcttaaaatctaggtatcactgggaagagtaacgcactaggcccacaggaccttagtattaatataaatgagctttagttttcaaatgtcatttttttctctataactggagaaattccattaataaaagaaccctaggggatagagggtagagggagcgagaggggagtaagggaggacacggacatacttaacactacctagggcacctaaccatcagaaatgcataggcgcttaccaaaatgaattaatgaagataaaagcatcgcttaatggcagtatctgtaatttccaaataagattcacatcagtgctatcttatttaaaaataaacagatttccaatccttacacaaacattctcccaatattaggctttctttttcttcctttttt

SEQ ID NO: 11355 - DNA, 454 bp, Homo sapiens
  misc_feature (1)...(454): n = a,t,c or g
agacattaatttttttctttaatatagtactttaaaatctgagaaagaattcaagaaaaaaagattacatgtcatgtattttttcaaataaaaaaggaaaactaagtgaataaattttaggcatactaagtgtccctttgaggtagaatgctaaaaggacttttgatgaaatcacagcctaaaaacctctgcatcagaaactaacttctcataaattctctctaaaggtaactgtggagaatattaagtgtaacatattaacaagagccttccaagataatatacagtagacaagaatgttaatcctacaatgctgccttcttgtacattggcagcacatacttctcctataatagacatccaagatccattctcaaagtctttagcattctattacgaaaagcacagccatgctaacttcaggtacacaacccttatcccacacctncaaagc

SEQ ID NO: 11356 - DNA, 804 bp, Homo sapiens
ttttttttttttttttgaagttaaaggacactttatttactgacagattgaaaactgtaactccaggtagtgcaaaatgcaccacaacccaattacaaagaacaggtgttaacacacaatgtttaaacaatgctacactcatttttggcaaagtgctgtattgttcagtctgtgtacaaaactgaccatctatgaaccaatcagtataaaaaatttctataaaaacaaaatttagacagtggctcaagaaaacaagctgccatttatgcatagattgatgtacagtaacctaaccaaatgtcccttttgaattttcaagttactgaaaaaaaatgtgtcgagaaacacattaagaaggcacatgtacagtctacaatactcttcagtctccctaactcatgccctgcccctataaaggaaatatgttcacaattttacttgagaaaaaaaaacaaagccacttaaaaaaaaaaaaacacacacgcaattatttaaagttcaaaatctctggaggaaaatacaagcaaaaccactcatacactccaagcctgaaacacacatctaacctccccaggtactggtttggttttcaggaggtccacctagaaaacaaatactaaaacttcaggcaaaacagagcaaaactggacatttaacaattacacaatttttaaaaggtgtcgtaaaattctcaactatatacaaaacattgtccacttaagctgcctgcctttcaagagtaactctcctcccatgcaaaggatactgttgcacataaaagatatcctcatctgcatgttttcc

SEQ ID NO: 11357 - DNA, 264 bp, Homo sapiens
gcgtaatgacattgtggttatgttacaaaaaggagtcatttcagaaacagactgaaatatttacaaataaaatcatgtgttgtctgggacttacttcaaaataatgtgtgagtgtagggaatgggcagggttgcagtagggacaggattggccatgggttgatggttactgaggctgagcgatggcatgtgaggttttattattttattgtttactctcatctattttcaaaaagttaaaaaatcagccctccctttgctgaaa

SEQ ID NO: 11358 - DNA, 532 bp, Homo sapiens
tttttttttttttttttttcctgtagagtatttatttatttactctataacagttcacattttaaatagtgcttcctgacaatataccagctggctcttctttaatagggcaataaggatagcaattcacattcaggggattagtttcaccataccacacatttgggggatggcaaaaacggggtctaaggaaaagggagggtgtttaagggaaagaggagggtaagacccttgcatttgtagaagtcattactatttctcagtagtggtcatattggctttgccggcaacctcaggatgggattagagaaagaaaggagcatgtcctatcttagacacctgggtgggtggctgcctgcaaggagaaggaggcttagggacacatttcacaagaaaccagcacccacattggtcagatgaagcttcctcaattttcagccaccacttacacctttctgtaccggctgcaagaggaagaagaaaactaaacttataatgttgtttggcaaggagagattcaaacttaccatag

SEQ ID NO: 11359 - DNA, 1836 bp, Homo sapiens
tttttttttgaatatactttgtgggattttatttaggtcaagttcttagtacacggcaacaattccaaatacaattaaaaaattaaaaagtgatgttcctccactcatctggaggtggtttaatggcacacaaggaacattactggcaacagactgctccctcaagttcccctggatggtttttactcaactcataataccaccaactctccctctgggagctaaaagtacaactggccagatcacaaattgtttacattcttttttgtaagccattttaagaaaaatggtgcatggacacaaaatatgataaaaactgcttttccatagaattcttaagttgcaaaagaggtttcattttaatgtgaaaataagctttttttgttggtttttcttttttcttacaaaaaaccttaagatattcagcaaggatcatttatacacagctaggccccgccgtttcgttttaattgttttttttttttaataattatatgagatctccaaaacaggaaccaaggtcagcaccaagtaaacttaaaggtaatgagctcaatgcctccatttaatcacttttataaggctctctccaataaggctgctgtgctgtgctcctgccagtgttggagtaatataacatttttactgcacacaccttatgggaaagtgtttatactgagtgtagttttaggaggggtaaatgaagattatttccacaaattaagattgcacttagtacacgcctttacacaactctgatggtatttaccaaaacatggcatgtcttttcacgtatattcctgaaaacaccaaatagaactcttaacttttaaagaaaaatacagcacatttagttaagacagttgtggtgcagtggaaaattaagtactgagcactgagtgagaactctgctgttattaactagctgttcatatgaagaagaaaactcacctcatcagtctaatgagacaaccagaaattttaaaaatttcatctagctcaaactcagtgattctaaatcttatatgggggaaattaccaccttaacaccaatcaggagttcccggccaaaaagaccagaagtgagcagatcccattcttgtcaaagactggtcagtcacctgtgaattcctgcatcaaacctttttcaaaggcaaaggtgaccttcaggacatgtcatgctgtctccacaaaggagaaaagaaaaggtagtaaaagataaaaacagttcttaatgcagaaaggtcacctactaaaagaaaatgaacattaaaaagataaaagcaaactaccatcattttgatgcctcccaaagagaaaaatctttagttatcttcaacataaactgccaaggagcacaggtacggtccagacatcacggtaaatatgcataaaatattgtctagctggataataaacaccagcagtaggaaaaaggaggggatgaaaatgtctcacacccagtaacttttaggaacatagcaaaattagcaggccactgtcaactctaaaatgggaacagcaggcgcctctgagggagataggaagtagctaaatgatggaaaatattaaacaagatagcttagaagattcatatttattccaaatgggaggctgaatctctcagatgtcgattttgacacattggcactatttttgtttctgatttattgccttggccgtaagttcaaaggcaacaataaagtgtactttcattaataccaccatggactttcgagtattaatatgacaagaaaagacaactattcattttttttaaggggactggacacacaaacttcaggagggaagaatcccctctcccattagaatccg

SEQ ID NO: 11360 - DNA, 276 bp, Homo sapiens
atgaacaactgaagaataaggctaagaaccaataaaatatttctctaattgctagttgtaaaactgtatccaaattttcagaaaagacagcttcagcttgcaaattctatcctctaaacttatctggtgcattctccccaccccacccccattatataagggctattttagatgcttttaacctccccaacaaaatatttgccaagtgtccaatgagaacttatcatgttggtgtgttaggtaaatcgggcaaatatgatagtgtcttacattggg

SEQ ID NO: 11361 - DNA, 770 bp, Homo sapiens
ggagaccactaaaatcagttaaacaagtagggtatatacaaagaaagatgaaacccgaaagtacataaaaaggatttaaatccgattttagatgtacctagtgtgtatttcttatctctagacaagttcatgtttattgtttaatttatgcccaagtgaagttgtaaacttatggttcaactctgacacagaatttgtcacttgtctgaggtcagtggcaggtttctctgctgtcaagcactctgtgtcacccaccagattagtataactattaattcagactgtactcctatgtttaagataatttttacaagagctggctgaagcagcacattagtaacctgacaagatttctttttcccttttcagggggaaagggtcaccttaaaaataaattattttcagggactttgggaatctaatgataaatattacacataatctatgaatagcttaatcctttatatattccttaaaataggaattcctcgacatcactcctggccacactttccttgcctgtgttgttgctatgtgtatttgaaagtaatatctgcattccttttaagatgttctgtaagtcatatttgtcagttatacagagtagtcttccttttccccacggttcagtggaatccctcactgaacagtaataatagcaatagctaacaacatctgcacagcaccttacagtttgcaaagaacgttcacacattctcatttgagttttgcatagtgaacctgttacgagatgtctcttgacgtcgatg

SEQ ID NO: 11362 - DNA, 442 bp, Homo sapiens
ttttacagaatacattcatttattgggtcttatcttaaatctccttattagatattcaattcattgtcatccaaaataaaaaaacaaacaacaaaatgcttatgacagaaatcacaaacagatggctaaaatttgaaattgacctcatctctgttctttaggataaatgatacagtagttttttcctctctagcctaaactggcttctgggttttctgataattcactgtactagtacaacatcatggcaatttgtatttccaggattttcattgtcttggttatcatttccaccttcttcgttattctcaggagatacactctcctttttttctgtgggagtagtaactgttttctcaggttgagaattcatgttctcagcattactgtacttctctgtatttcttgggctgggcagcttcattgctgggctctgggctgg

SEQ ID NO: 11363 - DNA, 673 bp, Homo sapiens
ttttttataaaaccttaaatgtaatctttaatgaaaagatataagcattataaaagaaggggtcataatgagtgatgtggagatggctacatatactttcttaagaatgccacatcttttatcatacagatttcaaatgctttttggctacataagtactttaaaagaattgagctacatcaattaaataacaaatataattagttcttcatcatcacaataagataacaatgattaaaatgttttacctcatatggtgaaaatactaatcttttcattcacaaatttgtaggcaaatgtgtaattaccaaacaacgtatagtacagaaacaagaaaaatattgtaagtctagttatgatagttttttctaatagacaaaattgtcaacaatttattataaaaaacctatacaattaatacttgatcaaaagtctttaaaaatatattcataatgaaatgtatagaaagagacatttcaaagtcatagcagttactactattacaatatttaatcatttttacaataggtctgctggtctatttcaattaaattcattctcagaaccatcacatatcttgctgaatttcatttaaagcaaaagcaagttgcttaatttttgcttccattggttttttggtcttgctggttctttcaaaaggtcacgcatttct

SEQ ID NO: 11364 - DNA, 1403 bp, Homo sapiens
ttttttttgtacacccaatgaattcatctctttattgcatattgctatttttaaaaaaacatgtacagtctcataacacatactttttttttctcagtactatctaacaacagtcttgcacctaaagactaagtggttccaactactaagctaataagatataagacatataattaagtttacaaattatgcattttctttttggcattaatttaaaaaaacaaaaaaagtttaaaatacacacccaagagagaaaagtggctacttacaccagcaccaatctaaaaagtaggtttttttttgttttttttttttcttttcaacaatggcacatggaattacctgcacacagttttcagggaaagaaaccaaaaatggaaatggcaaaggaggcccaccaggatggccatatcaaaggaggatgattaaaaggggcaagagggacagctacacaaacttgctcctttatgtgactttccctccacctgtctattccttaaactgtaagacaaagccattttcaaaatacagttccaaaactgagccagaccaaatttatcctgctacaaatagaaaagaatatacatagaggcactttagttaaggaacagacaaaaccatcattatattccaatcttcctcatctccaagcctttttgagccaagtctctatctgcacctttaacatggtgttattgcagacctgggttaactcgggattgggggagtgcaacctctgctttgtatttatgactgttttatttgctagtcatttatttccatatagtgtgtagaaagtcactaaatttgcaatgaggaaaagatgtaaaaccacagctcttgacaactcttagagcactatttcacagctttcacatagcacagataactcgccatctgtgctaagcattatagtttatacaaattatttttaaatagtatgattcctgtacagtgcacacattggtattctattcatcccttaatatccccattagaatataagctctttgggggcagggactctgtcttgcttaccattgtagccctactatgcctggtacatagtaggaacttaataaatatttgttaattgactgaaaaactcaatttagtgagtaaataatgttctagtgcaacaggacaaactactctctccacaggaaacccaaccacaacaggatcaatagaaagaaaagagaaaacgttagcccccaactacaaataaataaagcaaagccaaaaaaaaaaaaaaaaaaaaagtaaaaaagtaacagtcctctttatatatcacataatttaaggatattaagagttggtaggttaatggtaagcatctatattttattttctaatgttcattgattttattcatgtctccctgagagctttatttttttgga

SEQ ID NO: 11365 - DNA, 689 bp, Homo sapiens
tttttttttttttcacactttggaaaatttcaactttattgttccaaacatgagaaaatccaacagttgcaaattatgccagcagttaaatgtgaatcctactcaagaacatgttccactggtagttttgattaaactctctactctgatttaactgttctctcttccatttgaaaaatcagagtactttttaatcagtctttgctaaacagcagctattgctattcaatggagacggtggccaccatttcccctgcatcgtctctcctacgtaatcagtccctgatgaactctcttcccataaaaatccctgtgtcctaaagtcatggcgtgctctatttcatggtcatttgtagagcacagcagcactgtgcctgtcaggaaaagtgtgtgctaactgcaataagcatgatgactgccatcacggttttgttattctctgtccacctccatggtctctaaatcagacaatctttaatctgaaaaggcagtgtccttattcctccaggaaactggatagaaacgctcctcatctaatgaagtcagccctgtcatcttactgattctttcccagaccacagtgaaaggcctgtagggaaggcacatgaagaaatttcaaagttcaggttgaagtcataaaaactagccttttttttcttttgagacagggtctcgctctgcacccaagc

SEQ ID NO: 11366 - DNA, 422 bp, Homo sapiens
  misc_feature (1)...(422): n = a,t,c or g
aatatcaattgaatttattacaagttactaagctccaaggcacattacagtgttctgttaactacagaaatgtataaaggacaaacagagcagattctccatgtctagcatttcgctctactgttcaaaagcatccgtgcatcaataaagcaaaaacaaaacaacacgtgtagatccaacacattcaggtcagtagaaacaaaccaaaacattttcccctcacaaacttgcaacaaaatacaccccatcccccccgacacccccttaccattttgcaaacaaaacagaaaaacaaaacaaaacagaacaaaataaagtgaagacttcaacacttggggcagtttagaaggaagctttcaccattttatagcannnnnnnnnnnnnnnnnnnnnnnnnnnnnnnnnnnnaacactggccttgg

SEQ ID NO: 11367 - DNA, 1644 bp, Homo sapiens
aagtagattctgagtttattgttaagatttctttatttacagtacaagtctccaaaagttcaaggcagttatcttttaaataacatgtcaatcatataaaatagctagaaccaaagtagagaaatatatacaatacattaagtactttcaatatagtggcatttttcatattaaattaaaagaggctactatgatttacaatgtcatttccctagtttaaaattcaacatgtcaaaagacataattgtacattttttacaaaactgacacagcagtattaaaactgctaatgattgtagtttttattttttctataatacactgcacctgtgttaccaaaaaaaaaaaaacaaaaacaaaaacattgcactagatggtttgaatactgcataagtcagtatattaacacttgaggaataatgaatggcctggtccgttttatgatcaggctcattcacaacagttttcactcttcaagctcagcaaactcctacaggtaattactttccttggcagttttacacaggatcactgcaaatgggtaaaatgtcatgaagctgatgaccacaatgccatcacaaaagctgatatcgatataaccctactatttacaatacctaataagagccaaagcctagaaaatcactcactgctaaatcatggaaaaaattatagtttgtaggaaattttgaatatctataaaatattcaatagactacaaaagagccttgcaacagccttgttctcattatttttcttaggtcagaattagaaaaaagtaaatcctattttttaataagttttgatggcatcaaaaagcttcacatttataaataagatttttatacaaagcaacatgttactgacatagttttctcttgctactatcaattattctcgggactcatgttgtatgttaaggaaggaagtattaagatttcttcctcattcctaaattttcagaatatactctaggccttgaaggaaagggaaacagtcattcaatacttaacactgagtagtacaatatttgaaatatatctatgatagtggcctaaacaagagcagcaagggaccagacatatagttctaccactcaatagaaataaattgtatatttccccttcattaatactgtccaattttaaaatgagagattacctttgcaaggcagcaactattgtttcagaatgtattatattgaaaatttttgccacaaagttacctactagactacagtactttaaaacacagttgttcaagtcatgggcaaggaaaacaaaatcaacaggacagattattgtcagaagccattcctgtggagcattcctgctatgcacatagaattgaaactaaaaacaaagaaacaacctaattgcacctagggggagacaccttgtacttcaagtgctcatgactaggggagtacaggaaacagacaggaataataaccttaagtatcctcacagaaaaaatgaacagagacaaaacagtgttggcattttaaatcagatacaaaatccattgttcctagacacaaaataagttaataatgttccacatttatttttttacctctgtacagctcctttaatagtctttgatttcaaaactaaaatcctcagtgttttgtgtatcttcaaa

SEQ ID NO: 11368 - DNA, 538 bp, Homo sapiens
  misc_feature (1)...(538): n = a,t,c or g
ttatgtaaggcatttttctttattatttttcagtttatcttagtaatgccagaaaaataacagccgttattttcactttaaatgcaaaccaaatactgctgcacacagagtacaaagattacctatgaacatggttaggtacaaaggccatattagatgtatagaccacactttgttcttacatcaaagaccgaccgacagagcaattttttgacaattattttagcaaataaccgtgctactaaacaaaggcaaatacacatatatacacaaacacgtctcaactaaaattatacatgtcactttgacaaacaaattctctggtggtttcaccagatatttgcaccccagagttccctgcccaaatcccgaccccaaatgctgacttgatctgaagannaaaattagagatgttcttaattaaaggcacatttggcagctactgaaagtggcatgcatctggcacaggtgcgctctccctaagccacaccacatgtaccttccatcatctgttatgcatcttgtttctttgagtggt

SEQ ID NO: 11369 - DNA, 400 bp, Homo sapiens
  misc_feature (1)...(400): n = a,t,c or g
ttttttttgtttttttcactgtttgaaggtactttattaagatcaaagatttttcattacatttatttataaatccttcctagtcaaaataaaataataaaaatctgtatctttagaaagaacatagttttgtaagtctgagaaggttatgtttgtcagtttcaaattattacagtttagatacattcaatcattacacaataccaggaaggtcagccttaaagataccaagaacttccatattggtcagtaaaataagggtaaaaaattaaattttactttcacctttttatgtttgattgactacagtcaataataggagtacagaatttacctttttgggtcttggatttttaaaatatatggaatttttaaaaggtggacgttccccttctnctta

SEQ ID NO: 11370 - DNA, 317 bp, Homo sapiens
tgactgagggaatcatggatacttcgcaggagaagtgaatttgagctcagacttgaaaactgaggaggagcttaccaagggacaaggaggagaaaacaataatttccaagtaaagaaggtataaaaagttagaagtgtactgtaaactttgataggcttttaggccttttttaaagcccaacttggcttctgtccattacctataagatatttaatgtcagtcagcctttaaatgtaggaataaaatggctggcatctaagcacttttagtaaaagaggtttttacaaataacttaaggattgtagagcttccttct

SEQ ID NO: 11371 - DNA, 372 bp, Homo sapiens
agactttaacatcctgggtcttttctgtttcttctttgtttccccaagtttgtctgtccccctttgccttccctgagtgttgaacatcaggtagtaaaaggctaaacgcaatttcttgcatgtcaatctattctttttctatgtttgactctgatgcagtgtgtttagcgtgtctagtagctggctactcctatttaaaaactcttcctggtagaagacaacccaaagacccttttcgatgaggtggtttctcattctacatcctctgatctctatagactgtaggatgctttgctttcaaagataactgggttagagggtggggtgtgcaataggtgatttatcatggtttttttcattatcaatattacg

SEQ ID NO: 11372 - DNA, 755 bp, Homo sapiens
ttttttttttttttttttgttctttaaactgttaaactttattataaattaaaatttctttacaaaaaaattgcacataatatttgaccactcttaggttctgatgcactggcatttgcaatagtttctttaatcttcaagttaaacagtctcggcaaggagtccagaacgtagaaagggtaataaacaaccctgatagagcattcaagtgcaactagcagacttgtgggccatggcagtttacactttccttaagatggactgctatagttttaaatcctgaaatgaagaatctcaaaaaaatttaaaaaggaaaaactaaaagggactgcctgctttttttactgtaaacacagccctggatattaaatcccaaacaggaatctctcaggcatcagagagtgtcaagtgagtcaggaataacacaaaataaaggaatgggggagaaaataaaaaaaacaaagcaaaattaaaataaatgtcagtcactttgaggaactatacttacgtatatgatgttatgagaatctggcagggcctagaagcaggccaaacaggaagttcatttatccaaccgaagaggatcatgttcattgcttcccggttttgaggacaggatattgtagggaacttgatatgatcaataacgcttgtctgccttacacagaccttagccagggatcagcctaatcttgaagaatcattcaaataattttggcaattattataaggacttagaactgactgcacccagt

SEQ ID NO: 11373 - DNA, 1341 bp, Homo sapiens
taatagggactaatgtgggaagaactggctaatttgtcacagtgcttagttacaactgttaatgtgtgacctgctgttggtgtacatgtgggtacaggggtgtttttaaatccaacaagatagagtataatatcaatactgctaaatctgcatgtcctctgtgtgactgatagagcgttgctatttcatttttttaagacaaaatgaaagcaaaatatagagttccaatgtattggtgtagataatctagttgggaatacttttaagtctcaccttcccctttaaactaatattcataattggttcatatgtttaaaagactttaatttacaaattaaattgcaaatgggagcattagatttagttttagacttaggtgggtagcaatgccagtaaacttaaattacgtaacttcttgcaaccacgaaacctgtaatacgctgtacagtaacaagtgttggcattatcagttgaactgtaaatacaaaatgcttcttccaattagtctctatgatgattaagtttctaaaatttatctgaacaccattcagaaacttgttttggggaatttgatagttattgatgtgcatctgttaaactgatgacagacataactcatcattccccagaaaccttttttgattacagtatctaacattttgcctcctcttttttggttttgctggttataaaggtttggattggagagggctcactgggatcccaatccttggagctggatcattggattcaaatcataatgtggataggatagggaggatgaattaccaggattcatggagcgggatcagattaccaggaacataggagtggattcctgccccaaccaaaccgcattccgtgtggatttttttattcaacttaattggctattccaaagattttttttttcctatttttgacgattggagcccttaagatgcacgatggaattgtgttttgcgttttttggtaaaaggagcaaagcgaggacctggagataaacgctggagcaatctccttggaaggattcagcacgagtagatggtaaacatttaaaggggaaagggggggtttgtttaaaatagtaaatcagtaagtcacttctaaatttaaagaaaacaaaattggagttgaagaataagtaggtttccaattggctattgcccgttttctttgaaaaaataaacattttttaaaaaactatgcatggttgtcctttttcctcttcatgtaagattctaactgggtctatcagttaatctttaaattgttaagtaagataagattttgactcttgtgttaatgtgttagcaaattaaaagttcttaaaaggcaaaa

SEQ ID NO: 11374 - DNA, 676 bp, Homo sapiens
gtgaaacagaaaaggaaattaaaaggaaagctgaagttaagaaaaccaaagcaggaaacaccaaagaagcagtggttcacctgagaaagagcacaagaaacacaagtaatattccagtgattttggaacctgaaactgaagaaagtgaaaatgaattttatatcaaacaaaagaaagctagaccttccgtcaaagaaactcttcagaagtctggtgttaggaaagagtttccaattactgaggcagtaggatctgataagacaaataggcatcccttagaatgcttacctggtttaattcaggataaggaatggaatgagaaggagttacagaaacttcattgtgcttttgcatctcttccaaagcacaaacctggtttctggtcagaggtagctgcggctgtaggttctcgatctcctgaagaatgccagaggaaatacatggaaaatcccagaggaaaaggatcccagaaacatgtcactaagaagaagccagccaattccaaaggccaaaatggcaagagaggtgatgctgatcagaaacaaactattaagataactgccaaagtgggaactcttaaaaggaagcaacagatggagggaatttctgggaacagttgccaaaagatgaccatgatgattttttcagtacaacacctttacagcatcaaagaata

SEQ ID NO: 11375 - DNA, 552 bp, Homo sapiens
ttttttgaaaaccagaattacagttctcatttcactacttaccagttgtatactcttgggaaagtcactcctagtatctatttcaccatctacagaagagaaatacttcacagaattattgtggggattaagttagataatgtgttttaaaatataaagctacatccaaagaaatgccaatatgtgacattagtatgaaatttactacagctccatttaacattccaactggttgctgtgtggaatatggcataattgtaataaattatttaggaaagcaagcaaagatgtaagtttttttaatttagggggaaaaaatgggagccttgctctccaaatccttaaaacatgctattaagcaacctttctgaatattctgtggtgccaagtagaaagtttaactgaaattaataagccaatggaaagaaagaaatattaataactgctggtggaaagactagctagatgtcagtgtggaaagattagatccactttacatgtgatattccaaatgaattaaaatgttaagtataaaaagaaaaatactacaag

SEQ ID NO: 11376 - DNA, 359 bp, Homo sapiens
gcaaaatggagcaatcaaacttagaaaagttggaattgaatgtcagaaaactgcagcaggaactagaccaactaaacagagacaagttgtcactgcataacgacatttcagcaatgcaacagcagctccaaggtataaggcagcaaaacagtgaaagtgtgtgatttccttgcccttcgttagattctttgatttttcttacgacaagtaattcctgctaatgagcatggagtttctttctaaaattagattgtggtaatgtttgcacaacttggaatatactaaaagcctttgaattgtgcactttaaataggacatgatatgtgaattttatctcaataaagtcagttaaaaaaaaa

SEQ ID NO: 11377 - DNA, 2021 bp, Homo sapiens
ggaattttttttttttttttttttttacttgacatttcttctgtaatttctttatttaaaaaagtaaatgtaacaagatacttaaaaaaggctagatacaaaagtagttaagctgctcacgaacatttaaaattttccaaaatgtatcttcaataatcatgatcttataaaacattttacagttatcagaaagtgcccaggctgagtttacataactgaaataccttagtacaaatgtctagttagaactgaagtgcagtaacctcttgagactgactgctcattgaaatagggatacaaagaaaaagttgattgtgataaaagtattgtgcattggccccatcatatgtacaaaaaaagtgccctcactcaaatgagcaaattacatgcaaaatattagtgatatcatttaatatcctagagctcaatgcagtcaaaccgcaataaaagtggtttttataggtaaaagtgatttcatctcttaagatctgaatgtcgagaacttttttacaagttccatatacatgatacacagttgcagccaaccacaaattaaacaccataaaaaaagttaaaatgaaaacacagaacatacttaattttttattttgaaattccctattccctctatacaagaacctttgctgaaacagtttccacaaaggcagcagtgaattttcagaacatttacattttttccccctcagcaaaaagataaatcacagtgtaaattatgttgttctgctgtcatctttggctggggttagacccagaagttggtgactagcaaaccaatatagccaaatgttgctagtgctccttaggcctttaagctataaactcagcaaggaatgtctgcattttatctctttaaggtaccaccaggggggtatgacagcattaacttccataaacttttatagacaaatggaaaaaaatctacaaaatttgctagtaatattacacagcaatacacactttttatactctacacaaaaccaaaattcttggtcttaatggcgagtaacaatttctgtttgagaatctgtttagaggaatagagtgggacgtaaagtcgagaaatgcaagtatttgcagtaggaagatgttggtcatctggtggtcttattgtgattgagggcataggctggaatccttcttcactggctggcagtgatgggcttgatgtccaaaagtaaacaagatcttgtcgttctgtcatgctcatcttctctactattgaccagaaccaacgcttgaactgcagaagcttctcagcattttctcctgattcatcattgaaagaggtaaaactgatcaggcatttgcacattgacttcaccgcagccatttaccaaaagcctaaaatcttctgccgttaaatcttctaatgaattttttggaagcacatctagtagacctttcctcattgcatgtaagggctgttctgcaactaccaacattctgtgttctgcgtatttccgcacatactcatatacattctgtggagtgactggtatatttacaccattaggaatgagttcaacctgtcctccaccttcttctttacacaggtcaattgcaaatgccaaatccattgctgagaaaacagcatcagcatctgaactctgagacgcgaggattagttgccgcaaactctcatacattacaggatcaaaaaaagcaaaatcatgccaattgacttttctaccaagcaatactttaattacatgtctattcaatgtgataggacatagttcattctgtaacagacatagtccaagaatcctgccaatgtttctgaaacaattcaaccttgcttctgtgttcttgccaggccttggagtataaaatcctcttttcccaggttggtaaaacaaaggggcattgtcatcaccatcatctgtatcatctaaatccatatctactacacttcgactagagccatggcgctttcggttttcctgctgtaccttttctgaggagtctacaaatccaagatccaggatactatcagctcc

SEQ ID NO: 11378 - DNA, 1239 bp, Homo sapiens
tgacaggatacagagtcaatccataaactaaataattataactgttctgaattatacagagtctaaaaatatgtgtcagctacttcattcctgtaaatactcttgctgtgttataaatatggcaagaaataaacatgaccaatatcaatagacttcttgaggctactataagttttgagaaataaggttcaaaaaataagaatgctaacacttaagcacagactagagcttgcttgggtttcttcctgcattacaaggtaaaaatttgttaatgtttgtttttattcagcttgggaaagctttgtgccatgaatacgtcgcatttaataacaagcaacacacggcatatagaaataactttaattaaaaaacttacatagaagattataatatcagacgtgacaaagatttgagtttatttgcctggacaacttgggtttgtctggcttttgttttctttttctttaaaaataaatgtacagtaaaactacaagcaaaagtttgtcagtattgaattgaattttttaccccttaaaaggactagtataatttccaatctctaacaaaaacttagtgtcaaatctcacagataaggccaaatggctaatattttcagttatgtgggtagtacaacttgagtaaccttttttacatgacaaaaagtgagttatataaattgtcctcaactttcacataggaaaaaaatggtttaatagcttcaaaaggaattttctttcatgtatactcttcagtatccaatattgaagctttgttctttgaaaaattttaatttccaatctaggatgcaagcaagaatatatgtttatttgaatagagtaagctatggcaaagaatgaccaaattagctagaaatagaaatcagccagaattaactaatttcttgctaatctagaaatacaatcatcttttttttttttttcaaattttatactgatagggctttactgtttgtggctcattttaaaactggtgtcttctcttcatgagacacattaattggtaaaactcaaattgagttttcaaagatgtgatagtattaaagtgcaccaatatttgactcaaatttgcttgctttattttgttaggagtaaacagaaagtagcctgtgtttagtcccaaagatagcagtgattttgaataaaggagttttgtgttgcctggatatatgaatttctgtaaataacttctgttggttaaacatgttaaaacaacaacaac

SEQ ID NO: 11379 - DNA, 3564 bp, Homo sapiens
tttttaaattttgcatttgacttaaagtgccatgagaaaatttgcatactgcaaggtggtcctagccacctccttgatttgggtactcttggatatgttcctgctgctttacttcagtgaatgcaacaaatgtgatgaaaaaaaggagagaggacttcctgctggagatgttctagagccagtacaaaagcctcatgaaggtcctggagaaatggggaaaccagtcgtcattcctaaagaggatcaagaaaagatgaaagagatgtttaaaatcaatcagttcaatttaatggcaagtgagatgattgcactcaacagatctttaccagatgttaggttagaagggtgtaaaacaaaggtgtatccagataatcttcctacaacaagtgtggtgattgttttccacaatgaggcttggagcacacttctgcgaactgtccatagtgtcattaatcgctcaccaagacacatgatagaagaaattgttctagtagatgatgccagtgaaagagactttttgaaaaggcctttagagagttatgtgaaaaaactaaaagtaccagttcatgtaattcgaatggaacaacgttctggattgatcagagctagattaaaaggagctgctgtgtctaaaggccaagtgatcaccttcctggatgcccattgtgagtgtacagtgggatggctggagcctctcttggccaggatcaaacatgacaggagaacagtggtgtgtcccatcatcgatgtgatcagtgatgatacttttgagtacatggcaggctctgatatgacctatggtgggttcaactggaagctcaattttcgctggtatcctgttccccaaagagaaatggacagaaggaaaggtgatcggactcttcctgtcaggacacctaccatggcaggaggccttttttcaatagacagagattactttcaggaaattggaacatatgatgctggaatggatatttggggaggagaaaacctagaaatttcctttaggatttggcagtgtggaggaactttggaaattgttacatgctcacatgttggacatgtgtttcggaaagctacaccttacacgtttccaggaggcacagggcagattatcaataaaaataacagacgacttgcagaagtgtggatggatgaattcaagaatttcttctatataatttctccaggtgttacaaaggtagattatggagatatatcgtcaagagttggtctaagacacaaactacaatgcaaacctttttcctggtacctagagaatatatatcctgattctcaaattccacgtcactatttctcattgggagagatacgaaaagaggaaacgaatcagtgtctagataacatggctagaaaagagaatgaaaaagttggaatttttaattgcccatggtatggggggtaatcaggttttctcttatactgccaacaaagaaattagaacagatgacctttgcttggatgtttccaaacttaatggcccagttacaatgctcaaatgccaccacctaaagggcaaccaactctgggagtatgacccagtgaaattaaccctgcagcatgtgaacagtaatcagtgcctggataaagccacagaagaggatagccagggtgccccagcattagagactgcaatggaagtcggtcccagcagtggcttcttcgaaacgtcaccctgccagaaatattctgagaccaaatttacaaaaaaacgaaaaaaataaggattgactgggctacctcagcatacatttctgccacattcttaagtagcaaaaaaggaaaagtgctttcctcctctgcaggatgtaaggtttatcagccattaaaacttagacttctctagcttttcactagctgtgaaccagccttcctgtccatggacgtgaaactgcatagtaatgagactgtgcacactgatgtttacaagattgaaagagtctttctccgaaaatcatggtaaagaatactgagacaatgaaaaaaaatcaacaaaatatgctttctggagaactgtaccttttatggtttgcttgcacatcagtagtttctgctgaacgtgctgtcataatgaagagatttccaagattttttttcctgattagaactggtagccagtatattaaatattgatataaaaataaaagaactggaaccagattcagaatcatgaaaacaacatttttacaacaacaaaaaaactatattaaacagggtttaaaggaaattaaaacagaactatgagaagtacaatttgttatagtatagtatcaaatttctatatagattttatacctcagtggggaaaaataactgattccaatgacattcattttgttttcatctgtgatagtcatggatgcttttattttccttggggtgctgaaattgagctgaaaaaaaaaggctctttgaatatagttttaatttctctctacagttttttttgtttggtttgtgggctgttggaattgtaatttttaattgccttctaaaaaatggaaatttaacaatgtctgatctcagctgaacaaattagatgtttcagttgctcttgggtcaactggcttacagatttacatgtgcacacacacacaaatttcttatcacattttcgacttcttcacttgacctaactgattatgcgaaatacccaagattcatgctactgtaccacagatttgttttcacagcaataaatcttcagttctttgtttatgattccacttaacaaaaggcctgcagaagtgatttattatttgggtatttggagataatacatttgatggttttttggaaaacctttttcactccatactcagatatgcttcattgtcaaatgcatatttagattagattattgaattgtaatgtttatctgctgctttttttaaataaaatttgactgaaaatgtttaattggcattttttaatgacttagccaaagaagtgcagctattattccatattaataggcttgcatttcttttcctaaatcttatttaggctaaatcagttttatttttctctgattttttttaataccacagaatcacctgagtgtcaattgaaagttgtcaattaaaaggtaaccttttaatctcgtaggaggaatctcattaagacatttttcctgatatgtagagcagtctgttggcaaaaatgcatatattttctttcatatttgtaaaattatatttaatggaattcttttctttgattatcaaggactttcactgcaggcagtgctatttcttgtgcctaagaatgtttccaaaagtcgcatcgctaatgatatttgccaagttgagtgtacacaaagtttctcatatcctgttcaagttaatcaacatcaagcacatggggatgctttagggtgagtctatagtacaaaatgcataaaccatgtccccaggaaatttgaaaggaagcaggtgctgaatggaatttttttccttttccatgagctgtgttaattctatctccagtaggcctaatgcttgaataagcaagatgtctaatcaataaattattttcatgctc

SEQ ID NO: 11380 - DNA, 98 bp, Homo sapiens
catataccttcacactaggtttcagagcctgggaagaggaatattaagacatcttaacaacaaaccacaacattgcctgcatgtctaaaagaaaatat

SEQ ID NO: 11381 - DNA, 348 bp, Homo sapiens
tttttttttttttttatttattgatcatttattatgtaaatagcatttctgggtgatataaaattcacactggagagggacacgaaatataaatggcttttatagctcagctggagcagtaggcagatgtaaccagtgtggctttcaaacatcatagcaatgctacaaaaaccacagctgtcctggtgagcacacgaacagctcacaagcctctggtctccctatcctcttatgctccgagaggccttcaatcctaaagaagccaaatcccaaacaacacttccctttggatttacatgattgttctcaaacctggagagacattagaatcacctgaaaatcattttt

SEQ ID NO: 11382 - DNA, 1177 bp, Homo sapiens
gactttattcgttaacaatgggggtaaagagctatatacatgaaaatgagtcttataaaattaagtgaagtgcaaataaaagcactgctactataagacattctggaatggttgtttaataagggtattatccatttgatctatagcaatgtgattttatttttaaaaagaaaagcagtgtgttttctttttttgttgttttcttttgcttaagcacttcatcaattgctttattctgtatctgcgaagtaatctgcaatctcttttgttctttttaaaatttgatttgttataaaattgccaaatagaagtgtttcagatacatagtttgtacctgtatttttattttattgcctcatgttcttgtaagtcattcttaattgaccaatgattgtagaccttgcttgagtattttttctaataaaacaaagcaaatcacatttagcttcaaattgtaacaattcaattgaattttaaaatgacacctgaaaagatacatctgatattttctatatagagcacagtaaataagttttttcattgtgtagaaatacttagatgtcaaaaccagatttcgtgatccttgattaacttctgagtactcaatcaatcataatccttttgctgcttatctgatgttggtttgatactgttaacacaccaaaaagaatatggaattgaaatgagctaggctttataacttgtatgtatacatatatacacataacatccaattatgactgggtaataagtgtgaaaattttaatttgtggttttcatttattaatgtctgcccatctgtattgttgctcctaccttcaaatatgacacctgaaataataagtctgttgtccagaatttatgtattgttcagcatcaagcaaactacagctcacaagcatacccatttatatgttgtctatgcctgctttctcctgcagtggcagaattgagtggtgagaccttaggtcctgcaagcccccaatttttactacaggttggcaatccctaatccaaaaatctgacataaaaaatgctccaaagttcaaaactttctgagtgctgacatcatgctgcaagtggaaaattccacgcctgacctcatgtgactggtcatagtcaaaacaattaagactttgtttcatgcacaaaattattaaaactgttgtataaaatt

SEQ ID NO: 11383 - DNA, 1179 bp, Homo sapiens
tttttttttcatgcggaaacccttgtgatttgatacattactggcagtgtgaagctaaggctatgtgactaatatttcagcaaaggaaaaaaaaagtcaaggtaattttatattagcaatagtttctttttttattttaatatactttaggaaacaatatacaaagctgcgctttcctgctatttccagataacagcaggaagctccaattacacaaatttagcgttttgtgatggctaagaacagcagtcagcaccagacttgaacagttagctacaacacaaacatccttccaaatgaaatgtcataatagcaagacaggtaaaccagggtttaacaaatgacaaccacttgggaagtgacttaatcattcttgttgaatttcttatttcattaaatatctcatacacaatttcctgttaatacgttttaaacaaaacctcccttaaggaattatttcaattaagtataaatattcaacaagaacagttctgataaagaatccccaggtagttcaaatgctaatgtgcactgaccgaaggaaaagaaaaataacaatttttgtttgttttaacatgtttattacaacagatacaattcacatctgactagctctgtttcctctttcccctcccacaaccacgttcattgggccatttccttatatttgagcaatcaatgtactttgagcacacatgcctgtccagcagtacttttaagtccattcttacagggtgcaaatggatttcaataatttatacaaacaagtaggttatgctcaatcactgcaattttaagctactgtacacaggaatgaaaaggttatagaaaagtgccatagcaacagtgccttaagaaaggagataaagaggagccttaaaaaaatggataaaatcagaatttcagaaggaaatggaaacacacgggaaatgaaaaacatttctctgcaaaacaaatggagaagcactgctcttgatcaggtgcaagtgtggaaacagttgtttcatattttgtacactgcccatatggttcaaaatcgtatccttagacacaaatcgccctggcgcttgcactgaatttttgaaaatgcaagatttctgaatgataaattaacccccccaatttttttttttttttttttaaaaaagctaattttgcagacaggtttacatgtaaaag

SEQ ID NO: 11384 - DNA, 1102 bp, Homo sapiens
  misc_feature (1)...(1102): n = a,t,c or g
ctgaaaaggactttaggaagtgagataacatcagctctaagtgacacgtgcctatatccatcaggttggtggtggagaggagttggaaggaatgaagggttctagaccagaatgttcgtatttagaagacactatcagatataaccattgttacatgtgtgtagtttattcaaccctactgtgtatatagcggacaaacttaagtccttatttgaaacatctagtctttctagatgtttagaagtgcacaaagtatgttaaaagtagaggtagtaaataacacattttgtagctatccttttgatatgaaatattgtcttggaaattgatcaattctctgagcagtacccattttgatatttgtgctggttagagtggaaggaggagcacaaagtgcaaagggctttctaccagtgtccagtgtgtttatgaggaggcacattgaccattgtcccttatgtctgcattttcatttactgtgctgtgtatatagtgtatataagcggacataggagtcctaatttacgtctagtcgatgttaaaaaggttgccagtatatgacaaaagtagaattagtaaactactacattgagtacactttgtgttaaaattcatagggaagacttcttaaaaacaagtgaaattgttaaaaccccccctaagcattacagatggcttatagctgtccacggggttggtagaggtgggaaagggaagggttctaggccagaatgttcctatttagaagacactcaaattacagtctgtgttatgtatgtataccatttattcaatgctactgtgtatataatggaaaacttaagtccagtttgaaacatctagtctttctaggtgtttaaaagtgtacaacnnnnnnnnnnnnnnnnnnnnnnnnnnnnnnnnnnnnnnnnnnnnnnnnnnnnnnnnnnnnnnnnnnnnnnnnnnnnnnnnnnnnnnnnnnnnnnnnnnnnnnnnnnnnnnnnnnnnnnnnnnnnnnnnnnnnnnnnnnnnnnnnnngtgcgggcctgtagtnnnnnnnnnnnnnnnnnnnnnnnnnnnnnnnnnnnnnnnnnnnnnnnnnnnnnnnntgcagtaagtgaag

SEQ ID NO: 11385 - DNA, 446 bp, Homo sapiens
cgctttcggcatggaggaaatttatgcgaagtttgtgtcccagaaaatcagcaaaacccgctggcgaccgctgcctccgggaagtttacagaccgcggagacgttcgctacaggatcttgggacaatgaggaaaattatatttcactgtggtctattggagattttggaaacttggactctgatggagggtttgaaggagaccatcagttattgtgtgatatcagacaccatggtgatgtaatggatttacagttttttgaccaggaaagaattgtcgctgcttcatcaacaggatgtgtaacagttttccttcaccatccaaataaccagactctgtcagtcaaccagcagtggactacagctcactaccacacaggccctggcagtccttcctatagcagtgcaccatgtacaggtgttgtgtgcacaacccagaattcgttac

SEQ ID NO: 11386 - DNA, 720 bp, Homo sapiens
acttttttatttctcttttttttcgtaaaataacttttatacaggattagtagatctgtttacatataaaaaacagaaaggacctcattacagttagatttcacataaattacaaattgacttttaaaaactactattcaacttcatttaaagtcccttttaaaaatttcattttgaaggcacagtgcatgaaataaaccaaagactgaagcacttgagatgaatgggtgttgggcacctcacataaacagctgtagattgctctagaactgggagtatcacttggaaaaactggagaggtgaaaagctgatttttaatctgagcataaaaaaatactattgtcatacctccagaaaatctgtagcatggccagcatagaaggtagttagtacactcatgttatgccatttataaaaatcataatcatacatatttacataatttatatccaactgcctcaaaatggtaacctactttcaaatttcataatgtatgctgtcaaatcaaaatcaaccaggacaatattctgaaaatcaagtggaatcattaacgaattattgctaaaaataggataaatgggtattgggagagatttcttcatgaactagaaatccaagttcagctgacattaatcaaagacccaaatcatatccccaaaattttagctaaaacaaatcagaaacccaaagagttaccaaaaaagttgctatagaaaatca

SEQ ID NO: 11387 - DNA, 425 bp, Homo sapiens
cttaatatttacagtttatactctgggaagagaccttgttaagagaaccaaaagacaagccacatattgaagaaaatatttgcaaaatacagatctgagaatttgtattcaaaatacataaaaaattgttaaaactaaacaataagttaaacagcccaattaaaaatgcacacagatctgaacagacgcctcaccaaagaagatctacagatggcaagtacacttacaaaaagatgctcaacatactagagaactgaaaaccacaaaaagataggcacagctggtctatatctcttagaactgctaaactctttaacaaatgacaaattgctggaggaaaaacaagaactcttttcattggccggtggaacacagtgtataagaccaaaatatgccaccccaaaatataatggtaggaaaccaga

SEQ ID NO: 11388 - DNA, 387 bp, Homo sapiens
  misc_feature (1)...(387): n = a,t,c or g
ttctttatccagagtcgggtgctttagaatttataagtcacttatgtgttttgcttgaattaattctgacagcccctatgaggaaatctggaggcaggtaacagttcccattttagagatgaagaactgaggcacagattaaaggacttgcctgtgttgaataccagtcctgttctaggacattctcccctctcctaggagacggatgtcacgcacaaatggggagagaagtgtttattttgtaggcactaagggtttctaaaacccttaacactggtaagggctcaaaaataaacgtatgtgttcatattcgatcaccgaaatgagagttcttaattgctaattgacaaacgcgttanaatttcagttagggagtcatctcccttg

SEQ ID NO: 11389 - DNA, 630 bp, Homo sapiens
gcgaaagataataaatcatcattgatcaagatgtcttcagcacctgagcctccaacattcaaaaaggaaccacccaaagagaaagagtttcaaagcccagggctcagaggggtgcgcacaacaaccttatttcgtgctgtgaatccagagctcttcattaaacctaacaaacctgtaatggctttcggattggtaactctttcactttgcgtggcatatattggttatctacatgcaatacaagagaataaaaaggacctctatgaagctattgatagtgaggggcacagttatatgaggcggaaaacatccaaatgggattagtagtgctggttagtgcagatggacctttattaaaggttctgaaatcttcaaatgaaagaccttgtgagtgtacagtatcatgtttcttgttctagaacatgctaatgaagagagaagatagcagttgcaaccagacaactgtcgtaaattttgtcctttcacagctgcagccattatctcattctttttccacagagtgagcgtcataatatttttctttccttacctcttataaaagtgccatgagaatggaagttgtttttgttaattattaaattctgtataataaaagtacccatgctgtta

SEQ ID NO: 11390 - DNA, 693 bp, Homo sapiens
tatctgctaaattccagagagatttttattccacaattagattttaacatcaataaaatcttagatataacaatacagatgaaggaacaattgaatttgcattgaaataaatattagacatacaaagcatatacagtgaaaaagggtcacaataaattacaagtagagacattatttccctcaatcaccaaagaaagcccttgatacttccaatttcacaccatcaaatttatcattcttgctgatttaagcagaacacaaaacaaatatggatcccagggcttactttcacaggtaccagcatggataatttactatcgtgatccaatttggaaatcagtagggaccagtaaatcactgcataaaagaaagagtgaatgaggtcctttttccttagtgtcagcaggctatgattattatgtttattagattttcttgaaaggacttcacattttctcaaatatgcaggagaactgtatttcccctctgagccctacattagcatttatgtgctttggtcttgaatacaggggaatgaatttttcaatttattttataaatttatatagtctggatagtattggcctgaagaatgtaactccccaacctgtacaatattagatattaaaaatggattcaagagaagttactaagaaatgctgacatactgtatatacaaatttttagttcaat

SEQ ID NO: 11391 - DNA, 2375 bp, Homo sapiens
cttctttctcccgcgcttccttgtactgtgcattcctcatcaacgatggcttctcggactccacgaaactgcgctgtactgaagggcgaagtggatctgaccgcactggccaaagagcttcgagcagtggaagatgtacggccacctcacaaagtaacggactactcctcatccagtgaggagtcggggacgacggatgaggaggacgacgatgtggagcaggaaggggctgacgagtccacctcaggaccagaggacaccagagcagcgtcagtccccggtctcttttagagcggatgagagtattctctcagagcctgctttccactgggacctagttgttcctagactattccgtgaccccatgagcacttactatgtagttctcgtggattcagcagcaggtcgccttgtgtttccccttctcttcgttggtgtgtgcatatgtcagtgcttcccccagcaccccagcgtgtactttattttttccttttgatttgaggatatatgatccaggggaaatttcagtttggtataactactttaattagccataattattcattctaagtttttgctcagaaacaaatggcactggaaagaaattctttgttaaagggagaaagctaagcagttgcttttttggaggaggctttatatcggtagcctcatctcatgttttgattttgagaaggcgaaaagcctaaacaggatctccttgactccagagattaaggcctttcacgtctggattttttctccataggtcatctctgaatttgagcaatggtgaaacggaatctgtgaaaaccatgattgtccatgatgatgtagaaagtgagccggccatgaccccatccaaggagggcactctaatcgtccgccagactcagtccgctagtagcacactccagaaacacaaatcttcctcctcctttacaccttttatagaccccagattactacagatttctccatctagcggaacaacagtgacatctgtggtgggattttcctgtgatgggatgagaccagaagccataaggcaagatcctacccggaaaggctcagtggtcaatgtgaatcctaccaacactaggccacagagtgacaccccggagattcgtaaatacaagaagaggtttaactctgagattctgtgtgctgccttatggggagtgaatttgctagtgggtacagagagtggcctgatgctgctggacagaagtggccaagggaaggtctatcctcttatcaaccgaagacgatttcaacaaatggacgtacttgagggcttgaatgtcttggtgacaatatctggcaaaaaggataagttacgtgtctactatttgtcctggttaagaaataaaatacttcacaatgatccagaagttgagaagaagcagggatggacaaccgtaggggatttggaaggatgtgtacattataaagttgtaaaatatgaaagaatcaaatttctggtgattgctttgaagagttctgtggaagtctatgcgtgggcaccaaagccatatcacaaatttatggcctttaagtcatttggagaattggtacataagccattactggtggatctcactgttgaggaaggccagaggttgaaagtgatctatggatcctgtgctggattccatgctgttgatgtggattcaggatcagtctatgacatttatctaccaacacatgtaagaaagaacccacactctatgatccagtgtagcatcaaaccccatgcaatcatcatcctccccaatacagatggaatggagcttctggtgtgctatgaagatgagggggtttatgtaaacacatatggaaggatcaccaaggatgtagttctacagtggggagagatgcctacatcagtagcatatattcgatccaatcagacaatgggctggggagagaaggccatagagatccgatctgtggaaactggtcacttggatggtgtgttcatgcacaaaagggctcaaagactaaaattcttgtgtgaacgcaatgacaaggtgttctttgcctctgttcggtctggtggcagcagtcaggtttatttcatgaccttaggcaggacttctcttctgagctggtagaagcagtgtgatccagggattactggcctccagagtcttcaagatcctgagaacttggaattccttgtaactggagctcggagctgcaccgagggcaaccaggacagctgtgtgtgcagacctcatgtgttgggttctctcccctccttcctgttcctcttatataccagtttatccccattctttttttttttcttactccaaaataaatcaaggctgcaatgcagctggtgctgttcagattctaaaaaaaaaaaaaaa

SEQ ID NO: 11392 - DNA, 596 bp, Homo sapiens
tgtaaatatttctgatttatcaagttcaatcaaacttgtttttttaatctttccaaatgaaatttatattaatggaaaaagtaaaccacttaacagagggtcaccattattaattatttcctttactctctattcctcacacttcactggccacttgaaacttctagagttcctttattaaaataactagatcaaacaatagactttgagaaattatttttcatatcaattttacaaatactgtatcacaaacattctacagtacaaatttaaataaagcaactttctaccttattaaaagattcttcacctcctaaatagaaactgaaggggaagcaatgctattaaggatcatacataagctaatagaggcagcagaattatctattaacattttcctaacactattctagtgaccttaacattttaatcacagagctgcagctgtttgcatgtgttctaaagctagcataatctttaagacagtcaggaaaaaaaaaaaaaaaaaattacataatattctatctagaaaaatttccaggaaagcacattcttgggtgaaagaaaaccacccctttgtcattgtgatgcactaa

SEQ ID NO: 11393 - DNA, 1127 bp, Homo sapiens
tgttaacgttactccccagactcttcgggcaaaggaatggctagattcagagtaagaacaaccctcccttttttgtaagtccccgtgtttagcagggagaagaaattctctaacatgggtttggttttgttgtgttcttcatgtggaaatgtcgcttaacaaaatatccaggcttttgtttacgtggaaaaagcatcccttgtaatgattgctcatcatacttaaaaacctttttcaaaggattttcatgttcccagctataaggactatttccatgacatgtgttattggcagaatgagtgttaaatatggagcatatagcatggggtgactttcattgtcctaacctgggacagttttccttattactctgtattgatcctgctagtccaagaatgggcatgaagtgaacctatcgtggtgactgggataggaaggtgcctgctatttttgccagcacagcatattagttcctttggagccctccattgtctgagtctgcagtgatctgtaggaaggcagctgggtcaataatcatgtagtacaatggcttggaattgtaaccactatggttattgattgtcctgtgttgtttcaggcatacttaggtatgtccctggggaaaaagaaaaccattcagctgagagttgctaaccatgttcttttggttagaaataatggttcattttttgcccctggttggaatagtctctaaaaggctctggtgactgaattgaacatgagtccgcatgctgttttctttcaaaaggtatcaaaacggaaagcctctctaaggggaagacctttcaactccattcagaagacaacatttagtaaggaggatggcggaggttactagtaattttcagatgtcttgggctttttctgccaacaaaacccaaaatcaaattagagttggtgaaagctttcttcagtgtttttagaaggggccatcttgaatctgtagaataccatttacacatcaacttcaccctatgctcatttcgtattttgagcttaaatggagtcctctgaagggggggtagtcgtgattctggtggcaaaactagaacttttaacttgtaaaatgaaaaatattaaatggacctttttgtcagtttgaggat

SEQ ID NO: 11394 - DNA, 578 bp, Homo sapiens
gaatctaatattgcggttaacccaagcactgttaagaagaacaaacaacaggaccattgtttaaattcagtgccttctggatcttctgcgcagtccaaggtgcgttctactccaagagttaatccattagcaaagcagagcaaacagacatcgctgaatttaaaggatacaatttccgaagtctcagacttcaaacctcagaatcataatgaagtccagtctaccacaccacccttcactactgttgattcacagaaagactgtagaaaatttccagttccacagaaggatggtagtgctttggaggattctagcacttcaggggcatcctgttccaagtcaagaccacatttagctgggacacatacttctcttagacttccgcaggaaggaaaaggaacctgtattcttgtaggtggtcatgaaatcacttctggattagaagtaatttcttccctaagagcaattcatgggttgcaagtagaagtttgtcctcttaatggctgtgattacatcgtgagtaatcgcatggtggtggaaaggaggtctcaatctgagatgttaaatagtgtcaataa

SEQ ID NO: 11395 - DNA, 1695 bp, Homo sapiens
ttcgcatttgagatgctttttataataaagttatgccaaaaatacagcaacaaatacagaaaaagtattaacaaacggagaagccccagatacacgtacagtaacaatacaaaaatgtgactggtcaaacagctcaagttcacatttaacactttcaattatttttaattacactatttctgttcaaaagaatgttttccttacatacaaccatgatcagtctttagtctcaatcgtaccaaaataaagctatatataagcactctgactaggtaaggtgtgaagtaccccgtgagttgctctgtggcttgagatgggacacatggtctcaaatgactcttatgcatggcccttgccttaagaaagaaaagtaatgttgatggtttaaaaagtaagtactttttgaagcagcagatgaaatgtgtttactaccagcctaaatcaaagaacatggcaagagcaagattgttctcaggaaggaaaccataaatatggcatttatgtaaaatccttgcagcatctgaccatgcttttatctttaaaaaaaaaaaaatcctcactttcttaaatataagtaacagtttattaatttttttttttacagtgagatatggctatgggaagcaggtgatactatttgtttaagaaactgggatgccaactaacacgtggagttccccaagactttgcaatctccatttgtgagtttctgtaaaaaagggaacccagctagaggattcacagagaccttgaatgacaagcgacatactcgaaatctgcagctctcctcccggagggcccagcgtgccaggagacacgctgcagtaaggcacttaccaagctcctttggatagagggaaagaagaaatcaatccaggcaacatgcaagtttcagtgaagtcagacattttatgggaatttaaagtcttgcctgttctcagtgcaccccagtcagttactgacatgtcagcctcagaaaccgcacatggcctcaggaaggtcaggccctcctgctggtgggcacgccattggctcttgatcgctgatggtctcgatgatggtcatatttcacagaaataatgaggaaaagcaggagggtagctccttgaatagcagccagaagaaaaaagtaatagttcaaatagcagccgttaatattaccaaagtctgtgtgactgctcatccatccgatggctttgatagacaccagtgccagcagtccagaacccacgaacgacccgacgccagagaagaaaaagaacaagcccattatgggcactctgcatggacttgggggcagctgagtatgcaaattccaggcctgcgatacttgcaaagatctcgctgatcccaatcagcaagtactgcggccacctgccaccacagcgacagatcggcagcatggtagacgacgttgccgatggtctgattaatggttttctctttaacaaggttcagccttttactctccaaaattcctgccagcaaaggctgagcacatgacaaagaacatgcccacggcgatccctcttcagggaggatgggagcaggccatgtcttctcaaaatgggatccgaccagtttgtcccttcagagggatgagcaggaggatgagcacagcatcaaacatggtccagcccaggctgcagggagcgtgtgaggagtggttgtaatatttgaaatttctggaatcct

SEQ ID NO: 11396 - DNA, 383 bp, Homo sapiens
tttaaatgtgttataattatgccgacaaaattggcagcataattactgtaattgaaaaatctgatattgtccaggaatgctttctaccgtacaggataatgtatctcatggctgtttccaaagggtttatttattgtaaaacaagtgatttaggtgggaaagggaagattttggatttttattttgtagaaaaggttttaagctttgaaatgtgaatgaaatatccttatcaaaacattaggggtggccataactcctctgtgccacttctactatttttttttttaatctagttagtatgaaatacaacatttaaaccgggaattttaaagaagtagctttccaggggattcagaattaagaaagatagtgatagggacatg

SEQ ID NO: 11397 - DNA, 474 bp, Homo sapiens
gcaagataaggcactttgtttttaattctatcagtctctttagaatgaacgaaggtctgggtcctctggaaatctcaagtggtgctgcctgcagctttaaaaggctgagcacaaacccatcagagagccacagtcctaagtagactcctcggtgcgctctgcccacctgtccatgtgcattcagatttctcattaaattttccacagcatgaccagtggggatgacctgggtggcctttgtgtccatggccacagcctaggtacccacctggcatggtgcctccacaggcgcaggaggcggttttctggcccccgctggagcagaaggtgcagcagtgaaacacgcctgagtgtgggcggtgctttctcctcaccgtcacagtgaatctgagccagggcttcctccagggcctccacgtggggctgagtacctttgaggagctcccacacagagtccccatgcttgtggatgac

SEQ ID NO: 11398 - DNA, 206 bp, Homo sapiens
cttttctctcccttccatttctaagtcaatagttgtctataattaaacatatttcagatttgttctgtgtccctgaagttccatattttatctttatgcttgtgttatgttttagtgtctataatgttgtggtgggaatcatttcatttggtttaaaagagtttgccttggaaaaactgaattaaccttcataaatacattttgag

SEQ ID NO: 11399 - DNA, 371 bp, Homo sapiens
tgattttatttatttatttttctggattaagctaacatatttctgttttcagagcccaaatcaaaagttggttttttggcatgttgcatgtgggttgggaaagaaatttgtccgtgtcggaacccagttataccgatggttcttcatatgtttaaaactttttttttcttttatcattggatttgtggaagtggaaagttgcagggagctttgcagtgtaaatggtattgttttcccccagagagtttgaacggcccgtatcggtttcagccctgctgttcctgggtggatccctcttacttttccaggtgcggtgggtgggacctcattctcctgctagatgtagtctcccttctttggcttataaaaga

SEQ ID NO: 11400 - DNA, 331 bp, Homo sapiens
gccacagacctactgtgtctctggaccgaaccagtggcgggaccagctccgcccctcccagctcctccacctcttctgccagcagcatagagtcaaggcacctgtgtaccggacagaccgtgtaatgtttcaggataaagaatattccattgaagagatagaggctggcaggatcccaaacccacacctgggcccagtggaggagcgtctggctctgcatgtgcttcagcagcagggcctggtcccggagcacgtggagtcacggcccctctacagccccctgcagccagacatcgagcaggggaagctgcagatgtgggtcgacctattt

SEQ ID NO: 11401 - DNA, 484 bp, Homo sapiens
  misc_feature (1)...(484): n = a,t,c or g
ggagcgcatctctgactcccagtcctgaggcctttccagttcaccagaccacctcatccattaaaagggtgtcagctggatttgtgtgcccaacgaggtgtgttgcttttatgtaaaagagaagcacataagggaagaaatcatgagtgttcagggatccctttccagtcccttaaagaggctgcttttgcagtagcgacatactacccagtgagctcagccatgcagtttttcctgcagggttagagtggatcacttccttcagttgatcaccatttgaagtaggcaggggtttgagttcaggagggccatgtacggaaaatggatttttaaaaatacctgggaggccttcattttaggcacatggcaaggantggagganttcaggccaagggggggttattctaggaggaagggacgggaacccccctnccctnttgttantattttaantctggagtttncataaaaaaatttagnccgg

SEQ ID NO: 11402 - DNA, 1476 bp, Homo sapiens
gtgggctggctgcagtctgtctgagggcggccgaagtggcctggctcatttaagatgaggcttctgctgcttctcctagtggcggcgtctgcgatggtccggagcgaggcctcggccaatctgggcggcgtgcccagcaagagattaaagatgcagtacgccacggggccgctgctcaagttccagatttgtgtttcctgaggttataggcgggtgtttgaggagtacatgcgggttattagccagcggtacccagacatccgcattgaaggagagaattacctccctcaaccaatatatagacacatagcatctttcctgtcagtcttcaaactagtattaataggcttaataattgttggcaaggatccttttgctttctttggcatgcaagctcctagcatctggcagtggggccaagaaaataaggtttatgcatgtatgatggttttcttcttgagcaacatgattgagaaccagtgtatgtcaacaggtgcatttgagataactttaaatgatgtacctgtgtggtctaagctggaatctggtcaccttccatccatgcaacaacttgttcaaattcttgacaatgaaatgaagctcaatgtgcatatggattcaatcccacaccatcgatcatagcaccacctatcagcactgaaaactcttttgcattaagggatcattgcaagagcagcgtgactgacattatgaaggcctgtactgaagacagcaagctgttagtacagaccagatgctttcttggcaggctcgttgtacctcttggaaaacctcaatgcaagatagtgtttcagtgctgggcatattttgggattcttgcacattcatggagtgcaataatactgtatagctttcccccacctcccacaaaatcacccagttaatgtgtgtgtgtgtggttttttttaaggtaaacattactacttgtaactttttttctttagtcatatttgaaaaagtagaaaattgagttacaatttgattttttttccaaagatgtctgttaaatctgttgtgcttttatatgaatatttgttttttatagtttaaaattgatcctttgggaatccagttgaagttcccaaatactttataagagtttatcagacatctctaatttggccatgtccagtttatacagtttacaaaatatagcagatgcaagattatgggggaaatcctatattcagagtactctataaatttttgtgtatgtgtgtatgtgcgtgtgattaccagagaactactaaaaaaaccaactgctttttaaatcctattgtgtagttaaagtgtcatgccttgaccaatctaatgaattgattaattaactgggcctttatacttaactaaataaaaaactaagcagatatgagttaaatttaaaagtttcaatttattgctcagtgtacctgttaacattatatttaacaattgcttaaatttttgtttttgatt

SEQ ID NO: 11403 - DNA, 408 bp, Homo sapiens
ggcccagcctacactgcctaaattcaaatcttagctcctcactcacatgctttatggttctgcacaaatgactccacctctgttccctcagctgcaaagtagtgataattgtgtcgcctaacctacagaggtgtcatgtaggttcaatgaaataatgcatggaaagcccttcaacagagcctggtgtgtggaaaatgctcagtcaatagtagctggttttattgttcatgtggactttattttttaaccatctcccatcttccctttgctttttcagctccagggtttgagccacaatgtgatcttcaccttggattctttgttaaaaggagacctaaagggagtcaaaggagatctcaagaagccatttgacaaagcctggaaagattatgagacaaagtttacaaa

SEQ ID NO: 11404 - DNA, 397 bp, Homo sapiens
tcgaccagatatctgtaaaaccagccacagtaaaataacatggtagagcacaaaatgcttagaagagatttatttgaagcaatgcttcccagaagtttttcaatgcagcttatggcgagaaacacattttacatctctactcagtacgcagccactcatactcaactgaaacaaacatcttctgaaacaatatttcacttcactctctgcaatacagaaaataccagatcgtattgtatgttatttcattgttttaaaatcctgagcctagcttgctaatagattacaactcagtttgaaaagcacaggctaaggggcttcaaataggggtgacacattgaacacacacatttatcacctctcccttcacagatctcattaaaatgataatagagga

SEQ ID NO: 11405 - DNA, 323 bp, Homo sapiens
  misc_feature (1)...(323): n = a,t,c or g
ggcggttgctcccctgccgggtgtgttagaagctcgttagaggaggaagggcttggggactacgggcgccaccgagaacccatactaggcagccanctnancnctgcnnnnaagnnctacagagantgnctgcngnacannctgtcgaagatgtacactgaagcagggagggagtggaganaaaattggctgatctcccttccccaccccagtcttcccctggtgtctcccactggccaaatccaatccaatcagaanccagtgggtaaangaatccangtnattganncacagaagtnatcctntntggcatnnaacaggac

SEQ ID NO: 11406 - DNA, 330 bp, Homo sapiens
  misc_feature (1)...(330): n = a,t,c or g
gctggatcactggctggtcacaaagctacatcactgaactgagatctttttccctattctgttcctcctgttaatacaggagttaccttaaggtgagcagcccaaaaggttacatgaattcacaaaacctttagattatttcctctgaccaaagcttagctacacaacattcattattatggaagtcttgagaatttctgtatctgcttatccatcacagacacagtgactggataactgtggacactcctttaaaagtnagncatttcannnnnnnnnnnnnnnnnnnnnnnnnnnnnnnnnnnnnnnnnnnnnnnnnnntgagcagat

SEQ ID NO: 11407 - DNA, 182 bp, Homo sapiens
gttgccatgttagcatatgaatcttaaaggattacagaattcagttaagagaaacaagcttttattggatgggtatttaagagtttcttgataagagagaccttagatttcttacgtaaagccatgttcacaaggaccactgtccttgtgattctaatttgccagataaaagtctatgtcct

SEQ ID NO: 11408 - DNA, 485 bp, Homo sapiens
  misc_feature (1)...(485): n = a,t,c or g
tgatctgctgatatgcatttataaagtaagctctgttgtacagtctgtccaaatgggtcaaggttgcctttagaagcaaatagtgtgattttcaagacttcaaatacaaatttagtttaagtgtttgaacaactatatgcacttacggttgtgtgtttaaaatgtctctctctcaccctagcttcatgatgtgactcttaaaaaactataatagttaacaactgttagtaagatagaccaattctgattagactttatcagggaatctgtttaagatatgtttggtgaccaaaacgtatgtgtgaatgtagttataatgcttttgaaaaattttcctttttctatatccccttagtccagcctcctcttctccagacatttaggctatctgcctctttcctttaggctggggaaagtgaggagcngggcatactatggcagtttttaaggtttttccctaggtaaggtcnggaaaaggccncccc

SEQ ID NO: 11409 - DNA, 387 bp, Homo sapiens
ttttttttttgatacatatatttattatgctgtaaaaagcaacactacctgattgcatttaaaataaatgtttcccaatttcagaatacttacaacttgtagttttaagattagattcactttgggaggttttagaagcaaatacattcatagctgtgtaatccccaggaagaatctaaatctgacatcaggtcattcagtccctgccagacagacaacagcatcaaatggtcaacagctaatccagctctgcagctaaagggcagtgtcgggcagcagtggggtatagcatattaccaaagatgagaccagcaaaaacaacaatgtgtataaagctttaaattaacatgatcatatagagcgctcaggatacaggaaaaagcacat

SEQ ID NO: 11410 - DNA, 644 bp, Homo sapiens
attcggcacagaaatgaagcaagaaaaaacattttaaaagtaacatgaaaattgaaatataaaaactcatttcttggctctgtctgccaggccctaagattacctcattaatgaatctattacctaatcagttcaaattcaggaaggtagactaaacacacttggggtgcacagagaaaagagtacctgcctcccagccctgttctacgaaggctgcagaaaggctcattacctgcctccctcaactcaaaccacttcctgagtaaggctttctggggtaagcttctctgaggtcctaagaaagtttggtatatgccttgtctatcaaaatggagctcatagcatggcattagactctgataccttcaggtcataagaagccttactcttcggtcaggacagggctaagttagccacacaacaggaagtcagtggcagagaaaggaagttaggccagactcctacttcctgacccaatcaaggcagcaaggagtaggaggtcgaactcaagcagaagtatgtctctcacactattgcaaatatggcttctcaatcataatgtagctggggagcaaccagctcagctgatactttcccattcccttagtagaacccatctccatctatccatgaggaattacttt

SEQ ID NO: 11411 - DNA, 327 bp, Homo sapiens
acgctcaggatggggacgagacatcaattgctccaagaccgacgcatcttctcacgtgggccaggctttcacgcagccaaagcagatccgcgggggcgaaaacgattgacaaccggcctcatgacccaggcagagacacagaaagaggttcaacaaagacaggccgccatgcaagagacagctctgtggttcacagggcatattcagccaaagacacacaagcacacgggcacacacacacaaacccacagagagtgggaaagaaacacacagagactgagagacagagagagaagagagaatgggagacacacacacacacataca

SEQ ID NO: 11412 - DNA, 331 bp, Homo sapiens
tacgatttggggttatcacaaataaacatcttgcgaaactggtatccttagtacactctggaagtgtgtatttacatagacatttcaacacatcacttgtcttccccagggaggtcctgaactacacagctgagaacatctgtaagtgggccttagaaaaccaggagacgctctttcggtggctgcggccacacggaggcaagagtctcctgctgaataacgagctgaagaaaggaccagggctgtttctgttcataccttttaatcccctggccgaaagtcatcctttaatagacgagatcaccgaagtggccttggagtacaacaactg

SEQ ID NO: 11413 - DNA, 1795 bp, Homo sapiens
ctggggcatcccagtgaactgtgatgaggctgaaatcgaagagaccctccaggctgcgatgccccaggtctcctaccgaatgcttgggagaatgttctggagggaagaaaatgcgaaagcagccttattagagctcactggcgctgtagattacgccgcgatccccagggagatgccgggcaaaggaggggtctggaaagttttatttaagcccccaacttctgatgctgaatttttagaaagattgcacctcttcctagctagagaggggtggaccgtgcaagatgttgcccgtttccttgggtttcagaaccctactccgaccccggggcccagagatgccagcagagatgctaaactatattttggataatgttattcagcctcttgttgagtccatatggtacaagaggctgacacttttctcggggagggacatcccagggcctggagaggaaacctttgatccctggctggagcacactaatgaggtcctagaggagtggcaggtgtccgatgtagaaaagaggcggcggttgatggagagtcttagaggccccgccgctgatgttattcgcatccttaagtccaacaaccccgcgataaccactgccgaatgcctgaaggcgcttgagcaggtgtttgggagcgttgagagctctagggatgcccagatcaaatttctgaacacttatcagaacccgggagaaaaattgtctgcttatgtcattcgtctggagcctctgctacagaaggtggtagagaagggggccattgataaagataatgtgaaccaggcccgcctagagcaggtcattgccggggccaaccacagcgggggccatccgaaggcagctgtggcttaccggggctggggaagggccagccccaaacctctttcagttgctggtgcagatccgtgaggaggaagccaaggaggaggaggaggaggctgaggccacccttctgcagttaggcctggaagggcacttctgagtgccaggaaaggcagctttagtgcagacctagatcacagctacttttcttgtccctgtggggtcttacagatgtgtctctgagtagtaaaggcttagccttgttctgttttgttgttttttggaggggaaggttagtcaggcctgagtattcatgtaacattctaaaattgtgccagcgagcaccgtgaacgactgcaatgcaagcgggtcttgctggctaaaatgccaggtaaagggttggttggacacagcgcttagtgcacgctgtcatcatggacatcataatcagttgtgaaaaacacgcgaacctatgacacttcttattccacactgaatgtgaaattgcatgttcagatgtttactacgaggcctggctcacaggaagtgttcagtaaaagtatgcactgttagattactgataacgcggatagatttttgtttaccataaattgttccagatttatattaatggaaggaaatgtgcatttattagctattactcaactttacaatgcaaacatcttatttctcatctttaaacatgtcgaccagtttaattgaaaagtattctgagactgcaaaatggggtgttaaaaaatactgcagttacggagctgtgtaaaccagtttctcattgcataagatacagatgtaaattgcatggagaggttgatatgcacctgtacagtaattcactcccccatttcacatctttgtcagagaatagttcttgttcatactgagtgttctaaatttgaagttatatatacaaattaaaatattttaaaaattcaaaa

SEQ ID NO: 11414 - DNA, 276 bp, Homo sapiens
gtcccttcacctgacctttttagtcagctcagatatttttgtagtttgagaatagacctattcaagagctatcagggttaaaagctgcactgaccaaaggctgtacttttaaaacacaacccctgggctagtgatgtctctacttgctctatgagccttttgccagcctcagaataggcgaggtaaccttgaatttcagggccctggaaactctagctgaaacctgcctttcctaatgctcacacaagcaccaggtaccctgagcttatactgagt

SEQ ID NO: 11415 - DNA, 376 bp, Homo sapiens
ggtgataactaacatatttataacatgaaatctgctcatccaggaacatagaatgcaaatctttcattccactcagcaaaattttgtcctgtccttgataaaagtcctgcacatctaagtttattcctaggtatttaatttttgctgaaatacctgaaaaaatacttcatcactatatcttctacgtgattatagctaacactggggaaggctattgatttttatataaaagaacttttaaccagtaatcttaaaaattgtttttctcagttggttcctttggatatttttaggtaaacaatcatgtcaactgaaaataatgataaattttctataaagactatgacatcacaggaaaatacagtaaatacttttt

SEQ ID NO: 11416 - DNA, 472 bp, Homo sapiens
gctcagcttttcccaataaagcgaatggactgctataatgtagtgaaggatagctggtattcgaaactgggtcctccgacacctcgagacagccttgctgcatgtgctgcagaaggcaaaatttatacatctggaggttcagaagtaggaaactcagctctgtatttatttgagtgctatgatacgagaactgaaagctggcacacaaagcccagcatgctgacccagcgctgcagccatgggatggtggaagccaatggcctaatctatgtttgtggtggaagtttaggaaacaatgtttctgggagagtgcttaattcctgtgaagttttatgatcctgccacagaaacatgggacttgagctgtgtccaatgatttgaagccagggaaggattcatggggctggtatttgttaaaagacaagatattttgctgtggggtggtccagattggttttaggtggtcttggac

SEQ ID NO: 11417 - DNA, 347 bp, Homo sapiens
attcggcacagctggggtgtgagagggagaaatgaccctgctggggaggagggaggaacacaccacggccaccctccaggccatgcaacagcacttggactttatcctgaggcaatgggcggtctccaaaggccaatcacatggagaggccatccagtactccaagtgtttccagacacatcccttccttgcacaaaccgaaaattggcattcatgcaggacaaataaacataatccctacaacggctattccagagcaccatgtctggactctaaggcaaaaaaataaaagctatcagcccattacatatggtccacagtaacatccttctatgaacacacacacc

SEQ ID NO: 11418 - DNA, 1245 bp, Homo sapiens
tttttttttgcaggctgatacatgtgggggattttatttcaggcacttgctcttcagtttttcttacacgatgttccacaaatataaaaatgagaaactctttcagattatctgtatatctatatacctggattattctggctaaagcgacaggaaatcccagcagtctggcttccccgagtaaccctgtactgcctggtttaatcccgccgtctgagggtggggtgggcgtcaggcatggctggacacaggagtgccagtggtggggtcagaatccagcttctccctctcccggccccagtgggtctattccccgaagtccttgctcctgtctgcacggctgtgcccactgccggtggggcagggagtggagaaggggggctgactcacttgctcttctcctggagttgctattctaacggcagcaaatccacaggaaaaaggtaaacaaaaaaaaaataagaatctttcagaaaaagaagtattttttaaaaaaagagagaaaagaaggtgaggagttcagtgtaaccaggtgactactctgaactggggactgagtcagcctctgacgctgagctgaatgcccaatgacaaacgtgaccagccgtgcgggcgggggcaaggccaaggacacagagggccgagggcccagggccaggtgtggcgcttccagacgtttctactctctcattttattcatggcgacttgggaaggaaatctgtctttaatgagcaaatgtaaggctgcgttttctttgcgaagtctccacaggattttcacggcaaaaccaatgagaaaatgtcctttcaaagagaagaccgagtgtcccgagaacattttcttgaaaggcgcgtgcacgggccgccctctcgaggcatcgtaatgtgcttcaaagaacacttggtaaaaccctctggctaaaaaatcaaaatttccaaagcatatacatttgaaaaaaacaaaatctccacttaaaagcttattttgacttgttgcccgggatcaattgcaaaagcgcttctgttgagaaaggacagttcagccaaactcaagctggtttttagaaacagaactggaggaaaaaaacccagaaaacataaggcactgggcaaatgtgacgtaggctgggatgaaacccattctcccagagccggtctctcccacagcacaaagctgctcctcatgcagccagctggctgaggggcccggagtgtgtccacagagggaggagcggggctggggaa

SEQ ID NO: 11419 - DNA, 293 bp, Homo sapiens
  misc_feature (1)...(293): n = a,t,c or g
gcggcacgagagcatatcatgcaactcgaagaatcaaggatcccagaccaggatacgataccttgccaagggtattcatccagtggtttaaaaacccaacgaaatacatcaataaatatgcaactgccttcaagagagacaaacccctattttaatagcttggagcaaaaggacctggtgggctattcatccacaagggccagttctgtgcccattattccntcagcgtcnnnnntnnntatncnnntnatcananaggntgnnnnnnnnnnntacnttngttnnagtcggtt

SEQ ID NO: 11420 - DNA, 293 bp, Homo sapiens
gaagacacattatttatttaccttagtttgtgtcaagcatagacagttgtggttttacagatagggaagccaaaccaaacttcctagcctacttttctttttctaatctagtggattttatactgacttacaagattttactgtgagcagcaatgcaacataacccaatatatctaatctttcagatttagtgaacatttagatttttaaaattataattaaagctataacatttagtcttcattttctctgcagaccacaaaggacttctggacattctaagttttttttat

SEQ ID NO: 11421 - DNA, 521 bp, Homo sapiens
gttttttttcttttaactttcaacctgatcagccagatatatttgtggtgatttccccctaaatgactaggaaagttcagcatcttcatgttactggacatttaaaaaaatcaactttatttgtccaattttctaagtcaggtctcctggaagcagcatttcaaattaggattcttgtgtaagtgacttactgagagtcctctataagggaatgagaaaaaacagaacagggcagaagaggcaaatatgtggtttcaggagaaatccacacacagcgtaatcccatggggtgctcaggagcataaattgtaccaccgaggccagtgggcaaggctgtaatgtcctgcatcagtcactggccatgggcaacctcagaggagacaaaacttccccaggtatcttcaggtaaagtgactctcatcagcccaggacaatcctcttttaaagaaggggtccaaagcctgttcttgggagtatgatctctctgatgagagatcaaaagttgtctttgttgaattcta

SEQ ID NO: 11422 - DNA, 346 bp, Homo sapiens
gcgaggagagctgagctgggccacctggtctcagccacctgttcttggctccccaacagactctgcactgcaccatgggaggctcctgggatgtttggaagaagaaacgggcttctccttgagggggtagtggagggattttgtccccagcagtggcctctgagagtctttcagtgcctggtggggcagggcaggcctcttggagcacctcctccctgggtcagggcctggatgcaggtgccaagctctccatgtggtgcatgttgacccagccacgtggtgttgtcaagcaaacagcatcggcaggagacctggagctgaggacttggccctgcctgcactgtat

SEQ ID NO: 11423 - DNA, 120 bp, Homo sapiens
gctttaagtttacgacactgctcacggcccaccttccaacacatagccacaaattttgatcccatttcccatctcatttccaggggcccagagcaagcatttaatgcaatagtgggatgt

SEQ ID NO: 11424 - DNA, 115 bp, Homo sapiens
gtaggcattgaccaaggtgtgctggtgcactgtgacccatctccctgcagctgctagctaaaaggagcatgttgaccatttgcttccccattgttcctttagatagaatctctgg

SEQ ID NO: 11425 - DNA, 1347 bp, Homo sapiens
gtcgtgtgcttggaggaagccgcggaacccccagcgtccgtccatggcgtggagccttgggagctggctgggtggctgcctgctggtgtcagcattgggaatggtaccacctcccgaaaatgtcagaatgaattctgttaatttcaagaacattctacagtgggagtcacctgcttttgccaaagggaacctgactttcacagctcagtacctaagttataggatattccaagataaatgcatgaatactaccttgacggaatgtgatttctcaagtctttccaagtatggtgaccacaccttgagagtcagggctgaatttgcagatgagcattcagactgggtaaacatcaccttctgtcctgtggactgacaccattattggaccccctggaatgcaagtagaagtacttgctgattctttacatatgcgtttcttagcccctaaaattgagaatgaatacgaaacttggactatgaagaatgtgtataactcatggacttataatgtgcaatactggaaaaacggtactgatgaaaagtttcaaattactccccagtatgactttgaggtcctcagaaacctggagccatggacaacttattgtgttcaagttcgagggtttcttcctgatcggaacaaagctggggaatggagtgagcctgtctgtgagcaaacaacccatgacgaaacggtcccctcctggatggtggccgtcatcctcatggcctcggtcttcatggtctgcctggcactcctcggctgcttcgccttgctgtggtgcgtttacaagaagacaaagtacgccttctcccctaggaattctcttccacagcacctgaaagagtttttgggccatcctcatcataacacacttctgtttttctcctttccattgtcggatgagaatgatgtttttgacaagctaagtgtcattgcagaagactctgagagcggcaagcagaatcctggtgacagctgcagcctcgggaccccgcctgggcaggggccccaaagctaggccctgagaaggaaacacactcggctgggcacagtgacgtactccatctcacatctgcctcagtgagggatcagggcagcaaacgagggccaagaccatctgagccagccccacatctagaactcccagaccctggacttagccaccagagagctacattttaaaggctgtcttggcaaaaatactccatttgggaactcactgccttataaaggctttcatgatgttttcagaagttggccactgagagtgtaagtttcaggcttttatatcactaaaataagatcatgttttaattgtgagaaacagggccgagcacaagttg

SEQ ID NO: 11426 - DNA, 434 bp, Homo sapiens
attgaatgtccttagaaccaccttcccctacttcatctgttgacacagcttttatactcacctgtggaagagtcgagctactcacccgctattagagtatggaggaaggggttttcattgcattgcatttctgaaacattcctaagaccctttagttgaccttcaaatattcaagctattctgcagctccaagatgcaattatagaaacagctccttttttattttatggtcctctatatgccaggtgcttcacctgttaatttcactttaatcctcataccatatttgcaaaggatgtgttattatctatgtgtgacaaatgaggaaactgaggctcaggggataaagggacttgcccaagtcccacagctggtgtgtgactgcagagactgtgctcttcccagtgtgctgcaatacttctcaaccctcctct

SEQ ID NO: 11427 - DNA, 169 bp, Homo sapiens
ggttacactcatttcacagatggagaaactgaggccagaagaggtgagcttacctgcccaaggcatctagtgaccagaggggcagccagggtgtgatcctgcctcatctgacttcgtagttgggtacacatttaacttccgccttcctgtgtgtgttttccaagagcat

SEQ ID NO: 11428 - DNA, 132 bp, Homo sapiens
ggttaaatattatttatcggtcctcaaaccttgtaattttctcaatgttttgtattagaaaagatgtattacttgaataatagctatttaataattgtattggtgagactatgaatataatagtaccattca

SEQ ID NO: 11429 - DNA, 217 bp, Homo sapiens
acaccccctcaacagtatctgggaccacagacacacgccaccaccaattctttccctcaccctgccataacttgggttgctgccactcaagcccctaacagaagtcccaagccccatattcttttctgtagctcaggatgctatataagattcaattatctgacccttctttgagcctcatattttgtaggattcctgtgtacaactatgtaattaa

SEQ ID NO: 11430 - DNA, 734 bp, Homo sapiens
  misc_feature (1)...(734): n = a,t,c or g
ttttccagaagatgacagataattgatggtctccccttttcctcagcaacatagttgtacccagagggaatttatctttagaaagatatagtttgtgaggaaagaggaggatggataagtggataaaatgtaatgcagttttaggggtggatttttaagtagcccaaggggtaggaaacctgcacagaaagaagctgcgttgtgaaaatgttgaggaggaaagtgctgcatcgctacgtgatgtggaagagactgcagtgtctgggcattgttgggaatcccgggtattttaaccatgaaacatctgacaacaaattatgtgtctagatatgtttatgtgtgaatgttcatgtatcagggattcagtttcacagttttaacttcaattttcttgtttaccccacaaatgacaaaattgcgtcattccttctctttgcccctttccaacaccaccccacaattttttaaacaatcaaaagaaaaattaaaaccagcaaaccttaaattcttgtttgttatttggatggtgaaatactgcaggtagacactgaattggacattgatttccttttctctgcgtcaaaatgtcaaggaaagttgcaagtctgtgattttgtgtttggttttttgcatgttgcttctatggaaaaaccaaaaccaccacagcagacctccctggcccaaagtgttaaaatgcctccttcataacctgagacttactttccatttcnagg

SEQ ID NO: 11431 - DNA, 126 bp, Homo sapiens
ggggtgcgatctgcataccttcttgcccgggtgtggacagcggtcaggagggaggcagagcaactccagccttttccctccccctctgcgtttcgtgtacagtccctgcatactccattggtatgt

SEQ ID NO: 11432 - DNA, 72 bp, Homo sapiens
gcaggtgggagtaatccatggcaataaattgggatagaagttattcctggaggtggtgatgactggtatggg

SEQ ID NO: 11433 - DNA, 643 bp, Homo sapiens
gccgcgtcgacttttttttttttttgtcataaattaaatttattctctggagaacatggttcttggtattgacgtgaatgggagcagggcatttgggactcaggaataggagatggggggcttgggtgccaaataccaaggaaagccttaaacggactccccagagattaccgatagcattagcatctcatggaggaccccccgcccccgaccaccagtccccctttacttcttcttcttcttcttgcgaccccaacactggaggcctccatcctctcttcggctcctccaggtgggcatgggaggctccagctcatttggggcggcccccccggtctggaacgttgcccataagcaccttgttgatggcacagcaggtccctctgcggacagccacgctggtggctgggacgagacaagacaggtcggctcgggcagccagaacgtgtgcaatggagatgtccgattctggggtcagaacctctcgaattgggatcagcactgccctcatggcctctccttgggcctggagtggggaggaggtaagagaaggtaccctggagcccttccccaagtgggacctgtcatcttggaagcattactttaccattcaagacctcactgcccacagctcaaataaata

SEQ ID NO: 11434 - DNA, 1985 bp, Homo sapiens
aaatttgcagccaactcagatttaaaggttcttctttgcggtccagttggtccaaagctacatgagcttcttgatgacaatgtctttgttccaccagagtcattgcaggaagtggatgagttccacctcattttagagtatcaagcaggggaggagtggggccagttaaaagctccccatgccaaccgattcatcttctctcacgacctctccaacggggccatgaatatgctggaggtgtttgtgtctagcctggaggagtttcagccagacctggtggtcctctctggattgcacatgatggagggacaaagcaaggagctccagaggaagagactcttggaggttgtaacctccatttctgacatccccactggtattccagtttcacctagagctgggccagtatgactaacagggagctcatgagcagcattgtccatcagcaggtctttcccgcggtgacttcccttgggctgaatgaacaggagctgttatttctcacccagtcagcctctggacctcactcttctctctcttcctggaacggtgttcctgatgtgggcatggtcagtgacatcctcttctggatcttgaaagaacatgggaggagtaaaagcagagcctcggatctcaccaggatccatttccacacgctggtctaccacatcctggcaactgtggatggacactgggccaaccagctggcagccgtggctgcaggagctcgtgtggctgggacacaggcctgcgccacagaaaccatagacaccagccgagtgtctctgagggcaccccaagagttcatgacttcccattcggaggcaggctccaggattgtattaaacccaaacaagccagtagtagaatggcacagagagggaatatccttccacttcacaccagtattggtgtgtaaagaccccattcgaactgtaggccttggagatgccatttcagccgaaggactcttctattcggaagtacaccctcactattaggaagattcttaggggtaatttttctgaggaaggagaactagccaacttaagaattacaggaagaaagtggtttggaagacagccaaagaaataaaagcagattaaactgtatcaggtacattccagcctgttggcaactccataaaaacatttcagattttaatccgaatttagctaatgagactggatttttgttttttatgttgtgtgtcacagagctaaaaactcagttcccaaatccccagtttatgcagcgccatcaggtattttaagctaaacttcttcacccctgagagcatgtcagctggagaaaagcagttcttccttgcccacttgagaagtgcacgcccactcacccaacatcctggtctctaggaaagcctcatgtgaggttcctctttctttcagctcagtgcccatgggcaaggatcatgatttccattccgtgttacaatgacaatatttaatgagcataaccttctcagtctcctgctctcaaatttaggacagagccgctaaggacaaaacaatccctcccgtgctttatgatggcagcaggggctggggagcctctgagggactctttcattctgcagttgtctggaagcctgggtggcgtcatgagctgaaggatcatgctttcctgtcctggctccataggttataggctggctggtgaaaggttcacgtggcccaggctgaacttcattgcctagctttggatgtgctttctgccataaagactgatttttgttcgttctgagccttcaaggaatttgttttttacaactggaatatgctcctgtgtgtgttaacagatcatggatgttttatgttttcactgatcatttaaagagtttgacctcagagctccaggatcatcagtaaatttgtcatgttatatatttatttttttataaatcaagacttctgtgtgctcttaaatatattaaaaacaatttacatttcaggaaaaaaaaaaaa

SEQ ID NO: 11435 - DNA, 530 bp, Homo sapiens
aagcataaaaccctagggggcgcagtccccaggatccctgtcttcatggagtggggctcatggggtcagggcttgggtcaactccactccatagcacgaaatgacttcctggagtcacgtgcgtgggggaggcttagcccctgaaggagagccacctctcttcagtgactgattgactgtgcacgtgaaatattttattttttctatttactctcacagatttgggttttccctcctctcatccttctctcccagccacactcaggcctggggctccattctgctgcccacaaggtacgaagtgggttagaagcagcaaggggacccacaggccaaaatactcctgggagacagtggcgaggggcacatgttccccggggctactaggaagtggccccagataacgtctcagctgatgacagacttttaatcactaaaaggtaaacactaatgtgcaggaatcctgtttgtttgctcacagatgtacctgacacacagtaagtgctcagtaaatgtttgtagagtgactg

SEQ ID NO: 11436 - DNA, 585 bp, Homo sapiens
gcgcgacgagaactcaatttcctgtatctactgagtctcaaaaaacccggcagaaaaaagctccagagtttcctattttggagaagcagaactggttgattcatcttcattatatccggaaagattatgaagcctgcaaggctgttatcaaagaacagcttcaagagactcagggattgtgtgaatatgctatctatgtccaagcattgatatttcgcctagaaggaaatatccaagaatccctagaactcttccagacatgtgcagttcttagtcctcagagtgctgataacctcaagcaggtggccagatctttatttcttttgggaaaacataaagctgccattgaagtatataatgaagcagctaaactcaaccagaaagattgggagatcagcctaacctaggagtttgctacatatacctgaagcagttcaacaaggcacaagaaccagttggcacaatgccctgaattcttaatagggcacgatctgacttatataatgctggggaagatccacttgctggagggagacttggacaagggccattgaagtctacaagaaagcagtggagttctcacca

SEQ ID NO: 11437 - DNA, 426 bp, Homo sapiens
ggggatctttaaaaaatatccatctgatcagagccctaccctgctcagagccctccggtggctccttctcagtcaggggaaaggacaaggtcctcccgaggccccacatgacctggaaatgcccctccaacccctagctctctactttcgcccatgcttactctgctctggccacatacaccctggctacccatgaacgttacaagtcagggccctgctctactatcctcctctgcactacctcaggccacgggcctctctctacggaggtaagggctcagatgccgctggtctgtgagctgtcttgctttccttcatgacaggaatcaccactggacacctccatgtcgccatgtgctttgctacctccatgagaatgaattggagccatcccactttgtttactgctgcacgcccagtttagcc

SEQ ID NO: 11438 - DNA, 338 bp, Homo sapiens
gctgaatacagatgggtctaaggtccttttgttcctaatcaattatttccatggctttatgtaggtcagttagggcagcaaggaaggcttttccatgagatagaaggtatcaataagctggctggaaaaacaaggatcacattgctaacccacatcaggagagctggtgtgccttggcttctcccatggcttgtttagagccagcagaatcatctccatgaaactaacacatgaaccttcaaaatgaaccaaatttcacaaagctaagagggaaactccatacaattttgttagcaagactccttaagcacattcactatttgtttcttgtccccttg

SEQ ID NO: 11439 - DNA, 67 bp, Homo sapiens
gggcagtgccctcacctgggccagccactaccaggagagactgaactccgaacagagctgcctcaat

SEQ ID NO: 11440 - DNA, 384 bp, Homo sapiens
gaaagaaatgtagctaaacatttctcgttaatttgttattaaaccatatatactatcaaagtgtagcaatctgctcaattctagtacctgccagaatttcatccaattttatatttaaatgtcttatattacacaatttttagcaggatgaaacattttaagacagtgataaggataatattttaaatttataagatctttatgccttttcaaagtttatttggcagacttgagtaattagatggataacttgattggaaaaacttctatttccttgaattgcctagaatgaaatttcctaaagtgtgcgcttatagagctaaaggtaataattaacagtgtacagaaaggggttctatggtcagagaactttggaaaatactg

SEQ ID NO: 11441 - DNA, 359 bp, Homo sapiens
tcaaatggtagctacatttaaaaaacagtgatggctactgcttaattgtatatcaaaagagatttataccagtaactttcatacatttctgtttccttattctctcacttaaattcaacaacatcattcctcttaacatttttgccaatggtgaaaagtatttcgtatacaaatttacatattcttactcatgtggttaagtttcttacatgtatttgttgaacttcctgtgaattgcttattcatatctttttctcactttttcctaatgagttttgttatttttctttaatgaattttaggaatgctttatgtattgatgctattaatcttcaattttacgtatatttgcatagtaa

SEQ ID NO: 11442 - DNA, 377 bp, Homo sapiens
cagggtattagaaatgctacgttaagggcaatatgcaataaacgggggactggcgcggcagggttcaggcactctgagtcgggctgaggcttcagagcctgccccgcaaaggcacggctgcagaacgtggcaagcctgccgggccctgcctttgtaactgcgcctcccctccccctgtctcactgttcccatgccgcgttactgtgagatcctgtgtgctactgtgtgcacagccctctgcagttcacagtggcctttccacgtcccttttccggttgaattcgcctgactgacagggaggcgggacagggctggtctgcacgctagtgaagcactggtggctgcaggtctttgggtccccatccatggcaaccccc

SEQ ID NO: 11443 - DNA, 331 bp, Homo sapiens
gcggcgtggataggatacatcgtataacgcacatgacagcccctcacaacaaattatccagccccagatgtcagtggtgcttaggttgaaaaactttgctctaggaaattaacctacaaagatattggcacacataaaacaacttttgcacaatcatatgtttgaaattacgaaccattggaaatgacacaaatatacaataaatgagttaaataaattagggtacatttgtacagttgatgcaggatttttcttggccactttgacagctggagacctccggcccagcaacaccccaactactcggcccaccaggatgtgtctggcttgt

SEQ ID NO: 11444 - DNA, 345 bp, Homo sapiens
gagtgtgtgtatgtgtacatagatgtatattatgtatacagacatgtatccaaactttcctttaaagagagtttttcataaagttgctaatgtaaactgatatgggtgttccaaggtccctcggcagggaagatttgctggtgattttcttcactccattttcctttgggtgagcctgcctgggaagggccatgaagtcagaatctccactctgcaaaaggaagaattccaggcagaagaggttctgacagggtgacatttccgtatattctctaggttcggacaagagccaggaagctggaagacagtttatcttaatatccaaaactaagtgggaatttttaa

SEQ ID NO: 11445 - DNA, 110 bp, Homo sapiens
gcctttaacatcctctgccaatgactggcctcaaatcaccagtggaaccttttcaaaaaatacaccattggctctatgtagttctactgatctgaaatatccacgtgtgg

SEQ ID NO: 11446 - DNA, 359 bp, Homo sapiens
gcctagaagagaatacaccccttacttcccacttatcctcctctcaacctaggaaagatcagacatattgactcaacattctaacaggggatgggctggatctgcccgtgaccagaccaatgccccccacccagcaagggagtaaacgctgcctgaagtgggaccagtgatacacagcatctctgtctgccagggcttcagccccgggggggatttgtgagaggctgagcagctgggtctgcacagacagcaagctgcactttgatttcatttgattcccttacaaaatgacattaaggggaatgttgagggcacagggagattcgcctgttttgggggaagggcaggcaagttcatct

SEQ ID NO: 11447 - DNA, 107 bp, Homo sapiens
cagctgagacagctgaaggaggagaacatgaagaatagttggaaactattgaacctccaagatttttctgtctttgttaacaactagcagttacatgctagcattat

SEQ ID NO: 11448 - DNA, 457 bp, Homo sapiens
gggaggactctgtctctctggtgtaatttttggccaggctggttctgaaccccctcagcctgtgaagaaggctgccttagtctgaccttcaccccgtgatgatgaggatgtcctttatattgttttcctaagtcaacactcccaccccagactctgaggatggcagacagaggaaagcccattttatggagaattaagagctttgggaatgctgtagcctcctccacagaagtcagccacagctcccagggtctcctgggcttgcctggcaagcttctttctgaattccttggggcccatctctcttgcaaagtgctcagggacgcccgggtgctggtgttaagctgggtccaaaagtctgcacagaaggggagccccgctgggaccagacctccctggcggccactgcaggtcaggccagttaggaggtgctgctcctcctccgtgggtggagggc

SEQ ID NO: 11449 - DNA, 139 bp, Homo sapiens
gatagatttgacttcccttcttgggtctaaactgaaatccatttatctaagtctattagtaaggtagtctttgattttctgaagtatttagtcttcttattcattaaggtgaggaattggggccagggatgagctttgt

SEQ ID NO: 11450 - DNA, 324 bp, Homo sapiens
gctggaggtgaaacaggtgccctggccttgcagtgacactttaccagagctagcaaaggctgagacagggtaccgttcccgttcccttggggtagcccactgagagggttcctcttaaaacatctttggttgtgtacattaagtgctagttttggacagagccttcatcctttcttggaggaggaggagggatagatagcccttaggggctctaggtctgatggtcaggccctggtagggtgggctggtcagaagctcaggctctagtaagggtttagattttagaagaggaaatgacccgggtgggggaaatagccaagtagg

SEQ ID NO: 11451 - DNA, 465 bp, Homo sapiens
gacatgttgaatattattaacccattttacagaggggaagcaaggctcagagaaagtttaaaagggacccaaggtcaggggcagaaatgggaggcagaggggaggcacccatctcacaccccacccctagggactaaagccgtagccaacagagcagtagtaatccgcgtcgtcttcaggctgcacgggactaatggtgaggacacaggcattgtgggcctcatccttggctgccgagaatcgatcggggatgtcagcaggccggtggtgatcctcctccgagcggtagtagaggagatatcgaggggcactgcctgcccgctgctggtaccaggacacaccgtagtccctgatggtgacgtgctgggggctgagcgtgcaggagagttgagccacttggcctgggaagaccagcagtgcatccagctgggccaggactgtctgggaaactgacaggaaggttcc

SEQ ID NO: 11452 - DNA, 240 bp, Homo sapiens
gaactggcaacaagcaaattaacccatgcatatacaaagaaaagtatgtcaagggacttttgaactacatatcattaatagaatatactataatgaaaaataaaatatttatcggtattgataacactctcacaattttagaactacttcatgttgcacaataaagcagtgtaaatacaataaaacatgtttatgataaagtattaaatgttcttagaaattaaggttttaggccggcca

SEQ ID NO: 11453 - DNA, 1231 bp, Homo sapiens
atgtttgtaaatcacttccttttcctacaatatttctaataagaaagcttataacagcactttattgacaccctcggacccggggcagggtcagcaagactcccagctggcatcagactgtgtctggcctgctgtcgccatccctgaggggtgcaggacagagccccatagggcagagaggcctcccctgggaccagaggaggatgctgtgcagccaggcccatccccagcactcgaggcctaggaggagaggtgggctctggcagcgggtgtgaggtggcagtgagaagccagggccctcaggtgcagctcaggcctctgccgctggggcctcatagttgagcacgtagtagtcgtggacgtacatgaggacggctattggctgtccgatgatgagcgacagccacacagctgcgttgcccataattgccctggaaaaaagcggcccacgaaacccaggcccagtgggatctgagcccatcatgccccgtgaacgcccagaaggcggaacattcgcagagggacgctcaccaggtactcgtggaagaaagccgaggcccaggaacacccctgtcctggccatccacttgctgctgccccgtcgaagcatgggcttgtagaagtgtctgatgcaccacttgtgcacagggatgttccagttctgccagaagtaggtgacagactcggagttccaccagtcccggtagaactcccggtctccaaactgcatgagctccagccacggcattcaggcaggagtggaagagccagtagaagaagatgagccagatgaggtgattggggaccgccagcttcaggaggcgctcgatgatgcgtgagtagtccatgtccttgaagggcttcatggagttctggatggtggggaccatccactgctggatcagccccacctggagctgggtgaagaacagcatctcaaggatccgtcgcagcagaaagcgcttccggatgcggggagagcggggaaagttgagctcgtagcacaaggtgggggcgaagaggaagtagtagagatcgcggtaggtcagattgtccgggtagctcacggtgtgcggggcagcagcactgctggccttcttccctgcagaggcagccttggccctggccctgcggcaccatgagttgacgtcgcggtaggagaagagcttgaggaagaggatggtgtggccatcagcgccagcagggagcccactggagtgatagactcaac

SEQ ID NO: 11454 - DNA, 341 bp, Homo sapiens
gggagcccaaaagttatttggcatgatcattactatcggccagtctatcgtgtatgtgatgaccgggatgtatggggacccttctgaaatgggtgctggaatttgcctgctaatcaccattcagctctttgttgctggcttaattgtcctacttttggatgaactcctgcaaaaaggatatggccttggctctggtatttctctcttcattgcaactaacatctgtgaaaccatcgtatggaaggcattcagccccactactgtcaacactggccgaggaatggaatttgaaggtgctatcatcgcacttttcatctgctggccacacgcacagacaaggt

SEQ ID NO: 11455 - DNA, 1091 bp, Homo sapiens
gtttattcaaaacttcagcgttctctatagtcccttgaaaaggcatctcattggaagtggctctgccacgttcccagtctcagcatttaatcactgaagtgacaactgataccttttgggaagtagtccttcaaaaacaggacgttctcctgctctattacgctccgtggtgcggcttctgtccatccctcaatcacatcttcatccagctagctcggaacctgcccatggacacattcactgtggcaaggattgacgtgtctcagaatgaccttccttgggaatttatggtcgatcgtcttcctactgtcttgttttttccctgcaacagaaaggacctaagtgtgaaataccccgaagacctccccatcacccttccaaacctgttgaggttcattttgcatcactcagaccctggcttccagcccccagaatgtggctaactctcctaccaaggagtgtcttcagagcgaggcagtcttacagcgggggcacatctcccacttggagagagagatccagaaactgagagcagaaataagcagcctccagcgagcacaagtgcaggtggagtcccagctctccagtgcccgcagagatgagcaccggctgcggcagcagcagcgggccctggaagagcagcacagcctgctccacgcacacagtgagcagctgcaggccctctatgagcagaagacacgtgagctgcaggagctggcccgcaagctgcaggagctggccgatgcctcagaaaacctccttaccgagaacacgtggctcaagatcctggtggcgaccatggagaggaaactggagggcagggatggagctgaaacgtggcggcccagagagaggtccaccccaagcagcctgagccctcagccaccccccagctccctggcagctcccctccacctgccaatgtcagcgccacactggtgtctgaaaggaataaggagaacaggacagactaactttttaaatgatatgaagaaatcagaggtgaaaattgtacattgggaatatatttatgcaaattttattgaaatttattgtaaataaagattttctcagtggtctagaaaaaaaaa

SEQ ID NO: 11456 - DNA, 996 bp, Homo sapiens
  misc_feature (1)...(996): n = a,t,c or g
cgatgctcccgcatccaacttgacttccagactctcagactgtgtggaaagatatgatcccaaaacagacatgtggactgcagtagcatccatgagcatcagcagagatgcagtgggggtctgtttacttggtgataagttatatgctgttggggggtatgatggacaggcataccttaatactgtggaggcttatgatccccagacaaatgagtggacccaggtatggcattcatgtttcattattacactgactctctttttattaaaacaattcttatggtaaaacagatcccctcaatcttgtccaatactgaaatatatggcataaatatgacaatcacgttttgattagcgatgagaaaaagaggcaatgtttaattttataacataattaaaatccagaattacctttgagatgtaagttaatactcagagaaantattaattatctgctaccacttgcatgatgaagtgttctagcctgattaaagctgataggactactggagggctgcaacaatgggaggggagactggaaaataannacaaggatagtagtcagaaaactttgaacaacttgccaccccgcgagcagtngcntttttnaatnncncancccnttggtntcnngggaccnnttaaangnccngnnnaacccnatgggaaaangggnnncccctnacttncctctcgcccccccccccccccccccggnccnncttncctnccngnaacgnaacttcccccctttgnggnntnntnnggnanggcnnnnccccccccntaaaancccccccnntcnnncnacctnnctttccccnccccccccnncccnnccccngganccnggcctngggnnncccccnncnncccntngggccccccnngnnnccncnnnnggntnnannnnggnnccnaattnccncggnnncccggggncccnggnncnnnnnggncnnnnaanccnnnnnnnnttnnnnnccccccnccccc

SEQ ID NO: 11457 - DNA, 181 bp, Homo sapiens
gtttctagaaatagataaactgttcagattatgaatttcttgactcttgatatagatattgacaagttgattcctcaaaaaagtaactaatttatattcttagtgggttattcaataaaaggtgggagcagttactcaagggtacctacattcacatcttgaaccccttatgtgggtcttg

SEQ ID NO: 11458 - DNA, 322 bp, Homo sapiens
gttttttaatatacgtctttctttaatatacaatgagcttataaagctttaatactttttaaatagctatcttatgtctgctgttattttgttgtaccttaatgacgtaatggatttttaactaataaaatacacatattaaaagatataaagagtcacgagaattaaagtcagttctatttgaataatatataaatcccactgagggttagtatttaaatcactttatgaaattaatcctacttagaactgacaaaaacataattttgatgtacaaaacaataatacttcaagtataataaagctgttgacttaataaata

SEQ ID NO: 11459 - DNA, 1305 bp, Homo sapiens
ctgaattaaaaaatctaggtcaacctattaggatacgtttccaggaatctgaagaacgaccaaaattatttgaagaactagggaaacagatccaacagtatatgaaaataatcagctctttcaaaaacaaggaggaccagtatgatcatttggatgctgctgacatgacaaaggtagaaaaaagcacaaatgaagcaatggagtggatgaataacaagctaaatctgcagaacaagcagagtttgaccatggatccagttgtcaagtcaaaagagattgaagctaaaattaaggagctgacaagtacttgtagccctataatttcaaagcccaaacccaaagtggaacctccaaaagaggaacaaaaaaatgcagagcagaatggaccagtggatggacaaggagacaacccaggcccccaggctgctgagcaggggtacagacacagctgtgccttcggattcagacaagaagcttcctgaaatggacattgattgattccaacacttgtttctattaaaacagactattataaagctttaagttgtcaactttgttctaaatatcaactagcgcaagtgaatactgaagatttcttagtcagtttttaggggattttcggggaggggaaataggtaatgtatggagcattttcacttctaaatagttagatacagaaattaagtgcattgtatctttttcataatggtactatttagaagcccagttagtcttactgagcttatgcttcactcctttatgtttaaccatgtgtctacaagaataagtttgttttgggaaagttgagctatagctacagctctagctatccagcagacttttcattatgacttacatgggcaggagctctaattatgctttaaaaatctgttgtgggagattgctttaaatgctccctgcctggtgtggggatgggggtccccctctttgtgagggctggagcatggcacggcatggattaacacggcagaggaacaaaggtgtgctctgagcttcttcatatttcaccttcaccctcacctgtgttctcttccctctctcccaataaaagggctcccattataaatgccatgtacttctcttgggaaaatagacccccttgcctagagtaagttgttaactgagggctttaaacctggaggctcttcctgaaagtatgttcatgaataccccaagcatcaaggtctaaataattttcagaagattagaattgggtagatatactgttggatatagccatggtaaatttaactgaggaattaaatccttgttaattttggtgta

SEQ ID NO: 11460 - DNA, 471 bp, Homo sapiens
gaggaacaggcggtgttggacaggcttacctttgactaccaccagaagctgcagggcaagccacagagccatgagctgaaagtccatgagatgctgaagaaggggtgggatgctgaaggttctcccttccgaggccagcgattcgaccctgccatgttcaacatctccccgggggctgtgcagttttaatgaccagaaggaaaggaaaccctcgccggtggggaggcagagccttatcctcggctgcccttcttggctccctgcattccagggacttgctcgtcttgtttacccctagccatcctttctttcaagggtgaaccaggccttccaccctgaccttgcatctccagactgttccagagaaggtgcggggccagctgctatgtggtggccgctgtggctgacactgagtgaaggtgtttgaaatgcaggagaggatatcccagcaaattgggatcacatgctttt

SEQ ID NO: 11461 - DNA, 175 bp, Homo sapiens
aggagggagggggaaagaatcaactcggagagcaagttttaaatggcgatttccagggcaccatcccaagagcttctacttcaagtggtctggagtgagagcctagaatctgcatttttaataagcatcttcaaccctgggtgattctgatgaactggggcatatactgcacttg

SEQ ID NO: 11462 - DNA, 311 bp, Homo sapiens
actgtgcccggccgaaatctttctttttctacctagtggcaggaatagtaagagtgaagactgctgagtgagaaggtctttgtatgaatccctgctctgccacttacttgcaatatataaccttggggctaacttctctgtaccccaatttccttagctataaaaagggaatagaactacctcataaggttgttataaggattaagtgcattgatgcatacaaaaactttgattctagttcacaataaacaatattagcaaatattattttccgtaagtggtattaactggggtaaataaaagcatcttag

SEQ ID NO: 11463 - DNA, 703 bp, Homo sapiens
ttcagggccaagaacgtgcggaatgactggctggacttgcgggttcccatctgggaccaggacatacagtttctcccaggatcacagaagcttgtcacctgcacagggtaccaccaggtccgtgtttatgaatccagcatccccccagcgccggccagtcctagagaccacctatggagagtacccactaacagccatgaccctcactccgggaggcaactcagtgattgtgggaaacactcatgggcagctggcagaaattgaccttcggcaagggcgtctactgggctgtctgaaggggctggcaggcagtgtgcgtgggttgcagtgccacccttcaaagcctctactagcctcctgtggcttggacagagtcttgaggatacacaggatccagaatccacggggtctggagcataaggtttatctcaagtctcaattgaactgcctcctcttgtcaggcagggacaactgggaggatgagccccaagagcctcaagaacccaacaaggtgcccctagaagacacagagacagatgaactttgggcatccttggaggcagctgccaagcggaagctctcgggtttggagcagccccaaggagctctccaaacgagacggagaaagaagaagcggcctgggtccaccagcccctgacgcccctgtgcccactttgtaaataaactgctgaactacccaaaa

SEQ ID NO: 11464 - DNA, 261 bp, Homo sapiens
gagacttactaattttatggttcttagctctctctcgtatttggaagtgttcagaaacatggctgcttattttctgagatttctttcctttattccctcactccactttcaaaattaccctttcttaaagtgtactatttggtgttttttagtatattcacagagggagaaaccattaccactatcttattttagaagatatttatcacccccataagaaaccccatacttattaatagaactcctcattcctcacttctt

SEQ ID NO: 11465 - DNA, 395 bp, Homo sapiens
aggtgtagaaggaaaggagagggaagagatgggaagagagggtcatggtattggcgtccatatttctgtaatggtgcttcatgaaagatggtggcatctcttggcatggtttccctgacacctgatatcataacgaattcaggactccagctcagtgagagagtttctgctcattgcaaccaaaagcatattcactgggaagacttgagtgcagcttgctatgtgctttgccctggttatgaactcagaacctgacctcatgggatccgttcgccactccgctgcatgtgtacatgagggtttctcgcaaaagaagttttacctttaaaacttattttcctatgattattaatgtaagtggtaataataaatgactcaatattagctttgtgcca

SEQ ID NO: 11466 - DNA, 716 bp, Homo sapiens
cccatgctggctcagctcggctatgacccttatgcaaacccccccaactatggcaaccctgaccccttcgtcatcaacaacacacagcgggtcttgaaaggggactataaaacaccagccaatctgaaaggatattttcaggtgaaccagaacagcacctcctcccacttaggaagctcgtgatttccagatctccgcaaatgacttcattgccaagaagagaagaaaatgcatttaagtggaaatcggacctctaatccaagcatattgcttgctattaatcgccaaaacaggactgctgatgaggaatgtatttgcatatgtttgcaaaagctgaatcattgaaaacgtaccttgaaactctctatctctggacactccagggtagagaatgaagggtatggaagtagtccggcttttgaaacttaggtattttatatttttcccctcaagaacttttttttaagagacagatttgccatcctccttaatttgcaggactgccttggtggctttgtttgctgggacaaggcccacaacctgtgcctctcctattgacccttactttgaattcaaagaatctatttaagagtttaatatatgaggctttctttgattcctcctcagttctacctagtttcacagaggaaaaaaatactctttgaataaagtgaacagaggctcatttgtttgtgcctcactttactgaaaaaaaa

SEQ ID NO: 11467 - DNA, 315 bp, Homo sapiens
  misc_feature (1)...(315): n = a,t,c or g
gctggaagagtttggaggaaccagctagcaaaggcctacattgccatgaatagagcattaagggcaattctggtgagggctcagaagaagagtatggctgtaagannnnnnnnnnnnnnnnnnnnnnnnnnnnnnnnnnnnnnnnnnnnnnnnnnnnnnnnnnnnnnnnnnnnnnnnnnnnnnnnnnnnnnnnnnnnnnnnnnnnnnnnnnntatattattggaaactggcatagaggcaattnnnnnnnnnnnnnnnnnnnnnnnnnnnnnnnnnnnnnnnnnnnnnnnnnnnnnnnnnnnnnnacnnaattta

SEQ ID NO: 11468 - DNA, 161 bp, Homo sapiens
gaatttaatagatacttcacagttcaaaatatcagaaagataaatatcaagatatcacagaccttttctcaccatttttattttttatttgtccttttttcaaatgtagatgtttttctcccttatttcacaacagtaaactataatgattaaaaccatgt

SEQ ID NO: 11469 - DNA, 335 bp, Homo sapiens
gtttagacatgaagaaataaaaccatgtttattcacagaagatatgattgtctatgtagaaagtctggttaaatctgcaaaaaaagctactagaactaagtgactttagcaaagttttagcacatactgctagaaaaattgggtaaccatatttttttaaaaagcatagattcataccttgtaccatatacaaaaattgactcaaaatggatcatagacctaaatgtaaaacctaaaactataaaacttttaggaggaaacatgggagaaaacctttgtcatctcatgttaaggcaaagactcctctggatgtaacacaaaaaggcatggatcca

SEQ ID NO: 11470 - DNA, 304 bp, Homo sapiens
  misc_feature (1)...(304): n = a,t,c or g
ggaggctgcaggtggtatggccccgcagaacgagaggcctgccctccagaagaggtctcccccatcagcgggtttccctgtgggctgagggctgttctcttagtgtgtttgattgcactctggggtttccatcctggaataatatcagaactccagtaaaggtcgtgcctcacagttcctttacaaataggacagatgcccagccacttnaggaaggctgaggcgggnagggatggctttgagcccagggagttccaagaccagccttgagcaacatagttgaagaccttgtccttanaggaat

SEQ ID NO: 11471 - DNA, 128 bp, Homo sapiens
ctcgtgccgggaaatttctctgcagtctctcaataatttacacatggagataattgaatatatgacatgttttgaagggtaacttctaattgagtagatacatatctccttttttgaaaccctttctt

SEQ ID NO: 11472 - DNA, 428 bp, Homo sapiens
ggctctacagagtggctggcagaatggtcctaagaaggccctgtccctcttctttacctttttaggactgacattcttttttagttacttctcacctcttctaggatctttgaggtagatgagaaggaaggcttcctcctcctgtcctaatcaggcatggcctcaaccctgtccctgtgtagcattccagatagcttaaagctgggtgcacctttgaaatgtcattttgtctttacacctttaggtatttattaaaactcaccatcagttccctgtggctatcttttctcttaaaatagctaagggaaaaagtagttaaggcagtgggcattaaaccagagttgttcactggtttctggaaacctggcatgggttttcaggaaggagttcaccaaaaggcacaggtggggcaccggggggggcctggc

SEQ ID NO: 11473 - DNA, 355 bp, Homo sapiens
  misc_feature (1)...(355): n = a,t,c or g
gggcagaggtaacagcagagatgagacagcatgatgccttcagggaccatgtagcttgtaaatggattttaatcttttgtcgtaaagacaataaagagcccctggaaggttttatttggtttaaagatctatctacctttattgttttttttttttctctgatgacaaatcatatatgctcattataaaaagcaatgaacacattacaaatatatatatttatctagatacagatgtgtgtgggtatgtgtgtgtatatatataagtnttatatatataaagtaaagcatatatatctatataaagtaaagatttccagtaattcccttccttatctcctgagataattactcct

SEQ ID NO: 11474 - DNA, 365 bp, Homo sapiens
gggaaacttcccgaagcctcaccctcccaggaattccctgctaagtgccacagtcatctcttcaccactcggtttccactctcccatccttgcaccgagatcccactgttaggcctttttcaagcacggaccttctcatgctcagtctctctgtggtgtggaagtgtctactgggtgggcctcacagaaggttccaggccctggtacaagcccaagggaaatgatgatccaaaatggactccgataaagtttctgccactctgcattgggggcttttggtaggagtccagttcaattttataaaaataaaaatacatgtctcgcacttctgagtttgcagactcaggtccattctgtatttgcag

SEQ ID NO: 11475 - DNA, 488 bp, Homo sapiens
aaggagttcaagttgcttgccagactaacttacttttaaaagtaagcagccttccaagttaagagatgattttaaatttcagattttatcatgtgggcaacctgctgcaactggttctgcctggatggacagcctgaggaggtcccaccaccccagggagccaggatgcaggcctattccaaccctgggtacagctccttcccttccccaacaggcttggaaccaagctgcaagtcctgtggggctcactttgcaaacacggccaggaagcagacctgcttggactgtaagaaaaatttttgcatgacctgttcgagccaagtagggaatgggccccgctctgccttctctgccaacggtttcgagctacagcctttcagcgagaggagctcatgaagatgaaggtgaaggacttgagggactatctcagcctccatgacatctctaccgaaatgtgccgggagaaagaagagctggtgctcttggtc

SEQ ID NO: 11476 - DNA, 176 bp, Homo sapiens
cgtcgacagcttgagagtcccttggctttgtcctctgagatgaggctttttaaaatgaaccaggagtctggctggccagttttgcaaacttcttgttcagaagaaccccttagaggcagctgaacatatagggcacattttcaaaagctgggaaagacagacccctttcacctatg

SEQ ID NO: 11477 - DNA, 2251 bp, Homo sapiens
  misc_feature (1)...(2251): n = a,t,c or g
tcagagcaagcctacacctgtgaagccaaactatgctctaaagttcacccttgctggccacaccaaagcagtgtcctccgtgaaattcagcccgaatggagagtggctggcaagttcatctgctgataaacttattaaaatttggggcgcgtatgatgggaaatttgagaaaaccatatctggtcacaagctgggaatatccgatgtagcctggtcgtcagattctaaccttcttgtttctgcctcagatgacaaaaccttgaagatatgggacgtgagctcgggcaagtgtctgaaaaccctgaagggacacagtaattatgtcttttgctgcaacttcaatccccagtccaaccttattgtctcaggatcctttgacgaaagcgtgaggatatgggatgtgaaaacagggaagtgcctcaagactttgccagctcactcggatccagtctcggccgttcattttaatcgtgatggatccttgatagtttcaagtagctatgatggtctctgtcgcatctgggacaccgcctcaggccagtgcctgaagacgctcatcgatgacgacaacccccccgtgtcttttgtgaagttctccccgaacggcaaatacatcctggccgccacgctggacaacactctgaagctctgggactacagcaaggggaagtgcctgaagacgtacactggccacaagaatgagaaatactgcatatttgccaatttctctgttactggtgggaagtggattgtgtctggctcagaggataaccttgtttacatctggaaccttcagacgaaagagattgtacagaaactacaaggccacacagatgtcgtgatctcaacagcttgtcacccaacagaaaacatcatcgcctctgctgcgctagaaaatgacaaaacaattaaactgtggaagagtgactgctaagtccctttgctcctgcccgcgagagactgtcgggaagttgacccggattggcaagaaacagggtgtcttggaggtggtcccccagatctgcgcctgggggtcaggacagggcctgatttgagcctcctctctgaagatgatttggccgagcggaaggtgtggaccaccggaaagttcttaaaagttgctggtgacatttcttgccaattctaacactgtctagggaagagttcctagtctattgtgttcaaacagagtcaacaaaagtttttaattttttattacagaagggtgaagttcaatttaacatgcgttgtgttttttcagtaaacgttctgtatctttttgatattccatgacccagtgcacgctgtggcctgtcaccgccaccgtggccccgccagctggcctcccctttggcccacgccggccgcccccattctctgctgcgtagatgccctggcccagggccctgactcctccattcccgccagtagctgttcctagtgtattttcgtctttctggaaaacagcattgagtggttgttttctgtgtaaagagccgtttgtgtcttgggagtttgtggcccacatgccgatagcacggtcatcgcacatgactctcccgtttgtctcagtgtccctgcaacaagcagcaccgcagactgtaataaaaggtggggttttgtgaatggttgtggcaagtgcgtccttgtgaagctcgtctccatgtggctttcttggagaaaggctcccctggggcaagagggtggaaggtttctttggacaggaggtgctgaggctggctgcacctgctctctgaagacgccttcctctctaggttcattgttcagtgttgctgggggcggggcacgggggtggggaggttcttagttgcgaacgagccaagctcctgatggacttgcgttgggatgtgggggacacctgtggcatggtaaggctccctgagtcccttactccaggtcagatgccagtgggactcatgcgccctatgagggtgcagggccagtgcttgccccttcggactcctcgaggggttgggtgctaagcgcgaccttcgccnttccctgctggagccctcgcctgcctgcccctctgcctgtgctcctgggcagtgtggcttcccggtgctcacctgcacagcagtttaacagcagaggccgagcggggancttctgggggagcgaggcttgaaacctggaaccttgcccatgggagacagtttgttggttgagggtttgccacaacacagtgaggggcggaaaggggtgggttnaggggcacaggttgctgggg

SEQ ID NO: 11478 - DNA, 4868 bp, Homo sapiens
atggccaagtcgggtggctgcggcgcgggagccggcgtgggcggcggcaacggggcactgacctgggtgaacaatgctgcaaaaaaagaagagtcagaaactgccaacaaaaatgattcttcaaagaagttgtctgttgagagagtgtatcagaagaagacacaacttgaacacattcttcttcgtcctgatacatatattgggtcagtggagccattgacgcagttcatgtgggtgtatgatgaagatgtaggaatgaattgcagggaggttacctttgtgccaggtttatacaagatctttgatgaaattttggttaatgctgctgacaataaacagagggataagaacatgacttgtattaaagtttctattgatcctgaatctaacattataagcatttggaataatgggaaaggcattccagtagtagaacacaaggtagagaaagtttatgttcctgctttaatttttggacagcttttaacatccagtaactatgatgatgatgagaaaaaagttacaggtggtcgtaatggttatggtgcaaaactttgtaatattttcagtacaaagtttacagtagaaacagcttgcaaagaatacaaacacagttttaagcagacatggatgaataatatgatgaagacttctgaagccaaaattaaacattttgatggtgaagattacacatgcataacattccaaccagatctgtccaaatttaagatggaaaaacttgacaaggatattgtggccctcatgactagaagggcatatgatttggctggttcgtgtagaggggtcaaggtcatgtttaatggaaagaaattgcctgtaaatggatttcgcagttatgtagatctttatgtgaaagacaaattggatgaaactggggtggccctgaaagttattcatgagcttgcaaatgaaagatgggatgtttgtctcacattgagtgaaaaaggattccagcaaatcagctttgtaaatagtattgcaactacaaaaggtggacggcacgtggattatgtggtagatcaagttgttggtaaactgattgaagtagttaagaaaaagaacaaagctggtgtatcagtgaaaccatttcaagtaaaaaaccatatatgggtttttattaattgccttattgaaaatccaacttttgattctcagactaaggaaaacatgactctgcagcccaaaagttttgggtctaaatgccagctgtcagaaaaattttttaaagcagcctctaattgtggcattgtagaaagtatcctgaactgggtgaaatttaaggctcagactcagctgaataagaagtgttcatcagtaaaatacagtaaaatcaaaggtattcccaaactggatgatgctaatgatgctggtggtaaacattccctggagtgtacactgatattaacagagggagactctgccaaatcactggctgtgtctggattaggtgtgattggacgagacagatacggagtttttccactcaggggcaaaattcttaatgtacgggaagcttctcataaacagatcatggaaaatgctgaaataaataatattattaaaatagttggtctacaatataagaaaagttacgatgatgcagaatctctgaaaaccttacgctatggaaagattatgattatgaccgatcaggatcaagatggttctcacataaaaggcctgcttattaatttcatccatcacaattggccatcacttttgaagcatggttttcttgaagagttcattactcctattgtaaaggcaagcaaaaataagcaggaactttccttctacagtattcctgaatttgacgaatggaaaaaacatatagaaaaccagaaagcctggaaaataaagtactataaaggattgggtactagtacagctaaagaagcaaaggaatattttgctgatatggaaaggcatcgcatcttgtttagatatgctggtcctgaagatgatgctgccattaccttggcatttagtaagaagaagattgatgacagaaaagaatggttaacaaattttatggaagaccggagacagcgtaggctacatggcttaccagagcaatttttatatggtactgcaacaaagcatttgacttataatgatttcatcaacaaggaattgattctcttctcaaactcagacaatgaaagatctataccatctcttgttgatggctttaaacctggccagcggaaagttttatttacctgtttcaagaggaatgataaacgtgaagtaaaagttgcccagttggctggctctgttgctgagatgtcggcttatcatcatggagaacaagcattgatgatgactattgtgaatttggctcagaactttgtgggaagtaacaacattaacttgcttcagcctattggtcagtttggaactcggcttcatggtggcaaagatgctgcaagccctcgttatattttcacaatgttaagcactttagcaaggctactttttcctgctgtggatgacaacctccttaagttcctttatgatgataatcaacgtgtagagcctgagtggtatattcctataattcccatggttttaataaatggtgctgagggcattggtactggatgggcttgtaaactacccaactatgatgctagggaaattgtgaacaatgtcagacgaatgctagatggcctggatcctcatcccatgcttccaaactacaaaaactttaaaggcacgattcaagaacttggtcaaaaccagtatgcagtcagtggtgaaatatttgtagtggacagaaacacagtagaaattacagagcttccagttagaacttggacacaggtatataaagaacaggttttagaacctatgctaaatggaacagataaaacaccagcattaatttctgattataaagaatatcatactgacacaactgtgaaatttgtggtgaaaatgactgaagagaaactagcacaagcagaagctgctggactgcataaagtttttaaacttcaaactactcttacttgtaattccatggtactttttgatcatatgggatgtctgaagaaatatgaaactgtgcaagacattctgaaagaattctttgatttacgattaagttattacggtttacgtaaggagtggcttgtgggaatgttgggagcagaatctacaaagcttaacaatcaagcccgtttcattttagagaagatacaagggaaaattactatagagaataggtcaaagaaagatttgattcaaatgttagtccagagaggttatgaatctgacccagtgaaagcctggaaagaagcacaagaaaaggcagcagaagaggatgaaacacaaaaccagcatgatgatagttcctccgattcaggaactccttcaggcccagattttaattatattttaaatatgtctctgtggtctcttactaaagaaaaagttgaagaactgattaaacagagagatgcaaaagggcgagaggtcaatgatcttaaaagaaaatctccttcagatctttggaaagaggatttagcggcatttgttgaagaactggataaagtggaatctcaagaacgagaagatgttctggctggaatgtctggaaaagcaattaaaggtaaagttggcaaacctaaggtgaagaaactccagttggaagagacaatgccctcaccttatggcagaagaataattcctgaaattacagctatgaaggcagatgccagcaaaaagttgctgaagaagaagaagggtgatcttgatactgcagcagtaaaagtggaatttgatgaagaattcagtggagcaccagtagaaggtgcaggagaagaggcattgactccatcagttcctataaataaaggtcccaaacctaagagggagaagaaggagcctggtaccagagtgagaaaaacacctacatcatctggtaaacctagtgcaaagaaagtgaagaaacggaatccttggtcagatgatgaatccaagtcagaaagtgatttggaagaaacagaacctgtggttattccaagagattctttgcttaggagagcagcagccgaaagacctaaatacacatttgatttctcagaagaagaggatgatgatgctgatgatgatgatgatgacaataatgatttagaggaattgaaagttaaagcatctcccataacaaatgatggggaagatgaatttgttccttcagatgggttagataaagatgaatatacattttcaccaggcaaatcaaaagccactccagaaaaatctttgcatgacaaaaaaagtcaggattttggaaatctcttctcatttccttcatattctcagaagtcagaagatgattcagctaaatttgacagtaatgaagaagattctgcttctgttttttcaccatcatttgggtctgaaacagacagataaagttccaagtaaaacggtagctgctaaaaagggaaaaccgtcttcagatacagtccctaagcccaagagagccccaaaacagaagaaagtagtagaggctgtaaactctgactcggattcagaatttggcattccaaagaagactacaacaccaaaaggtaaaggccgaggggcaaagaaaaggaaagcatctggctctgaaaatgaaggcgattataaccctggcaggaaaacatccaaaacaacaagcaagaaaccgaagaagacatcttttgatcaggattcagatgtggacatcttcccctcagacttccctactgagccaccttctctgccacgaacccggtcgggctaggaaagaagtaaaatattttacagagtctgatgaagaagaagatgatgttgattttgcaatgtttaattaa

SEQ ID NO: 11479 - DNA, 210 bp, Homo sapiens
acggaagtagaaactataatagatagataccaaagactaggaaaggtgatgggtctcagggagagggattaagagtgaggttggtgaatgggtacaaaacacacagttagataaaaggaataaattttaatcttttgatagcacacatagggtgactatattcacacatctattgtttttcagacaggctaggaagaggactcatgtacc

SEQ ID NO: 11480 - DNA, 191 bp, Homo sapiens
tacctggccccatgggcccaaactcgggtcctagctctcggggaattggccttccagggccaaatccatctcccatgtcaagggctcctggccccataggccctaattcagctcatttctcaaggccagttggccccatgggggtaaatgccaatccctttcccaggggagcaggttcatctgccttttct

SEQ ID NO: 11481 - DNA, 361 bp, Homo sapiens
  misc_feature (1)...(361): n = a,t,c or g
gtatgcatgcccaggcacgtagagcgtgctcacaagatactaacataatccattttattccaaaaagagcgcaagatannnnnnnnnnnnnnnnnnnnnnnnnnnnnnnnnnnnnnnnnnnnnnnnnnnnnnnnnnnnnnnnnnnnnnnnnnnnnnnnnnnnnnnnnnnnnnnnnnnnnnnnnnnnnnnnnnnnnnnnnnnnnnnnnnnnnnnnnnnnnnnnnnnnnnnnnnnnnnnnnnnnnnnnnnnnnnnnnnnnnnnnnnnnnnnnnnnnnnnnnnnnnnnnnnnnnnnnnnnnnnnnnnnnnnnnnnnnnnnnnnnnnnnnnnnnnnnnnnnnnnnnnntgcatctcaaaaaaaga

SEQ ID NO: 11482 - DNA, 312 bp, Homo sapiens
gtacgacatttgcaactgagtagagcaaatgctttgtactttatattttgaagtcaggtgctgagcagagcacccaagcaactgccagagtgaggacagcttcaaaaggtagccacagtgtgacttctaagctgaatataatcaaacgaactccctttcatcctgttttcttccaaactctcagaactactatcgttccacacacaaaacagccagggttgaaaactggagcacagaattagcataaagctaactttaaataagcagttttctgctgaggtggaaggatatacctaagtaatttcgtcgacg

SEQ ID NO: 11483 - DNA, 315 bp, Homo sapiens
aatcttggcagagtggctttgggagtcagatcaacccagttggctctgtcccttattcactcagggtcctcaggtaagtcttagtcccgtgtcctcgtttgcaaagtggagctaatgatcatgcttaatgccgaagtgggtgtggctgtggagaccccctcactgtcactgacaaataggagctgtcagcagcccaggtgccacacaatgatggtgactgtgaggaggccccccacagccctttcctttgctattgtctgtggacattaaagctactggtccccaagtaactgccattaaaaatgacctccagat

SEQ ID NO: 11484 - DNA, 341 bp, Homo sapiens
ggtgaattgctcctctcccaaaatgcatttgtatcatgtctttgcagcaagaagtgactatatctctgtgaatgctacatacattaccatattgtaatttaacaccaaaggcattagctgcaccaactttttatttattgtgatcttgaaaaacacatggtcttcacattttttgatgagggtcattaaaaaatatttatggaatatgcatgtcaatcccagatatattgaaatgagtaaaccttcatattatgctgttggctacataacagagcaatagctggggaacttactttgccttgggactcttaaaacaggaaagattttatatctttcttggc

SEQ ID NO: 11485 - DNA, 261 bp, Homo sapiens
gggcaacaaaaacaaactttaaggcaaaagtgtggtgggagtgaggaaaggcatatggttgattaaaacaactttcctttttttccaccaaaacatttaattggctttagagtcaaggaaggttcatagtcaaagatgccagtaagttcctttgtatcccacttttcatctctgctttgctcctattttgtgtcaaggtttatgtaagtgctaaagggtttagaccaatgatcctcaatttgaggtgattttgtaccccca

SEQ ID NO: 11486 - DNA, 411 bp, Homo sapiens
gttttttttttcttttacaggattctaaatgttccccttgccaacttttttgttgttcatcatcaccatcctccaggagcctttttaaacttttttttcgtggatcacctcctcatgaaatatgaacacaaaagtcacatgacatatctatgttctgtacattacatctgtgattatacagtaaaaaataacaagatttcactcccaagaatcaatttctcttccttagggacaccgtgtcctatgtagagaatgcagactctagaattattcattcccaaggtgattctcagattctctattttcatttatagccatatcttctggagcagtggaatttcacagcctctgggtccccttcacccttggacccttttagggaacccaaagagctttgttccgtgtgggatt

SEQ ID NO: 11487 - DNA, 361 bp, Homo sapiens
cgtcgacctggctctagaaagtttaacaccacggagagagtccttcagggtctgctcaggcctgtgttcaagaacaccagtgttggccctctgtactctggctgcagactgaccttgctcaggcccaagaaggatggggcagccaccaaagtggatgccatctgcacctaccgccctgatcccaaaagccctggactggacagagagcagctatactgggagctgagccagggtgatgcatgttctcctcatatcgcaggttagtgatggtgaagttaattgtgaatagcaccaggagagggctggcggtcatgggtccagacagggagcctggagttctcgaggttgccaggtgcatgtc

SEQ ID NO: 11488 - DNA, 245 bp, Homo sapiens
ggggcgatgagagaaactccgtcacataaaaaaatagaagtttgggtatatgtatgggagggatgtgtacaccattctctgggcccacttcacccagcgccacctacttcagttcattttcttcagttgggttccctgtgtaattcaagtttccccataacagaaaagccaaaagagctgacttttcacacacaagagtggagaataagaatacagtactataggctgggcgtggtggctcatga

SEQ ID NO: 11489 - DNA, 411 bp, Homo sapiens
  misc_feature (1)...(411): n = a,t,c or g
gaaagatgaagaatcttcatgaagactataccactgcacccaattggaaacagagtcaccaccaccttttcaaccagcaaactaaaacccaactgcagatgaaagtccttatctatggaagccactctagaaagttaggaagagnnnnnnnnnnnnnnnnnnnnnnnnnnnnnnnnnnnnnnnnnnnnnnnnnnnnnnnnnnnnnnnnnnnnnnnnnnnnnnnnnnnnnnnnnnnnnnnnnnnnnnnnnnnnnnnnnnnnnnnnnnnnnnnnnnnnnnnnnnnnnnnnnnnnnnnnnnacatacacgtgttaattccagcttcttatgaagctggagggcaagaggattcgctttgaacttggggagacagaggtttgccagttgaggccnaaggttcatggccactgtta

SEQ ID NO: 11490 - DNA, 362 bp, Homo sapiens
gtgaaattagggactattttttgtcacctttgtgtccatagagcacataacaagcatattgtaggcttctgtgtattttaatgaatgagtttaatggttttttttcacacttttgacaattggtttacactttttagaacactagtaggaagataagctcaaatacttactaaagaaatatttattgagtgcttattttctcccaggtgtggttctaggcactggagatataacagtgaataagatacacaaaaacgtgtatccttacacatgtagggctaacattttagttgagtgggggaaaaaagttttaaaaattttgtaatactaactattattgtggagaaagatttagctaaggg

SEQ ID NO: 11491 - DNA, 608 bp, Homo sapiens
gcaacaaaacactcttctgtcctttttaatgtaaacagagttacaaaaaccactccaaagtgaaggctcccatcctacacacagatatttgcttactgtgtgggccgatagctgtgaactatgtaaggttttttaaacaatagtttaaatttttagactttaaagacactaaccatataacttttatgtttcttccagtttctctccctccccccgcattttgctgcatatgcctttaaaatcaatgcagtattaccattaaaacatgggactctaactaaagccacttaggagcagacagcagcgttgttaggtactgaagggttcttcctccctactgttaaccattgaagctgctagtcattggcaatcattttaaaccaaaaagctgctggataacatttgtcattcatattctttgcaagcattactttagcattttagcatgtttggggtcataaacagaggaagtatcagttattgatatctacttctattggagtccatgttgcatttcttgtgaactataaatggtgcttctcattttctgataatttttctcttgctaaataaatgtattaaaagatattttcataatgccaaaaaaa

SEQ ID NO: 11492 - DNA, 242 bp, Homo sapiens
  misc_feature (1)...(242): n = a,t,c or g
gtgcatttttagtttgtcaattaagtttttcaactcctgaatttctgcttgacttttaaaaattattttaatctctgttaaatttatctgataaaattctgctctttgttatcttaaagtgcattgagctnnnnnnnnnnnnnnnnnnnnnnnnnnnnnnnnnnnnnnnnnnnnnnnnnnnnnnnnnnnnnnnnnnnnnnnnnnnnngatcccaagtacttgcagtgtttaagtggtataaa

SEQ ID NO: 11493 - DNA, 333 bp, Homo sapiens
gttttaccactcaggtaccattcttacctttttcattgtttatctttttatatttattttcatcgctacacaaacattttttaggagtttgattctacctccattttggttagatatacaaactctaccccatgagggatgtatggtgtatttctagatttagcaacaattttcttgaaaaatgtacaatactatagaaaaatgaagatagtaaataccaggtataagttaataacagtgtttcttttgttcagtaataatgaactgtgtactagcactgaactttaggccctcctatttgcgtattttctgtttgtatatttttaaatagag

SEQ ID NO: 11494 - DNA, 406 bp, Homo sapiens
tgatggaggtgacatttcaaggagaatatccttctactttggtttcacagggtgctgaaataattccctcaggaactgagcatcctgtgtttcccaaggcttacgagctggagaaacggactagtcctcaagttctgggtagcattctaaaatctgggactactagtgagagtggagccttatccttggaacccagtcatataggtgacctgcagaaagcagacaccagtagtcaaggtgctttagtgtttctctcaaaggactacgagatagaaagtcaaaatcctctggcctctcctacgaacactttgttaggctctgccaaagaacagagataccagagaggcctaggaaaggaatgatagctgggggttctttttgacctgagggctgctattgtatattc

SEQ ID NO: 11495 - DNA, 556 bp, Homo sapiens
gaggagaagcccggccagccacagcctcagcaccatcacagccaccaccatccgcaccatcaccctcagcagcagcagcagcagccgcaccaccaccaccattattatttctacaaccacagccacaaccaccaccaccaccatcatcaccagcagcctcaccaatacctgcagcatggagccgagggcagccccaaggcccagccaaagccgctgaaacatgagcagaaacacaccctccagcagcaccaggaaacgccgaagaagaaaacaggctatggtgaactaaacggtaatgctggagaaagagaaatatctttaaagaacctgagttctgatgaagccaccaaccctatttccagggtcctcaatggcaaccagcaagttgtagacactagcctgaagcagactgtaaaggccaacacctttgggaaagcaggaattaaaaccaagaatttcattcagaaaaacagtatggacaaaaagaatgggaagtcttatgaaaataaatctggagagaatcagtctgtagataagtctgatactataccaattc

SEQ ID NO: 11496 - DNA, 618 bp, Homo sapiens
  misc_feature (1)...(618): n = a,t,c or g
aagattattagctgtttcttcacatagccctttcacagtgctttccatataaaaaatactccatttatactaggcagcttaggtattataaaaaatacgatctttggaatctcagctctgccatttatttggtctatggcaaattctttagacttaggatttgtttaaaatgggggttattaacattttcctcacaaataaggagggattaaaatgaggaaaatacgtaaacattccaacagagtaagtactcagtgtcttttcttcccttctttgatttgattgtttcacacccttaaaaattgttattacagcattggttcttaaccctagctgcacattagaatcatccagagatatttgaataaaacacgaatggctcagccccaccccacatcagttgaatcagtctttgagggtgaggcccaagcatctggagttttgtttgtttttaagcttcccggtaattctgataccgcataggtattgagaaccactagtctagagggaaagacttcacacataacctttcangaaagctttcctgaggtatttctaantaactttccaangttaaaaattagggtggggggagggccatggggtccantttaaccc

SEQ ID NO: 11497 - DNA, 447 bp, Homo sapiens
gagcttgtgcccgtgaagcgctgggcccggggccccaaccttcacaagccacagtggtctggatcgacccaacttatgtggtggccacatcttatgacatcacagtagatacggagactgaggtcacgcaatacaagcccccactgagccggcccctgcggccagggccctggactgttcgactccttcagttctgggaaccgctgggtgagacccgcttccttgtgctgcccttgaccttcaaccgcaaactacctctcaggaaaggtaagcgtgcagttctcaaatgaggcccagaagccagacagaataggactcgccagagaggtgacctcaagaagccaaccatcagagctgactcccatccctagagtcagggaagcatggaagggctggggccttcatcttctttcctgtagcatgcagggtcctgcactgcagtgtggc

SEQ ID NO: 11498 - DNA, 776 bp, Homo sapiens
  misc_feature (1)...(776): n = a,t,c or g
tttagagagatagagatatatttcttctgttgcatatttcagacttcacgctgagcttcaggcacaattactccaggttcttctgagagtcttgacagagtcttcttcccacgctgctcatgtgacctcacttccagtgcacacctggaaactctgcatgggtctcagtgggccctgaccctgcctttcccatccaggggcagggtatgctggaaagccctggagccgccccaccccacttttagggtcccctggcttacaaaagaacttgttccttgcttagagcccagctctgcagggcccccgatatcaccttgttcttcgggccttagagccttggcagggcacttgcagccctgtggagcctcagccacgagcaccacaggcccagaatggggcatgaggccctggagagtgaggcaggcccagcctcgtgcagaacaatagcaggtgggctcagcaagccactgctccccacagacatggcccacttcctggggctgctctgagccctattgcacatcttctgttctagtttctctcccaaccacccattttcctttttaaattnnnnnnnnnnnnnnnnnnnnnnnnnnnnnnttcaaactagacaggaaggtgaggaagagctgggtgtggaatgctgctggtgcccttctcgcgttcccgccagccctctgatccccaacagagacatcagcagtagttcatactgtgtccaccttccctgccgtctgtgtgggttcttgatggctgaaatgggtgtgcagcctggg

SEQ ID NO: 11499 - DNA, 13842 bp, Homo sapiens
  misc_feature (1)...(13842): n = a,t,c or g
ttttttttcaactccctccaagttgtttatttaataataataaaaaagaaatgcacacacataaacctgaactcccccccaccccaccctcccttactcccagtaactagctccaaaatgaaaaaacttcccttgtcccacctggggactaaattcccacctccactgccataacactagagaaacaaaataaaaaatatgcagcagctcaccacccaccccacaactgaacctcacacaatcccctcaaacaaagaagccaggactgggggttcacaggaatgagaggagccctatattctgaaaagggatgagaagagaggtgaacacccccacctcaaataagtgcttaacccccacacctgctctttcctttaccaattggccccaagcctggggatcagggaaatttgaaacagtcccacctggccacctgggtaccccctccccccgttctaagtcagtgtgaatggcagaggtcagggatgattgaggtagaggggctggtgggaggcctggtgggcctggctggctgcagagactggcaaggggccacccagtggcattgcctggggttggggatggctgttttcggagcgaggggggcactgtggaggtcttgatgtgaatcaccctggtgtccatgacctcacactcgatctgcatcatctcctcatagtcccccggggccccacggcctgacagggtctcattgggggccatggcaggcatcaccagggacatcttgggccgggaggtcttgttgtggctgatggctgggagcagcaggtggtcccttcggaaagagacaacataaaatgtgtcttcccgtcggtcaaattgcatccaagaatgctggctgcgaacggtctgggtggcgatatagttgcagctggcccacagaatccctttctgggggtccagggggttggatggggacttgccttaacttggaggtgacttcttccgtggctgagacttctggaaggagaagtatctaaggactgtctctcctgggccctctgagggatcttcctccggcctctctggtggcgctggacccagccactcaactcgtcagcaagcctcagggactcagtgcggttgaagtgccggcaatcagaggagaggaagagctggtctaggtctcttagtagtagctccttggcgcccccagggaaggctgtcaggttgctgaaactgggctggtctgtggggctgggctggggctccttagggccctgggaggacccctggagaggttcaactccctgaactggctcttgctctgagaaccccagcaagtgtctccggggttgaggctcccccttgttcatccgaggagagatgggagctgaaggaggctcactgatgctgtgggataaagaaggactgagcacaatgaagaatttcagctgtatcaagtatctaggtaagaataaagactctgcagatggactgcttgagttgcaatctgttatacaagcctgagtctgcctctgtaagatgggaataaggatggtccctacatacaaaaaagacagtgcatcacctagagcctagaactcagtaagcacttaatagtcactatttctaccagcattatcaccatcatctactctccactggaaaaataatggagcaggnnnnnnnnnnnnnnnnnnnnnnnnnnnnnnnnnnnnnnnnnnnnnnnnnnnnnnnnnnnnnnnnnnnnnnnnnnnnnnnnnnnnnnnnnnnnnnnnnnnnnnnnnnnnnnnnnnnnnnnnnnnnnnnnnnnnnnnnnnnnnnnnnnnnnnnnnnnnnnnnnnnnnnnnnnnnnnnnnnnnnnnnnnnnnnnnnnnnnnnnnnnnnnnnnnnnnnnnnnnnnnnnnnnnnnnnnnnnnnnnnnnnnnnnnnnnnnnnnnnnnnnnnnnnnnnnnnnnnnnnnnnnnnnnnnnnnnnnngacaaataatggagcaggaaggggctggccagacacatcatcggtgccaaggacaccagaaccatttgtatataagcagaaggaaatggcctgggccaaagcaggcagctaggaggctgtaacgtgggctccacctggaaggttctagtgaagcaaggaaggtctcacctgacaggtccaaagttgaaggcaatgaagagaaggaagaccatgatgcagaccaccttcctgtttccagaccctaacttgagctcgctgttctaaggtacaaagaaggagacaagaaaaaggggaatcattccaaggaggctgtattcctgttggtctcccagggacagactggtcttacttcagccagcagggcctccagccgccgccggagggcagcattctctcggcggagctgctggttgtcagccagtactgcttgcagccgagcctccagtccctgcagatactctttcttctttctccgggactggcaggctgactcccggttcttgatcattcgctgctgccgcttcagcagctttgcctaggcacccggaaggtcaaaaaagaatgacagatgagttggcagaaggagactatgctctcaaaccccaaggaatgatttacccaaagctcacatggccattcccctgccttcctgacccacctacatagccagagaggtttttcctctctactcaaacacgctagggaaggggcccttctttcaaacattccctgctactgctcctcagaggtgggaaaggttagagtgtgggaagaactttctccatgctggtggaaactctttccttcgtaactctttcttcctgtcagcccacatttgtagggttcaaagtttaaccttgttatactgcttatacagtttacctgattttcccctaggaggcagcctccctccccaactatggccatgaccgtagtcgtatagtacagtacgacttccttgcctttaatttatggagaccaaccccatttctccatctgcagtgacagcaaacctaaaggaccctaaaactacctggagttgatattcatatagaaacaggagtccattctgaccctcagaatgatctaatgggtccgtttcctcacttttttctcctaggtatcgactccctcctcatcccacagttctctctatggcaagacttccctcttcccttcccatcactcgccctacttctctcctccccaacacttacatccacttcaggcgggcaggagtttccaggcataggagcgggaacgatgctcttcctctcaggccgtggtagagagggagccggcccttcaggctggactcgaatagcaccctggatgaggacaactggggacactggggcaagtgagcagaggtcagagggctgtgcgctgggtggggtccttgtgtccacacccacacaagagcacccaaggattgggcagcctcaatggctgcaagctctctgacagggtcaatgcagcccgcctccttnnnnnnnnnnnnnnnnnnnnnnnnnnnnnnnnnnnnnnnnnnnnnnnnnnnnnnnnnnnnnnnnnnnnnnnnnnnnnnnnnnnnnnnnnnnnnnnnnnnnnnnnnnnnnnnnnnnnnnnnnnnnnnnnnnnnnnnnnnnnnnnnnnnnnnnnnnnnnnnnnnnnnnnnnnnnnnnnnnnnnnnnnnnnnnnnnnnnnnnnnnnnnnnnnnnnnnnnnnnnnnnnnnnnnnnnnnnnnnnnnnnnnnnnnnnnnnnnnnnnnnnnnnnnnnnnnnnnnnnnnnnnnnnnnnnnnnnnnnnnnnnnnnnnntttaattaattaattaannnnnnnnnnnnnnnnnnnnnnnnnnnnnnnnnnnnnnnnnnnnnnnnnnnnnnnnnnnnnnnnnnnnnnnnnnnnnnnnnnnnnnnnnnnnnnnnnnnnnnnnnnnnnnnnnnnnnnnnnnnnnnnnnnnnnnnnnnnnnnnnnnnnnnnnnnnnnnnnnnnnnnnnnnnnnnnnnnnnnnnnnnnnnnnnnnnnnnnnnnnnnnnnnnnnnnnnnnnnnnnnnnnnnnnnnnnnnnnnnnnnnnnnnnnnnnnnnnnnnnnnnnnnnnnnnnnnnnnnnnnnnnnnnnnnnnnnnnnnnnnnnnnnnnnnnnnnnnnnnnnnnnnnnnntttctccttcttcagtacctgggggtggctggacgagggactgcagaaggactgtggtgctgggaggcacagctctggatggcattgggacagtggttagcactacaggtttgggctgcagtggcggcttccgggtgggcagggctttgcctgaaggaaggtgagagaaaagaacaagaaatgtcaggaccaaaggcctctcactagggattccaagtgtcaggagactccattacctgaggagccatcaagggatgggcccatgctgatctggacagctccaagtgagggggctgggacatcccacaggaggcatcctgaaggggacagggactctgtcttcacttccaggacctcctctcctataaaagcctatgtggggcattccagagatacattagtcaggaagagtgtcgaggagaaggagctgaagaagggaaagctctcatacctctaggtcaggaggaactcactggaaaacctggaggaaggaaggaaggtggtgctcacctggctggaggagtcggctgagagcagggaggcctcagagttgacggaagaacatggagagacaggttctatcttggtctggacatctgtgggaggcaggatgaggcaaaagctggatatcatgtaaacactgaagggttaagagggttaagatgggnnnnnnnnnnnnnnnnnnnnnnnnnnnnnnnnnnnnnnnnnnnnnnnnnnnnnnnnnnnnnnnnnnnnnnnnnnnnnnnnnnnnnnnnnnnnnnnnnnnnnnnnnnnnnnnnnnnnnnnnnnnnnnnnnnnnnnnnnnnnnnnnnnnnnnnnnnnnnnnnnnnnnnnnnnnnnnnnnnnnnnnnnnnnnnnnnnnnnnnnnnnnnnnnnnnnnnnnnnnnnnnnnnnnnnnnnnnnnnnnnnnnnnnnnnnnnnnnnnnnnnnnnnnnnnnnnnnnnnnnnnnnnnnnnnnnnnnngagggttaagatggggaaatgggtcctttctctttgaacctgaaaataaaactcttctggccctagattacaggccatccaggaggggcagtcacagagctgctcacctgctggctctccgccccgcttttcgcctagtgcttccctttctcctttagtggctcctctgatttttctcatccctgctccatgttcctcaaagctgtctttgcccttctgcgtttccctctttcttgttcacagaacttgtctattcacatagaataggcctgagcaggggaagtggcaggggggtctccagcattcacatggcccaaattcctatcttgctggatttccaccttatccctgcccaatgcatctccatgctgacaaccgccaagtgtgcatctccccctggctgctcacctgcaccagattctgacttccaagctgcctgctggtcccttccattctcatgcctcaccagtcacccaaatctaactggccataaatgaggcttcctgattgccccgtcacacaagttttcctcccaggcaccaaacagcaaagcctcagtcacctctgagcctccatggcctccaataaatctgcctttatgacttgttgatcactccatgaaagaaaatgctaggccccatgtcggtgaaataaaacccttctgagggccagattcagcccacaggtcaacagtccaccactacctctggtccataccgttcactttggtacttaattatatgatcactaagattgctttttaaaacttcaatttatatttttgaatagataatacagtcatgatacaaatccaaacgaacaaaggaaaattaagtcnnnnnnnnnnnnnnnnnnnnnnnnnnnnnnnnnnnnnnnnnnnnnnnnnnnnnnnnnnnnnnnnnnnnnnnnnnnnnnnnnnnnnnnnnnnnnnnnnnnnnnnnnnnnnnnnnnnnnnnnnnnnnnnnnnnnnnnnnnnnnnnnnnnnnnnnnnnnnnnnnnnnnnnnnnnnnnnnnnnnnnnnnnnnnnnnnnnnnnnnnnnnnnnnnnnnnnnnnnnnnnnnnnnnnnnnnnnnnnnnnnnnnnnnnnnnnnnnnnnnnnnnnnnnnnnnnnnnnnnnnnnnnnnnnnnnnnnnnnnnnnnnnnnnnnnnncttcccttcccggtcctccagtcactcagattccctacacagagataaccactatcagaactatttaaccannnnnnnnnnnnnnnnnnnnnnnnnnnnnnnnnnnnnnnnnnnnnnnnnnncacnnnnnnnnnnnnnnnnnnnnnnnnnnnnnnnnnnnnnnnnnnnnnnnnnnnnnnnnnnnnnnnnnnnnnnnnnnnnnnnnnnnnnnnnnnnnnnnnnnnnnnnnnnnnnnnnnnnnnnnnnnnnnnnnnnnnnnnnnnnnnnnnnnnnnnnnnnnnnnnnnnnnnnnnnnnnnnnnnnnnnnnnnnnnnnnnnnnnnnnnnnnnnnnnnnnnnnnnnnnnnnnnnnnnnnnnnnnnnnnnnnnnnnnnnnnnnnnnnnnnnnnnnnnnnnnttaaccatgatgtattataaccctcacaaaactctccaaaagcaagaactatgtctcatgtccattgagggtaaagtacaggccctcaaaaaatacctaagtatggaggagaatctgactctaataacactatgcaatgcaaagccaccaacaatccttacaatccttttgctgctaatagcagtgnnnnnnnnnnnnnnnnnnnnnnnnnnnnnnnnnnnnnnnnnnnnnnnnnnnnnnnnnnnnnnnnnnnnnnnnnnnnnnnnnnnnnnnnnnnnnnnnnnnnnnnnnnnnnnnnnnnnnnnnnnnnnnnnnnnnnnnnnnnnnnnnnnnnnnnnnnnnnnnnnnnnnnnnnnnnnnnnnnnnnnnnnnnnnnnnnnnnnnnnnnnnnnnnnnnnnnnnnnnnnnnnnnnnnnnnnnnnnnnngctaatggtatttcaatccttattttgtgtatcttttttataacatgtattaatctgctagatataatctgtttgtccctccaaatccactttccatccctccctgctgtgctccctgagatccagggagaatctgaatggactgcatcagcgggctccctggttggagttcagccagtgagagatggtgccaggagatccagaaggtactttgaaatcaacaatcaacatgtcnnnnnnnnnnnnnnnnnnnnnnnnnnnnnnnnnnnnnnnnnnnnnnnnnnnnnnnnnnnnnnnnnnnnnnnnnnnnnnnnnnnnnnnnnnnnnntgaannnnnnnnnnnnnnnnnnnnnnnnnnnnnnnnnnnnnnnnnnnnnnnnnnnnnnnnnnnnnnnnnnnnnnnnnnnnnnnnnnnnnnnnnnnnnnnnnnnnnnnnnnnnnnnnnnnnnnnnnnnnnnnnnnnnnnnnnnnnnnnnnnnnnnnnnnnnnnnnnnnnnnnnnnnnnnnnnnataacaacaacaacaacagaatcaacatgtccaacgctgaattcatcatcttccctgaccagaaagcccctgcttttgcagtctccatccagtgaacagtaacatcacccacccacagccatcctagccacaaacctctttgactcctacctctctccaatgtccaggaggtcacaactcatctattccacttcattctttctcaagtctgctttcttcatgacatccgaacatcttacttgatcaactgcataagcttcttccttggttctcttgcctctggccctgcccctctgcaacccattctctactttgccactagaatcatcttcctaatcatattacttccctgcttaattctccaaaggcccccacctatccacaggataaaagctaagagccccttagcaggggccccacctggccctgtagcccctgcagttccacatcactccccaaatccttcttacatccactctgaagaaatgcagggtcctcagacacaagtcaacccccacactgtcctcctggctaatttctacgtgtcctttaaaactctcaggaaacccttcttccaggggcacatcccagattcagcgccaatgtggatgaaatgtcccctcttatgagctttcatggtaccctctagtgnnnnnnnnnnnnnnnnnnnnnnnnnnnnnnnnnnnnnnnnnnnnnnnnnnnnnnnnnnnnnnnnnnnnnnnnnnnnnnnnnnnnnnnnnnnnnnnnnnnnnnnnnnnnnnnnnnnnnnnnnnnnnnnnnnnnnnnnnnnnnnnnnnnnnnnnnnnnnnnnnnnnnnnnnnnnnnnnnnnnnnnnnnnnnnnnnnnnnnnnnnnnnnnnnnnnnnnnnnnnnnnnnnnnnnnnnnnnnnnnnnnnnnnnnnnnnnnnnnnnnnnnnnnnnnnnnnnnnnncacctctagtgatttctatcctagaatgaccacacctgtattgactggtacttgtctttctcccattaccaaatcacagggtttgaaagtcagcatggtggtcaggtcttgttcatctttgcattcccagcatgctgctcagtatctggcatggagtaggtgcttaataaatatttcttttttataattattatacctcagatatgatcacatcaataaacatttactaaatacacagctacgagtaaataaacttgggaacactttaaaaatagaacaaataatgttaattgtagaatctagtttagtatatggtgttctagcctttctgtatgtttaaaaatgtnnnnnnnnnnnnnnnnnnnnnnnnnnnnnnnnnnnnnnnnnnnnnnnnnnnnnnnnnnnnnnnnnnnnnnnnnnnnnnnnnnnnnnnnnnnnnnnnnnnnnnnnnnnnnnnnnnnnnnnnnnnnnnnnnnnnnnnnnnnnnnnnnnnnnnnnnnnnnnnnnnnnnnnnnnnnnnnnnnnnnnnnnnnnnnnnnnnnnnnnnnnnnnnnnnnnnnnnnnnnnnnnnnnnnnnnnnnnnnnnnnnnnnnnnnnnnnnnnnnnnnnnnnnnnnnnnnnnnnnnnnnnnnnnnnnnnnnnnnnnngtttataataaaatgttgggtggaggggaatcacacagatacatatgccctaaactgctcacaagtttttaaaaagtaagttgaatggcatgacagaatactaggaacaagaaaaagagagaaaaataatatccatctcctcagcactgcccttgctgtggttccctgaaatgtttcctctccttcctgccttccctcctggttttctgccatttcccctccccacctttttctccctgtcctgctgcctgcacttcccctccatctacacacatacacacacacacataacacattctcccgtagtagagccaaggattgggggcaggctgttttattacctgaggaatcatcagaggtggggataacattgatctggacggtttcaaatgaggatgttgggtcatctcccaggagacacagtgggggtgccaaggactctgtcttcacatggagcacctcccctaccccaagagcctgggtgagagttggtgtggggcagggggcagaaagaagggcaaaaaacaagggagatgttgacagtaagagcgagaacaaaagctttagaagtttagggcttacaagccatcaattatttgacattctggtctgaatggtactgaccatctttctaacctgttcattctttctactttatttctgggagaattgatgaagtctcatgacttcaaatatggcctcagagtggacaacttgggcaagaacagttccagaattctcagcagtcaataactctcttcttcccagccccacataactctttatattaaaaagacccaagannnnnnnnnnnnnnnnnnnnnnnnnnnnnnnnnnnnnnnnnnnnnnnnnnnnnnnnnnnnnnnnnnnnnnnnnnnnnnnnnnnnnnnnnnnnnnnnnnnnnnnnnnnnnnnnnnnnnnnnnnnnnnnnnnnnnnnnnnnnnnnnnnnnnnnnnnnnnnnnnnnnnnnnnnnnnnnnnnnnnnnnnnnnnnnnnnnnnnnnnnnnnnnnnnnnnnnnnnnnnnnnnnnnnnnnnnnnnnnnnnnnnnnnnnnnnnnnnnnnnnnnnnnnnnnnnnnnnnnnnnnnnnnnnnnnnnnnnnnnnnnnnnnnnnnnnnnnnnnntcttcactgctagataaccaaaggggatgtggaaaatgaagatattaaggaaacggcaaaggtagtggagaaggccccccacacctcacacacctcatgactcatagcacacaaatcatttaaatcatttctttgtcacccacgggtgaagggaatgaagcagagtccccgtcacagagagtaagagggatatggctctctcacctcgctggatggctctgtggagagacgcgatgactcggagctgagggaggaggaagagcagggggaagatggctcagacttcacctgaagatctggaggaaagggagttagaaattatcaggaagcagagcttaagaagagtccaaaaagtacccaaggacatgtcggtggggattcctgtaccgcagcaagggagaagaaacaaaaataggggattgaaggagagaggataggcacttatgtagaagcgtgaggatataggaagctacgtagtttctgggaaacagtgggaagatgagggtttctggaaatctgagggaacgacaaagactaccttacctgggaagatcggcaggagttcccatgggggctcagaggggctgacatccatccccacgtccagggagctgccgtcaaactaaataagggaggatacaagagggcaggagtgtgagaaaggatgagaaagtaggggtgactccagatgagttatggcctgtgaatgggtccaggttctgggctcactttccacccaccaagggttagagaaaggctggggacacaataccgggacatcctgctccgggcaacggaagagctgcgtctgctcctcggccacttcatctaggccagaatacaaggtgctgtctgcaagaaatgctgagcgtcggggggtcgttcggtggccccagcctacagatcgcacacaagcccccgccccatccctcattggctccgctcggccagacccaccgcccgcccacttgaaaagtgatacaaccagggcgcttcagcccctccttccccgaccccggaacaactcgacgttccagcagggagcagagttcttccctgacttttgtatcccccttaatgcacaacgagccccctgctccgctctccttcagatggcggattccgtatttgcccagacttcctctttaggcccccgcttctttcccgcgtgcctcagggacagtttgccacagccctctcccctccccggtgcctcactctgcagaccccagtcctccgggctaagcaggttgtcggtgaagaaacgcgtcgggtcagcaatctcgctgagcagcatcagctccgccatctttcccccccaccccccaaccaggagacggttcccaaggcccgcctctccccatcaccaactaatcagttgactctttcaaaaaagggggcgtcccggaagctctaccgaccagtaagagacctgggtgctgagcacgtgaatcaacagatgcggatgactgtgtaggcgggcccaatgggagcacagcagcaggaagtaacttccagacagtgccataccgccaagcgcatgcgccaaacaggctccagtgataaagcgcctgggagatgtagtacccagtattaaggtccaccatctcccccagccactactaagtttagtttagacagcttctatgtgtcctcggagatagataagcccctcaaaaggggcgcactgtgaccactgctacctcccctaggaagccaaaagctgagaatgggatatgggctgaaaccttccctctggccccccacccccaaatctcacagcacagaccacaattcacaagttcctgtctcttttaaggtttaacttttaatcagccaaacatcttgcgcagaccctgagccagccctgcatcctggttcttcccctgaatgaccaccttccccagttcctcctgggctgcccggtttttgggatctatcgccagcaccttcttgaggtcagcagttgctttttccaggttcccaagggcagcctgggcaaccccccttcggtataaggcctttaaatggccaggctcccgctccaacacccggtcacagctctgggctgccaactgaggctgccctagcaacaactgacaggcagccagattggcatgaaggacagttcgttctggagggccaggtgggggtaaagtcaggagcagccgaagagcccgtccatagcatcgggcagctccttcagggttcccagctcgaaatagttctgtgccccttgcacgttcttccctggccagggcttccttctcgctagtctccagctcccaggagtctcggccttgagtgaaggatgccagtgtgagcctgacaggaggtccagagtgcccaggcagctgaagctctgcttcctcaccttgacacatggactccaagcatttctctatgagctccccccaagtttcctccctccatggccctacgcccatagttagctctgtccagccctctggcggccctgatccgaaaggaaaccccaaagccagtacccggcagcaggagcctagtttgggtttgtccaagccatggccacggattacgatcttcttgacaaagctcccatcggggcagtaccagagatcagaagcttgaagggcctctggcatctgactggttgatccatgagacttatgagagtctccttcaagttcagcaaccagtttttcagctccttgagtatgctctagaatttggctggctggatctgggcttacttccagctcaagcgtttcggtaggagggtctcggggctgctgcctaatctgaataactgaatcaaggttctcccgaaggttcttttcccactcttgttgcggctgagaggtgtccttttctccaattgtattgactggtggcgtctccatatggatgcttagtcccttccacggtgagtgaacagttttggtcagaaagggatgaaccaggttcaggtcagcacctgaaaagaaaaccaaacaatgctaatagcagggttcttatttagactcctttctcgtcctttcccattcttctgagacccaggcccctagtcctgaaagtccccagttttgctttcctccaaaaatctgctccagcttccccgttccacccacatataatttagaactataaattccacaattccctgcggttaaggtagccgcgccaactacggacacccggtcgggtcaataagtacctgcgcggccaaagtgcctggcatggtgacaggaggagccgggccattcgaatcacctctccttccaaagctaaatggctactgaatgctgccctcggagccttgccccacgcggagagggcagccggagaggggcgcggtgcgggaggcgggggtagggggcggaacaactgggaaagatactgacaactaaccctggagcccgcgagactccgaatctagtcaaattcctggcagccaatcgggagaagggaggaatctggttagcccgcctattgaacgtgacatcatttcctccgcaaccatgaagctccaggccttagcaactgaactaggccagagcaaccgaactaggcagaatcgaacagaatttggcgcggtcgggctggccaggctgctcaagagtcaaagt

SEQ ID NO: 11500 - DNA, 346 bp, Homo sapiens
ggacatgaatactacctccatgtcagcatagggtttacattttaaatggctgcatagaattctcttacatgttaacgaaaaggaaaactgagagatggcttggctatatttttattttaaattgcatttttttctttctcagacctcttagggatgaattgccatattctctatcctttttcctctcagataaagttgtaagtaaaatcttgctgtaaatgtagacgagataaatctgttcttctttccactcttcctcattgtcactctagcctccaaattctgcagtcacttctggttggtaggtaattcatacaatcctgccattattttttattttttattt

SEQ ID NO: 11501 - DNA, 358 bp, Homo sapiens
gcccccgccgcgccctcagatggagaaattagcatacaaagaaactgacttgtcagaagtcagagcaaggtattggtggatccagggataaatcccaaacttcttaacccctagaccggtttttagtccattgactatgcagcctaatggtaagtatctttttaccctatcgtggaggtaagagggattaagagacctagcaaggactggctttaaggaattcctcacgaataattagactactcgttatccttttctttatagccatgatgtcatttttgtcattggcatgaattttccagattgggagaggaggtctgaagttttgctttttaaatacttaaaaatatttctcggt

SEQ ID NO: 11502 - DNA, 474 bp, Homo sapiens
  misc_feature (1)...(474): n = a,t,c or g
tttttttttttttttttattttacttacaagctctggttttaagtaagaacatgctctactgggtaaacatgccttgaacttttaggccattttacaacaccatggggagaaccgctgggggttttacacataaaaccctcttcagagatgatgtgcggggagaagaggagaaacatttatatgaggaaaggaagaacgtgcaaaggagcgagagtccggcgggaaattccgaagttcacttactgcctgcttttgctcttcctccttcagcaacttcatcagctcttccagctggaccatcagctcccgcctgctctcctgcagggccgacatcctctgctccagttcatccttcctttgcctcagcagccgcaggttcccacagcagcgtggggttctgctgtgccttctcangggtgggctgggaggcctgctcgtgttccaggcggagacgctgaatctcctgnaggatc

SEQ ID NO: 11503 - DNA, 850 bp, Homo sapiens
  misc_feature (1)...(850): n = a,t,c or g
acctgacaaactcatttaatccttaatctgttttacaaaaacagaagaggtacagaaaagttaaggacttaacgggaggtggtaaagctgtggttggaactggttttctgtactcaactgctagatgcttctagatccaatgtcagaacatggagtagtaaagctgtaggtctggaaataggccccagtcctgtgcatgttcagatgctcatctccacattcacttgggttcagaaactcactgggggcaagtcagaactgtggtgagggcccaaaccctcatctctatccttgactccactgaggggctcttctttacgaggtgggggatcagcaaagccaactgcgggggtgaggaagttggcttccagtgaagatgtgctggacaccggaggtgggtactggtactcatggacacttgctggattgatctctgccagtgtctgtacagctgcatctcttgcattcaccagccgcagaaagagctcagcctgacctgcctgaggaatcccattcagctcccaaggctaaggctggggtccagaggaagggcccgaagtgggaggcccagcggccacttagcacccgctgatcttggtcaaatagtccaagtgagaccccacanctttggctgtggtgccctagcccatgctagcccctgccagacctgcagctcacagaccaaagatactgatgatgagggtggtagtctnctgcggctgngaccgctgcagctccagtgcagacgcctccacctgcaaactncatatctggcccagcnaacngggtcccggcccccgtctcgaatgtaggcctcccgcagcgcccggatttcggcagccagagttcc

SEQ ID NO: 11504 - DNA, 403 bp, Homo sapiens
  misc_feature (1)...(403): n = a,t,c or g
gcaaagaattcacagttaaatatgtaccacataacacagcaacaatctgtataaagcaggaatctatatgaagtataagaagaaataaaaaactaaaattaggggactttgacacttagcacaagatgtagtgggtaaaaaaggatataaaagatctaaataatataatgtgaatcttcaagtatatccctaataatcaagaatatactgcttccccccacccccaactctgtctcccgggctgcagtacagtgggcatgatcacgggctcactgcagccttgacctcccctgcctcagggtgatcctncccacctcagccttcccgagtaggctngaggacccgcgggngccacacccaccctggcccaggttantttttttttttnttttttgctttttgt

SEQ ID NO: 11505 - DNA, 446 bp, Homo sapiens
  misc_feature (1)...(446): n = a,t,c or g
gcgtgaactgtgggtagtgatgtcagtgaaaaatggagaccaccagcacaatccaggctgttgtagcacatacagccttttcaccattttagtctagtcagaaaattagagacctttatagttcaaatagctactagtatgataatagtgatacaattttcagtgtgtgactcctacaactcctctcgctctactgtgcatttgaatagttgagtagcatttttaggaaagtcctcactattttactttgcatgattttctgatcaaggcagccaaaagcacagtaaatgacagagcagaaatcttgatctgggaaagggagatttgggaacatatcttctgggaggaagtgtcttctaggatgctaattaacagggcaaaaacgtaataaagactaattttgtagagtattggtgccttacgntggtgccagtgtggctcagtaa

SEQ ID NO: 11506 - DNA, 622 bp, Homo sapiens
aagtagaagtattagagtatcttgatgcagtaacttatagttgtgatcctgcacctggaccagatccattttcacttattggagagagcacgatttattgtggtgacaattcagtgtggagtcgtgctgctccagagtgtaaagtggtcaaatgtcgatttccagtagtcgaaaatggaaaacagatatcaggatttggaaaaaaattttactacaaagcaacagttatgtttgaatgcgataagggtttttacctcgatggcagcgacacaattgtctgtgacagtaacagtacttgggatcccccagttccaaagtgtcttaaaggtacaaaggttatcttttttctgtcttggtttgttattgttgttgctgttcattttagactttatttctttgatattaactatcagtcatacaaaataactgaaaagaaacaattttagtatttaactctgtcttgtattcatttctatgccagatgaatgacacgaaattcacataaaattctgctgttgtgattttttgtgcttttccagggttcttagcacgttatgtacattgcatgggtatatgcttttaatatttttatgtataaaaagtgaattacaacaactttttg

SEQ ID NO: 11507 - DNA, 3233 bp, Homo sapiens
gcccacctgtcctgcagcactggatgctttgtgagttggggattgttgcgtcccatatctggacccagaagggacttccctgctcggctggctctcggtttctctgctttcctccggagaaataacagcgtcttccgcgccgcgcatggagcctcccggccgccgcgagtgtccctttccttcctggcgctttcctgggttgcttctggcggccatggtgttgctgctgtactccttctccgatgcctgtgaggagccaccaacatttgaagctatggagctcattggtaaaccaaaaccctactatgagattggtgaacgagtagattataagtgtaaaaaaggatacttctatatacctcctcttgccacccatactatttgtgatcggaatcatacatggctacctgtctcagatgacgcctgttatagagaaacatgtccatatatacgggatcctttaaatggccaagcagtccctgcaaatgggacttacgagtttggttatcagatgcactttatttgtaatgagggttattacttaattggtgaagaaattctatattgtgaacttaaaggatcagtagcaatttggagcggtaagcccccaatatgtgaaaaggttttgtgtacaccacctccaaaaataaaaaatggaaaacacacctttagtgaagtagaagtatttggagtatcttgatgcagtaacttatagttgtgatcctgcacctggaccagatccattttcacttattggagagagcacgatttattgtggtgacaattcagtgtggagtcgtgctgctccagagtgtaaagtggtcaaatgtcgatttccagtagtcgaaaatggaaaacagatatcaggatttggaaaaaaattttactacaaagcaacagttatgtttgaatgcgataagggtttttacctcgatggcagcgacacaattgtctgtgacagtaacagtacttgggatcccccagttccaaagtgtcttaaagtgtcgacttcttccactacaaaatctccagcgtccagtgcctcaggtcctaggcctacttacaagcctccagtctcaaattatccaggatatcctaaacctgaggaaggaatacttgacagtttggatgtttgggtcattgctgtgattgttattgccatagttgttggagttgcagtaatttgtgttgtcccgtacagatatcttcaaaggaggaagaagaaagggaaagcagatgggtggaactgaatatgccacttaccagacctaaatccaaccactccagcaggaccaggagaggctgaatagattccacaacctggtttgccagttcatcttttgactctattaaaatcttcaatagttgttattctgtagtttcactctcatgagtgcaactgtgggcttagctaatattgcaatgtggcttgaatgtaggtagcatcctttgatgcttctttgaaacttgtatgaatttgggtatgaacagattgcctgctttcccttaaataacacttagatttattggaccagtcagcacagcatgcctggttgtattaaagcagggatatgctgtattttataaaattggcaaaattagagaaatatagttcacaatgaaattatattttctttgtaaagaaagtggcttgaaatcttttttgttcaaagattaatgccaactcttaagattattctttcaccaactatagaatgtattttatatatcgttcattgtaaaaagcccttaaaaatatgtgtatactactttggctcttgtgcataaaaacaagaacactgaaaattgggaatatgcacaaacttggcttctttaaccaagaatattattggaaaattctctaaaagttaatagggtaaattctctattttttgtaatgtgttcggtgatttcagaaagctagaaagtgtatgtgtggcatttgttttcactttttaaaacatccctaactgatcgaatatatcagtaatttcagaatcagatgcatcctttcataagaagtgagaggactctgacagccataacaggagtgccacttcatggtgcgaagtgaacactgtagtcttgttgttttcccaaagagaactccgtatgttctcttagggttgagtaacccactctgaattctggttacatgtgtttttctctccctccttaaataaagagaggggttaaacatgccctctaaaagtaggtggttttgaagagaataaattcatcagataacctcaagtcacatgagaatcttagtccatttacattgccttggctagtaaaagccatctatgtatatgtcttacctcatctcctaaaaggcagagtacaaagtaagccatgtatctcaggaaggtaacttcattttgtctatttgctgttgattgtaccaagggatggaagaagtaaatatagctcaggtagcactttatactcaggcagatctcagccctctactgagtcccttagccaagcagtttctttcaaagaagccagcaggcgaaaagcagggactgccactgcatttcatatcacactgttaaaagttgtgttttgaaattttatgtttagttgcacaaattgggccaaagaaacattgccttgaggaagatatgattggaaaatcaagagtgtagaagaataaatactgttttactgtccaaagacatgtttatagtgctctgtaaatgttcctttcctttgtagtctctggcaagatgctttaggaagataaaagtttgaggagaacaaacaggaattctgaattaagcacagagttgaagtttatacccgtttcacatgctttcaagaatgtcgcaattactaagaagcagataatggtgtttttagagaacctaattgaagtatattcacccaaatactttaatgtattaaataatcattatacaatatacttgtataggcagtttctgccttcacatttgatttttccaaatgtaatacttatattagagatctatatatgtataaatatgtattctgtcaaatttgttacttaaatttatagagaccagttttctctggaagtttgttaaatgacagaagcgtatatgaattcaagaaaatttaagctgcaaaaatgtatttgctataaaatgagaagtctcactgatagaggttctttattgctcattttttaaaaaatggactcttgaaatctgttaaaataaaattgtacatttggagatgtttacact

SEQ ID NO: 11508 - DNA, 451 bp, Homo sapiens
gggctcttcagcccatgcagccctcttatttgtgctactagtaaaataatgataatgctattgaatagctggattgttgaccctctggctaatatgatttgatggattttattatatggcattttaatcaaaggataagcttgtctcatttgaaatacatagaaaacctgaaaaagggacagtttaaaggtagcaatcaagtcaaaatagttttcttcttctggaatgtgataaatgtatttagtgagaggtatcttggagagcgtgattttaccacttactcatttgacaaattgctgagcttaggggccaagtcctgtaatatttccctgttgcttcaaggcaggtatactggaaaaaaatcagttattaaatatttgccatatttcctaaataacctattcattctttgcctgaaaacagcagtttttatggcagcatatgtggtaaa

SEQ ID NO: 11509 - DNA, 696 bp, Homo sapiens
gtcttgatctcctaacctcgtgaatccgccggctcagcctcccaaaagtacttgagattacaggcggggagccaccgcgcccagcatcctactgattcaagagaccacagtgaaaggtctgtaaagaagtcacatgaagtgatttcagagttgaggatgaaaagtcataaaatgtaaagtagcctttttcaaaaaaccccatataattaggttttttaattgcctgaatataactgaccatttccacatgcccttggaccttcgacatgcatcgcgtcatgagattcaacgtatttggagctgtgacttttctgcagcatgcagtatcataaatattggagaactagagactgaattatcgcttgtgtaaatcttatcatgttccatagtaatggtccttgaataatagcctcagcatacataatccatctgtatggtttcatccaagatgtatgttttgatatctagtcatttggcaggcctcaagagacctgattcacatacattgctatgatttctctttagtatggaatctctgatgttgattaatgctagaacttagcatgaagagtttgccatactcagtttgtaagaactctctcatgaatgaattatctcatgctgtgcaaggtgtgaattattactaaagatcttaccacacacatttcatctgtacggtttctctccagtatggat

SEQ ID NO: 11510 - DNA, 174 bp, Homo sapiens
tcgacggggcacaacagaccctctacgtgccaagattcctgctgtttcctaggggagccctcaacaaaattacattgctggaactagaagatgtacctctccagccccaagtccaatttttggataagcctatcctcaatagcactagtactttgcacaggacacatataattc

SEQ ID NO: 11511 - DNA, 391 bp, Homo sapiens
tttgccggatgcttaccaaacgccagatactgtgcgtgttgtatcatttaatcttccccatctctgtgagggtagacgttatctccactttgcagatcagaaaagtgggactcagagaaatgagaccctttcccaagcagctcagacaggaaggtgttgtgggcaggtcctcccaggtcttacccagcagtactcactagcgctccgtctgttctgagcccctccttcctggtcctatgaaggtctctctcctctcagtagcaggccccacattcagctcacttgctctgtctcctgccatctgcttcacagctcaagacccctgggccccctgcttagcttaaccctggtctgtccctttctgacttggccgtgagatgtctatgttctc

SEQ ID NO: 11512 - DNA, 631 bp, Homo sapiens
  misc_feature (1)...(631): n = a,t,c or g
gattcggaacgagggatcagggtcggtgtaacccgagagaactgcaagtaccttcaccctcctccacacttaaaaacgcagctggagattaatgggcggaacaatctgattcaacagaagactgccgcagccatgttcgcccagcagatgcagcttatgctccaaaacgctcaaatgtcatcacttggttcttttcctatgactccatcaattccagctaatcctcccatggctttcaatccttacataccacatcctgggatgggcctcgttcctgcagaacttgtaccaaatacacctgttctgattcctggaaacccacctcttgcaatgccaggagctgttggcccaaaactgatgcgttcagataaactggaggtttgccgagaatttcagcgtggaaattgtacccgtggggagaatgattgccgctatggttcaccctactgatgcttccatgattgaaggcgagtgataatactgtgacaatctgcatgggttacatcaaaggtcggatgctcgcggggaggaaatgncaagtaatttncatccttcctggcacaattggcaaggccaggattcaagggcaggttcatcantcaggatggaaccntttcaagttggccntttg

SEQ ID NO: 11513 - DNA, 378 bp, Homo sapiens
  misc_feature (1)...(378): n = a,t,c or g
ggtctggaacacagatttactcaagatctgtacataaacccttctctgaattaagatactgtgttacttctttatggctttactaattatattgctagcagcaatagttagccattgctaagcttaaaatatatattgatatactttgttttcctgatatacttcagacctgtttgttcgtgtacttgtgttgaaatcaattgtttttaatcaatggctttgtgacctcaagttcacttgtgacaagtatgtgtcctctgtttgcatgttgacttctaagacttacctggaagtaaatgtgggcactctctctctcttcaggacacaactcacangcctaacctgttnattttttaccncaatattgaaggaaacctt

SEQ ID NO: 11514 - DNA, 522 bp, Homo sapiens
gacagtgacagcgtccttttctagagatatttagcctgttattacaaactgtgaagacaaagaattttatacttttactaatgtttgtggttttaaacagttattttcattctaatcagttctctaccctctaatttctactaaagctgtaaatacatttagaaattatatttgtaaatacagtatatggagacaagttaattttttggtcagtgggaaaaagcctcccaaccaattgggccctgccttggcagttgagttttttgttggtgttgttgttgttttagtttagtttttttttttaaacagcagaaaggatactgtcgggttcactgttgagcagaatatactgtagaacgaaaatgataatttttaaatcttccagagcatgagtaaatgtcttttctaatggatagccaaatattaaccaactctttgtttttgcccttaggcccagaccatataggacccgcgtattttgtgtgtgggtttgtttttatttttgttccttacagcccggac

SEQ ID NO: 11515 - DNA, 242 bp, Homo sapiens
atcatttctatcagcactctcaccatagcttccctgctcaatggcctatggtatttcccatggtctgacacagaaacttccaattctgcctgataagactgatccaaccatatttttgacatcaatctaccacacaccctgtgttctcactgggcagagaacatcaatatgtataagagaacccatacaaatataatttgttgtttttaagttatagaaatgtcatgttgttttcttttctc

SEQ ID NO: 11516 - DNA, 98 bp, Homo sapiens
gttgattaatttttatgttgattagaaatagctaatattttcactcgttttgcagaagagagaaaattccattgatgattcttcaataataagaatag

SEQ ID NO: 11517 - DNA, 533 bp, Homo sapiens
gcggccgcatacacccggcacctgcagtccaacctcctgcaggtggacagtgagttcacagaggaagagattgagttcctggaagccaggggtcaccacgtggagaaagtagatgtcttatcctgggtccatggcagccgaaggaccaacaacttcatcatcgctgttaaggaccctcggagcccagatgcagctggagccaccatcctgtagagcagcggggtggggcggggtctctgctcccccactttgcatgttcccagagtccctccttctcccagggtttggtctcagggggaccccagggatgccccagatcaggggccagaggggatgctttagcaaacccaatcccagagtaactggaaaattctccatcaggaggcctgtggtggtggtggtggtggtggtggtgagtgtcagcatctacagtacagccaggcaggcaggaccttgaggaatcagactatctgtctgtgtgtcacctctcctccttcagccatgctggccccgagcttaaggatgtgcttgca

SEQ ID NO: 11518 - DNA, 1444 bp, Homo sapiens
tcttgccttggatctgagaaaggctaccagtgtgaatgtccccggggcctggtgctgtctgaggataaccacacttgccaagtccctgtgttgtgcaaatcaaatgccattgaagtgaacatccccagggagctggttggtggcctggagctcttcctgaccaacacctcctgccgaggagtgtccaacggcacccatgtcaacatcctcttctctctcaagacatgtggtacagtggtcgatgtggtgaatgacaagattgtggccagcaacctcgtgacaggtctacccaagcagaccccggggagcagcggggacttcatcatccgaaccagcaagctgctgattcccggtgacctgcgagtttccacgcctgttacaccatttctgaaggataccgttcccaaccttcgaaactccccactggaaatcatgagccgaaatcatgggatcttcccattcactctggagatcttcaaggacaatgagtttgaagagccttaccgggaagctctgcccaccctcaagcttcgtgactccctctactttggcattgagcccgtggtgcacgtgagcggcttggaaagcttggtggagagctgctttgccacccccacctccaagatcgacgaggtcctgaaatactacctcatccgggatggctgtgtttcagatgactcggtaaagcagtacacatcccgggatcacctaggcaaagcacttccaggtccctgtcttcaagtttgtgggcaaagaccacaaggaagtgtttctgcactgccgggttcttgtctgtggagtgttggacgagcgttcccgctgtgcccagggttgccaccggcgaatgcgtcgtggggcaggaggagaggactcagccggtctacagggccagacgctaacaggcggcccgatccgcatcgactgggaggactagttcgtagccatacctcgagtccctgcattggacggctctgctctttggagcttctccccccaccgccctctaagaacatctgccaacagctgggttcagacttcacactgtgagttcagactcccagcaccaactcactctgattctggtccattcagtgggcacaggtcacagcactgctgaacaatgtggcctgggtggggtttcatctttctagggttgaaaactaaactgtccacccagaaagacactcaccccatttccctcatttctttccctacacttaaatacctcgtgtatggtgcaatcagaccacaaaatcagaagctgggtataatatttcaagttacaaaccctagaaaaattaaacagttactgaaattatgacttaaatacccaatgactccttaaatatgtaaattatagttataccttgaaatttcaattcaaatgcagactaattatagggaatttggaagtgtatcaataaaacagtatttaattttaaaa

SEQ ID NO: 11519 - DNA, 352 bp, Homo sapiens
gaatgatatagaaatctgtgacacaaaataactctcctataatcccactttaaccactgttacaaatttggtgcatattcctgaaagatccttatatagtgaggaatttttaccattgcttatcaaatatgttgtaaatatattgcctaacttttaattttacccttaacattttttctattattttaatagttaatacatgtacctaatacaattcaaaatataaaagattatgcaatataaagtaaatttttaaaaatttaggttgactttatcattatagaaaaatctaggaaaaaacaaggaaggaaaaagaaatcattctcaactcaccattcagaaacagcatttt

SEQ ID NO: 11520 - DNA, 432 bp, Homo sapiens
gagatagctaaatgctaagaggagagtgtagtttgtaattgagtagctttatcctcctggagatttttaagctgtatcctataatatactcttggtcaggttgggtagtatgattcaaggcacttggaaccgtcttggggaatatagcttggtaattgaactgcttaagcttattattaatatttaagctatagttccaggcccattccagaggtcccccagccaatgcacttcataaaagggaagatatatcttaatataccaggtttgtatctcatgctaccattgtagcatccaaaaaaatagacatttaaatcatgggctaataacaaattttaggaatgaaatagtttgggtaatttttgtgatttttaaacttttctttttgtgtgtgtgtatatggcagccatggaaaactactggatgtaattt

SEQ ID NO: 11521 - DNA, 219 bp, Homo sapiens
  misc_feature (1)...(219): n = a,t,c or g
ataatcaagagggaaagatattgtgaatctccttaaaaactcaaagcttactggattgatgttgatgtactcttactaaaatcttaactaagtcnnnnnnnnnnnnnnnnnnnnnnnnnnnnnnnnnnnnnnnnnnnnnnnnnnnnnnnnnnnnnnnnnnnnnnnnnnnnnnnnnnnnnnnngcagtgtggcgaaaccctgcctctacaaaaatgtttt

SEQ ID NO: 11522 - DNA, 155 bp, Homo sapiens
gggcatcaccctgctcactctcagtgacacagaggactccttgcattttttgctgctcttccgagggctgctggaacccaggagtgggggactaacccaggttcccttgaggctccagattctacaccaggggcagctactgcgagaacttcagg

SEQ ID NO: 11523 - DNA, 358 bp, Homo sapiens
gtgaagccatgtctgaacaaggcaataacatcccctcttattccaaagtgcctctcttgtaaaactcaaacttatcaagaggctttggattcctctctcagttccttgtcttaacaggggaatacatcccatgtctaaccagaatgtttgttgcttctggagtcaaacatatgcgcctcctaggcacagccattaacgtgggtgtttcttggatggctcagacaaccagagtttggattttaatggctcttttcacctctcttctccctgagggccatctatctagggaggaaatctcacctatgtatggaggagggcaggaaaaagggaggaaatacttgaaaataattggcatttt

SEQ ID NO: 11524 - DNA, 243 bp, Homo sapiens
gcggcacgagcccttatataaaaagaagtaatgtcaaagtttgatgagctttacattggaaactcaaaagcttgcactctcattttggctcggatgccaatttgctgggtgcccctgtggtgagtcatgaaacctccttgggccgcaatttcatcatctctaaaaacagaaattatcatacaacctacctcctgggaggtgctgcacaagaagcagctgatggaagtttcaaaatccaatttg

SEQ ID NO: 11525 - DNA, 339 bp, Homo sapiens
ggacggtaagatagtctaaatattcaggaaaactccaagtatagctctcctaaaaatgatatgttgcgtgttaaaaaaaagaaaaaaaagaaaagaagaagggggaggaaaaaataaaatgaaaaaaacttcaaaaatgcacggctgagttggtagcaaagaaggaaattctttggaggccaaaaagatctagaaagtttaaatccaaaagagtaagcaagtgcaggagctggcattgcctagctaatccctcatgattgagaacctcagattatagacactcatggggaccaagagataaggcctggggcctcaaaaaggccagagcagaggtcggat

SEQ ID NO: 11526 - DNA, 760 bp, Homo sapiens
cttcatattttttttttttttttttttttgtgtgtttgttaagtcatattgaaatatgtatctgtattaagttatagcaggatatttagttctcctgtattactactgaggtatatttgttcacatttatttatactgaaagacactaatgttcaaaagttagaataaatacaaaaatgcatcttgtactttgctgttttaaccacttgataccttaggtgtacatcttcctttatgataacaaataccaggccacagactgattcagctttagtctataatactgtaacactcaaatgggtttcaaaatataaacatctctgctcttggatagtttttttgggggggattatccttcaatacataacagatgcaagtatgtgcaactgggtggtaggagggaattatttttattatgaaaagggatggatccttttcaaaaagggacagatcatatttattaaaaataattcccttaaaaactttagatcttgggccacatttcacaaaaattttggaatgatattaaacagtctttcctctttttaacagctggatactaaaagtcacccaatttaatagcctttaaggcaataatatggaatcaagtctcaaattggatgcaatattctgctgcagattacttgttgtctaagtgcatcaattcactggttgggcagtccataaaaaagaatttaagctaactcaaatatttgggaggaaaaaaaagaagagagagactaaagcatgtcaaacttgc

SEQ ID NO: 11527 - DNA, 2862 bp, Homo sapiens
attgaatagtcactgtttactgagtctagaggagggaggtagaatcagttcagtacaagagtttagtctgaggtttgattggaagcccatcctacaatagtgactgctcctgaaacccacctaccaagccgccagaccctgcttgctgcacagcagaacattgagaaaccatgtttgttgcactatagagaaaccacatctccttccaccctccccctggactgtgtcctttgatacatggagacaggtaacagctactgggattatctgggctccttcactggggccatgggaaattcacaaagttcatagaccctctcacacctcagagaaagccaacagctaaagaacagatgtccacgagagagacgtctagaaggctgaacgagcagtgatggggggtcagaacaggaagacctagggctgctggcagggtgggtatttggaaggaggcggtgaagacccaagactaggatgacaggaaatgggttcggcatgttgtggcctctccgcctgtctactgaggaagttcaagggtttctcctcaggacagcggtgggagaggggtgaggaaagacctaaggaaataaggacctcagaagaccccctcaaattcagaacaaaggatttccggtccaaatatgttctgtatgttttctcctcttgagctacaactcagcaaccacaccagggcccccagacaaaccacacatggctcacttaaggtagaaaccaaaacctgctttataaggctgcgtggccaccactggcttctctgctgagatatgaggtgccagccaggcagacaggtgacagagggtgacccttcctcaccttctccccatcactaccatccctccggccctacaaatacccatctctataatgcaaccacttcaaaaaatactctgaggagggacagggtgaaaggggtagggggtcagactggtctgaaccagcaggctgggttcccgtgaggtaggctgatgcccatgctcctggggcagaggcttttggagagaggccagttatggggctcacagccaggagggagtcactgattgactggaaagtggaggaagcagaaagtcttgaagtctgcccagagcacttgatcacaggtaacgtctgggtagaaaggctgggcctctttgctggtgtcctcactgtcctttgaggaactgggtttctggggataaggggaaaggcccagcttgagtcttcttggatttgggcgtggtcccgtcttcagagagtagtaggctaacctcacaggagctttgttttcccagcttgctagtctctgatttgctgaaggcattgagtatcacgtcatcctttgagatagtcagaagtgatgtcgggagagaccacactggagcagaatcagagacaactcccatgtggaaccctttgtagcaccaactccggagcagatctactcctttaagcttgttgccatggtatttctgttcccattgggtggtgagaatgttgaaatatcgtggctgctcaaaaaagcggagatagcgagaggagatatgagaaggaaaaattcgttcaaactgaccacggcgagaaaactcatcttccatctcaaccagaatccgaacatcatctggtgtcaggacatccagcacagatgcatagaagtcctgatcaggaattttctgggtcagataataggctttcttcatcttctgtgcagtgacatgctctggagccattcgacatttgtccccaggggaggtgggcaggctggtggtggagctgctgcagctgctggggctggaaatgatatcctctgcattgggcaggacaaaacctgccagattcagaaggtcacgaatcatctggcctttgatgctgatatccagtggagagctggagtggaggcttggggaaatgttgacttccaggacccagggcttgaggttttcgtctagcatgatgtcaaaaccaaagagttcatggcagctatagggccgtcgcacatacatcttgagcaggctggtcacatagggctctgacgagatgatagttttgacaacaacatcctttatcttctcccagatggcgtcgctattgactcccttctggctcaggtagttccacaaagccttcagtgcccatttgtggccctggcaagccatttcatctgcattggcctggtactcggcattctttttattgacactgtagttggtcaggtgcatgaacttattgccaaggctcttcatggaaggcgaatacttgcaactggcaaagcggaccagtccatctgaaaagaggtaaatccgcagaggatcgtaggaagtgacataaacatagatccgcaggtcaaaccttctgccgctgatgaggtagggtttgtgtagatacctctgtaccaggaggggccttcgcttggggagctgactccacttgtgaataacctggatgccaatgcctcgagctgatgctggtggcttcacaatccacttttggcggctgctgctctcccacgctttgcgcaggagcttggcgtcctggggcaggataaaggactgggggaagaaactgaactccttcttgccaaagcggctctgcatacgtgacaggttccgccatagccggtccttcctcccaatctggaatgagcctgggaaatggtttagctacaaaagggaaaagggtgagtgcaggaagagggcagaggtgaggccatgaggaagatgacaagactcattctaccattccaacttctttagcagcactccaagcttttgttccatcttactatcaccaccctaatggtcctcaagtatccaactgcagacactcaccaaaagatgattaaaacacagacaaaacagagtaatg

SEQ ID NO: 11528 - DNA, 102 bp, Homo sapiens
ggttgggatgtacattgatacaacctttatgatggcaatttgacaatatttattaaaataaaaaatggttattcccttcaaaaaaaaaaaaaaaaaaaaaaa

SEQ ID NO: 11529 - DNA, 527 bp, Homo sapiens
  misc_feature (1)...(527): n = a,t,c or g
ggcatatttcatctacccctgctgcaacaactcttcctgttatgatcaaaactgagcccacaagtcctactccctcggccttcaaaggtccatctcattctgggaatccctctcatggcactttaggtttgtcagggacattgggccgtgcatatacttcaacatccgtgcccatcagtttatctgcttgccttaatcctgcattgtcaggtctctccagcttgagtactcctttaaatggttcaaatcctctttcctctatttcccttccaccacatggttcctccactcccattgcaccagtattcactgctcttccttcttttacttctttgaccaacaattttcctttaactggcaacccatctcttaatccgtcagtatctctcccagggtcattaatagccacctcatctaccgctgccacctccacatctctccctcatcctagctcaacggcagctgttctctcaggggctttctgcttcagaaccagtctcagcagcacttttcccctcaanctgtcc

SEQ ID NO: 11530 - DNA, 2196 bp, Homo sapiens
  misc_feature (1)...(2196): n = a,t,c or g
ttaagaagtggcatactgctctttctccctttggataatttcttttaagcccatcaaaggaaaaaacaaacacaattcaaacaaacactgtcaagtgattcaagatcaaatatttacaataatcaaatggagtatcagatttttttttccaaactgataccacaaatacagagctgaaatctctctttggctcctctatatgcaaaattgaattagtcttcattgaagacaattatatagtcagttccagatgcaaaaggaaacagccttacaaggcccctaaagaacacatgctcctaccctatcatttgggttctaccctatgcgcctggaagtcctcgaatccccagtccctgcatgggtaggctgtacacatgggtacagagcaaacctactgcctgtatctatacagcatgtcctgttattccaaagagaatggagcaaatctctctgttagtattaaccaattccgcacttggtaaccttgtctagtacagacagctggtgtcattttgacacctggggccacacacaaagaaagcagccccagctgatgctgccaagagaaactgctgaagggccagacacattccagcaaggaggggtgtggggtctttcacgtagattgcagagagtccacctggtatacattctggttggaaggggtggtaaaatacagctgctgtgcctggaaccctgttgtcacatgggctgctgagtcccagcgtcctctcgaagtccagcagctgacccatgaagttgaagttaggggatatgttggattttttcattttgacaatgtcataggcatcgttcatcgacagattgagcttctgcataaggtaagccacagtcacagtgactgagcggctaatgccagccaagcaatgtaccaagacaccacagttcttgccccgggcttcatctatgaaagaaatggcctcagggaaaaactgggacaggttttggctccagtgatccgagatggggatttgcttgtatttaaactctcctgcgttctcaaagagattcggcaaattgggggtgacgttcaagatgtacttgatgccgaattcctccaacacgtccaagttggtggagtctttgggcacagcccaagtagaggaagggcaagatctccactgggaaggaaggctgggctnttggacagcggactaccatccgagtctgtttgcactattggggtctcggtcaaggtcagactcgatgtccgaggaagagtcagagctgatccgcaggcccccgaggccccagcactgggcaacggcggcgagctgctgctacacgagccgtctagattggtctcgcaatgcagggagaactcggcttggaacttactgaagccaccttccaggtagaacgcccggcagccctcgtccttgagcttcttgagcagcagcccgagcaacgactcgccgcccgtattctcgttccagtcgctgctgctctcgtcgtagagcaccactgtgtcggtgccacagcgccgggtgaagcggtcccggtcctcgccgcgcgtgaagagcgcgcgcaccggcaggttacccttctgcaggcgccgcagcatgatgcccgggatggccacgttgatggccgactcgatgtgcgacgactcgtatagctcctgcggccggcagtccatcagcagcagccgctcgttgcccagctccagctgctcgttgagccacgccaccgtcttgctgatcgccatttccgacgcgaagggcacgggtctgaaccgtatctatcatgggggtcgagctgcgggagagggcggggtgcctaccagacgcccctcggggcaggcataggcccgaagcaccgcgcgcgaacgtgccgctctcggagcggggtttaattccgcctcgccttacccaagccgaggctagcggttggggcagacgagacagaagtaaagccggaggttctctctgcacccagctgcagccgctggctcttagtgtcaatgaatctctctcaatgaagctgcccagatagtttttgttcctccccagtgaatgaaatccaattaattcggactccgtgctactgagaggggaggaaaaaaagtctagcggcttctaatccctccctccaaggctgcacctcaaatctacccgggcgtctttctccccggattatttaagactcgatttgctatctcttggactcagcctc

SEQ ID NO: 11531 - DNA, 1029 bp, Homo sapiens
tttgctaaatgctgggtgtgtatgtgtgcattttccacactttttaatttttaaaaaatacacatatacacaaacaacatgtacagaaatagaagaaagcaagccagacttaagcttggtagagtaacggagtcctctggtctaggcggtaattgctttcagagaattacgtttatagaaatcagcgagttttgtaagaaaggagaagatgttacttcaagaaagaggcagtagagttgctggttcttaatgcacagaacacacagatatatggcacacgtgtgctgctgaggtgaggcaggtctggtgagcacggagaggctgggaaggggctaagtgactaattggttcaggtacttttttctgggggaggtagactttgcttcttttttgtaaaaatgacaaacgtagaagtggcaatgctgtaacctgggtgcctgctgctgtgcagccacatacacacaattgtagcctgatttttagaagtgtgggtaattttttaatgaatttcctccttgagtagcagctgaggtcattgacaactgaagtgatggtgtggacatagagagaggggaagggttggaaaggagtaagtgatacactgctggaatttgtttcctgcctatgaaataaaattatttttcagaattaaatttgaaaacttgcactacagaactatgggtggagcttttccttttacaacagttttttttttttttttttttttaaccagagtttaaacttccattgggcaattccctgtcacttgaaatgtcaacatttgctaacttttggatatccttttggttacaccaaagaaaaagttatggctatttttttttccttgaactgcctacagtatcatgtcctaattcagaaagatttatcaaaatctattatatattatcttactttgaagaaaacgctgaatagctcttgttagtcaaataaactgataaaaattggtagggcctggctatcaattagccctgggaaatgaatttttagattaaaaaggtttttttgcat

SEQ ID NO: 11532 - DNA, 729 bp, Homo sapiens
ccataaacaaaaaactaaataaatttattccataaagattttaaacttctacaattcattaaaaagacataaattcaaaagtcaaaatggtaaaaatattcacaacatatgacaatcaaatggttaatttccttttataaagagtttataggaataaatgagaaagaagtaaacccaaataaaagtagacaaaggtcatgagcagttcatttaaaaagaaatacaaatatctataaacatacgaaaagataatcaccttaatatcattaataattaatattttctcccacatcagcaaaaatctgcatgtttgttaaagctgagtgttttaagggtgtgatgaaatggacaccatttacacaggactgcctttcaggaaggttctctgccactggaaaagggtacagcttttctagagggcaataggtgatttctattaaaatatcaaagacacactcctcgcccttgtacttcaactatttatctgggcttagtacaagttctcctagctacatgtacaaggatgctactgcaacatcatgccttagagaaaaaggcatagtatatttggtattgtaccaatgtcaatttcccagaattgatattatactacagttgtcaccactgggggaagagtactcagggactctatgtactacttttgcaacttcctatgagactataattacttcaaaataaaaagtgtttctttaaaaaaatcatggtgcg

SEQ ID NO: 11533 - DNA, 185 bp, Homo sapiens
ataataatgatgatactctaagaaaaaaatctcaacatacttcatttaatagctcgttaccaagtgtgaatgaagcaatatgtcataatagagtagccactggttgcataataatagagacctaaattctcaaatagggaaagaggttttaaaatcaaatttgaggccaggtgcagtggctcatg

SEQ ID NO: 11534 - DNA, 472 bp, Homo sapiens
gccggaggaggcgcgccgacgtctggaggaggaagaaaagagagccagccgagcaccctccaagcagaggacaagatcgcagaggaaggtgggcggcgggagtgcccagccgtgtgacagcatcgttttggcgtactacttctgcggggaacccatcccctaccgcaccctggtgaggggccgcgctgtcaccctgggccagttcaaggagctgctgaccaaaaagggcagctacagatactacttcaagaaagtgagcgacgagtttgactgtggggtggtgtttgaggaggttcgagaggacgaggccgtcctgcccgtctttgaggagaagatcatcggcaaagtggagaaggtggactgataggctggtgggctggccgctgtgccaggcgaggcccttggcggggcacgggtgtcacggccagggcagatgacctcgttacttcagggagcccgatgggggaacagt

SEQ ID NO: 11535 - DNA, 343 bp, Homo sapiens
gggcacttggaaatctcataggaagctagaaacagccttccagctgggcctcctgttgtctcggatagggttcaggagtgagaagctcattgtgggtctgggacagttctagaactgcctcaccatcaccatggccccgaaagtcttccatccctgccatgcttcacgtgccttcttgctgctttgtccacagccagcgcccacttcagattgccctcacagcttttatcagcctcctggcttctacgtttacttatatctttggtcttttacaaatgccttttatgtaaactttatgtaaagttgtatgcagagggtgagagccatagacgtgggcgatggc

SEQ ID NO: 11536 - DNA, 4930 bp, Homo sapiens
ttttttttattttttttttttttttttggaggagaaggcacaatttattggtacgcagacttccatcatgggaatgtggggtgcattcccttctgcattcacacacaccactggatttagctccctacattaattctgctatgttgaaaaagcaacataaggaaagacatcacccatctattctcctaataaccaaggaagcagagctgaaagccacagagataggaagaaaaggctgcactatttcaagagcctggaaccaagaggcccaccctcccctggcagccaggctggagagcacggctttcgggagcaacagcaaagactcttctaccagcacgatggaatacatgttggggggcttggccttaactgtggctggtgatggctgcccacctcgaggagggcacagggaacctggcacaggccttggcatctctagcccaagctgaggccagatctctccactggagaataggagctgatttcctgctccttccaaccaaagaactgagaagccaggtagatccctgctctcagcctagccatgccggaacccgcgggactttagctaaagcagcttgtgtcactgaagctggacagaacaggcttcttgtaccctaaacaagctacccagactcttcagctccttaaggccgagcccttgtctcactccaggagggcactgggcttcttaatgctttcacccctccgaacacacaccgttttaaactggtgggtttgggcacgtggttttaggtggctagagcctcagctctcgaggtcatcctgatatgacgaatgttcgtaaagcacttagcacagcacttggcacaccatgagtgttcgatccatgtggccattattattattaatattattattatctatatctccaccctcaaatcggcgctgcagttcctttcttcagaatggcgccctcaacaaggcactggggtcccaagtaccaagagcgagctggggacccagactgtttgttgcccgtctggtgtgcgtttttcttccagcctcagcacttggtgctaagtctcacaggcagtgaactctgtgggccacacagaagctaggccctttcctgaaaacacaaagccttgcataggaagctgggcaggaggagccagcaggaggtcccgggagagggtccagtggcttcacgccgttcctctgggctcccgactcagtggcagctcactgagggcttcactgcatggcagtcctgcctagaggccctggtggcccctcctccggccggtgcttgccgtgatacgggagctcggtgttgtcgcggtagtcgcggcccttggagtgctggaggtgcagcaccgccgggctcttgactggcagcggcggccgcggcgtcggggtgggcggggtctgctggttgatttccgatctggaaggcttgatgggcctcttggccggcaccggggcctgggagctgaccggggtcttgggcttcccttggctcttgtccccgccggccgccctgccctcggcagaggagtgagcacgtgaaggagcgcagccggggcgcgggcacctgcttgccgggcccctcgccgcgatcagcctcctgggctttggtgagcacgatgctgggcgacaagatgccgggttccgggcagggcgggggttccttccgcggcattttgggggattcctggtccttccctgggagcaggcttagggaaggaactcagggacccatacagggggttctcaaacatctcgggcttcgtcagcggcaggtcctcctgaggcagcgtgtcccctgcgttcttccccaggtcactgggccttgactcctgtgtcctgggagggagaccccggtttgctgttgagggtaaaaacttcttgggtgatatgggcggctggccgggaggtgtcggaggactttctcccctgcagggccccagcggggagtccttgggcggctggtcgtagctccaggctgtgggctgctggtcaggggacaaggtctgcttcacgtgcaggggcattggtggcccaaagggccccactcccatgtagttggggttgatgatttcagtgatgctggagccactgcacggaggggccctgctagtgacttcccactgcttcatggggtcgtggctggtgaggctcttcagggtctttggcccactggattcatcacgctccgtcttcacaaagtcatagagcttctccctcgtcttgccctgagaggtctgcagcttgatctccccctggaagtggcctgtcaactccccatggtgggtgagaggcgtgtagatgggcagctgcgtttctgtggcctctaaccgaagggcaatgcagccctcgccataggattcgtcgctgtcagaggacttgatgctgatgaggatgtgctggtctagcaggtactcagggtcagagataatgggcttcagctttggaagagtctcaccaaacttcaccaccagctccccctcacttccttcttcattttctccttcctgactcttgacaaaactctccaagcagctcgagtggaactccaggtagaatttggtctgggacttggtcttcaatgtggcatagcacctgagaaactcaatctgtccttggctgtcaacagtcccgggaccgttcttggagacaaactgggaagtgactcctgcctcaaatgtggcaaagacagggctgtggtcactcgtcatgatgtcgctggtactgccataagactgacacaccacgtgcaccaggggataagacttccagaggactcggtcacaccaggaaggcaagttgtacttcatccctgtcgctttctgcttggtgtaggcgtatttgtcccgagtcagtctctcaaaacggtaggttggggcaaacgtgatttcttcctcctcgaagtgtaggaagaccttctgctccctcctctctgtgagcagctggtcgtgggacaggaggtctgcgtactgctgctgcttgattttctggatgatggtttctgcctcccaggtaggcagatccacacggtagttaagatccccaaaccagaagaggtgcgtgaagcggtgagtgatgttaaagggactcagcttcttgtcgcccagggccaggaaccggagaatgttcatatagttttggtttcgcctgagtttcttttcacttcctgaagtcaagtggctgttgacgaaccctaaggaggttccattgaacatgaacgacacccccacggctcccttgttccccagtgtgtttgcaatgcctgtcttcacgttgtcagtacagatgtggctgatccggttctcgtgctcaggcttggccagcaccacgatgcggatgttccagagcgtgtggatggcgactgttttaaaagtcacactggtgatttcttgcagggagtgtttgaggatctccagccactccttctcactcagggggtcctcttgggtgccgatcacgtaaatgtcatgggggatgtagtccgcagagtcgtcccgcgtctttccctgccccttggagagaaaccaggacgtgatcttcttgggagggggggcgttacccatgttccaggtgccgatgaagatggtgatcatgtcgggctccggctgctctgagtgcttgttcttcatctgctgcaggagctggcagaagccttctctctttttggagtcagcaaaaacatattccttccgcaggatcttctccttctccgtttccaccaagatcaccaacttattcagaaatttctgtgacttaatcagctgcaggattttcttgtggctgtagaacttgtcctcagaaccatccttggacttcttaatgatcagtttcccagactcaacgtcgactttgagctgcattttctgaggaatccccagagactctgccttcacctcaaaggtgactggagggataagggagggccggtgcggagactcaggaccctcgtgcagcaaggccttgaccttgtcttcaatggacgacaacaggcttgtcagttggctgagcttggacaccatgttgatgggattggcctcaccaggaacctgaggacgtggacggaggcccggggagagctgctggtcaaataacctctgcagagactccagggatgggagggtccggatgacttctccatagagctccttgcagagcagtgtggtcagtttcttcaggtgaggaagactgctggaccctgtcttcacaaattcagagtcctgggcgagctgagtgcttaaataatcttggatggccttaagatgctcttctggaagcccactggtgtccatgctttgcagtcgctggaacaatgtctcggagaggctcggccggctggtctcggtcgctcggggattctcgtttgaaaaaggaacctccttggcctcacaggagctggcagtcagcgggatgtttcttgggggcagctcgggtggagacacgacactttctgtgtcctcctcagggtcgtcgcctgtgtcctcttcctccagcggcacagggtattgcagatgggtcaccagccccatgttttccttcttgtaaaactcgatgagctggtccagcttggtgaagaacctcatggagacgccttcggatgcctgaacagtgaatttatcatcttcattgggcagaattctgtaagtgtaaacgcaattccgatacagcacgcagagcgcgtatgcccgggagatggactcgctggcacgcacgaggaagctcccgtccttgcctgtcctggaaagcagctcctccgccttggagcgggtgatgttgccatggttccagcaggggaccatggtgggcgtgggcctcctcggctgggccggcaggcacccccaggacccacacaccaccgaggggagcggaggcccctccactgcaacctgccgcccgttgcctcttggtggcctcggccgacagcaacggcgacagcaac

SEQ ID NO: 11537 - DNA, 50 bp, Homo sapiens
gcatgctttctcaaactctgtttttaggtgcataaacatttaggattgtt

SEQ ID NO: 11538 - DNA, 354 bp, Homo sapiens
ggtagtgctaaatgccagtgttccaaaatccaaaaaaaagaaaaaaaattgaaacccaaaacacttaaggtcccaagcatttcagataaagggatacccagtctgggattaacattttattttacttggcattaccatatattcatctctttgttgctgtgtccatccattaatgtatttttatacttcttatataagttgtgggagagtatactgtcccgtaaatagcttgtatatcattaaagttcagtatttttttttacgtttttttttcttttggtataaaatgcagtgaaaggcacaaattttaagtgtactggcccattttgacagtgcatgcatctgtgtaactca

SEQ ID NO: 11539 - DNA, 334 bp, Homo sapiens
ccggaaccggatcgctgagatgaagaagtcgcactcggccaacgacagcgaggagttcttccgggaggacgacggtggagccgatctgcacaatgcaaccaacctgcggtctcggtccctgtcgggcacaggacggtccctggtcgggtcctggctgaagctgaacagagcagatggaaacttccttctctatgcacacttaacctacgtcacgttgccgctgcatcggattttaacagacatcctggaagttcggcagaagcccatcctgatgacctagccgcgtgcggagccttgcgcagagccccggccgggcccagccctcggagtggtt

SEQ ID NO: 11540 - DNA, 448 bp, Homo sapiens
  misc_feature (1)...(448): n = a,t,c or g
aaatacccgcttgtcatccccaggatcccttttccatagtgaaaacaatttgaggcaagggaggtcatgaagtattctgagcaggagagtaagaaaaataacttctgaaatacgtgtactggtcagaatttgccttaaagagagaaatnnnnnnnnnnnnnnnnnnnnnnnnnnnnnnnnnnnnnnnnnnnnnnnnnnnnnnnnnnnnnnnnnnnnnnnnnnnnnnnnnnnnnnnnnnnnnnnnnnnnnnnnnnnnnnnnnnnnnnnnnnnnnnnnnnnnnnnnnnnnnnnnnnnnnnnnnnnnnnnnnnnnnnnnnnnnnnnnnnnnnnnnnnnnnnnnnnnnnnnnnnnnnnnnnnnnnnnnnnnnnnnnnnnnnnnnnnnnnnnnnnnnnnnnnnnnnnnnnnnnnnnnnnnnnnnnnnnnnnnnnnnnnnnnnnntaagnncca

SEQ ID NO: 11541 - DNA, 320 bp, Homo sapiens
gcatccacagaggtaagctcgactttttaaccatcttttttccccctccctctgagacatccgaattgtgggcgagcagtgtgatttctctgaggctggtcgggccacactcacccccagagcacttatgttaacttggaactgtttagagagaatttttttgctttcttgggtcacatggctcagtagccattagccatagcttgattttgcaaactgggcaagggcctgggcacacctttccttccaccaggggcatgggtgtttctgggaagagtttgaagctagatcctggtatgccaaaaaagaagctttttttt

SEQ ID NO: 11542 - DNA, 295 bp, Homo sapiens
tttttttttttttttttttactgccagagatttttatttagttggctagagtgagcttggtaatacacagtttcagtgcacactccaggcaattctgatgcacatggtcatgaagccccactctgagagtcatgttttggccacctgatttctagtaaacaaggtctggcagggaaatttcccatcttggttattatttatttagagtgtctcaatctctcacaaggcagcggtgtgatggcatgatcacagctcactgcaaccaccggctcccaagctcaagtgatcctcccac

SEQ ID NO: 11543 - DNA, 403 bp, Homo sapiens
tttgtacccatcttaaattttttttatttggatctcttgctacagaattattgtgctcctttggaggtatcatagttccttgatttttcatgtttcctgtgtccttacattgatatctgcacatctggtgtaataatcactttttccaatttttaaaatttgcttttgtaggaaagaactttttcctgaagatgtatctgtggtgttgcttgggtagagcacttcggttttgattctcggtgaatgtagtagcctctgtataagattctaaacagcatcagtgatatttgtgattttctcagtggcttagggtgtggttattagtggaggctgtggtgaagtttttctgagaagtgggatgccaggtaggcctgtcttcaggcccaatggtggcagcagtggg

SEQ ID NO: 11544 - DNA, 511 bp, Homo sapiens
ttgaagatgaaggtctactctttattgcccttgtacacaaaggaagggggtgtttggttccaggtagtgagagaggagcaccccttcaaggctggtcgaggaggcatgtcccaaaggaagagttcaaggcggtttccagagaggaaggaacagccagggccttgcctcaacatgggaacggatttgggcctccacttgtaggactccagaaacagaaagggctgtttgacggagctggggacgcccctctgctgcagtggaaatgaggacacagctttggaagaccgtagaggccccgaagtgtccatggtggggggggccctacaggggatctcaccacaggcatggggctgggacttcctgcactgcccagaaacaggccctgggcgcttcacaccttcagttacccagagcgcaccccctcccctcgccccagctccacctcagtgtgctgaggggtcctgtgtgcccaggaccacgatctctgccaggacacagtttccctgctcgc

SEQ ID NO: 11545 - DNA, 327 bp, Homo sapiens
gctgagtccttttcaaaaagattcaaaccttgtatccaagtctcttaaaaaatgaggtgaacatatactcatcgtatgctctccattcagatacactgttgctttatctgaaaaacctacagtaaatgtgaacatgaacttttgttcctaaagcataaaattttaaaaaatgacttaactcacaggtaacagcagtagttttaagagaactcaattagacactttttggttgggcagatttcaaatacaaatacactaagacattttttactctctgtatcagatggtcaaaggagtttgtgcttgtactatagaggccgatgctcc

SEQ ID NO: 11546 - DNA, 281 bp, Homo sapiens
  misc_feature (1)...(281): n = a,t,c or g
gcaccatgagcttcaatcctggtaaaacaatatctatgagagagatatgcctctagaaaagtgcttaggacatatttggatattcaccagctcctaaaatctgagatgtaaaaaattaatgtcatcaggatgtttaaaaattattttatttctctttttctcctttcctgtcaatgattcttcagatttcccagacttaaaatccctgatcactntccatgttgcctgaaatttcantctcatgnatcctcntgattcttttttggtttcttgnataccat

SEQ ID NO: 11547 - DNA, 357 bp, Homo sapiens
gggcaaaatacatttttcttgcgcgtcctatgttggtggctgagacccctaagacaaaagacaaattaacaagagcaaaacatacaagtttctttaatacaagttttacatgacacagcagcctacataaggaaatgaagtcccaaagaaacagttaaagttgtgtatttttatgctaaatttgatgaagtcacagagaaatataaatggacaaagaggatatgatctaatagtaatacactgggggcaacttagcaaggcctgtttgttcaagagttttctctgtgactgtgtgtcttcagcaataaagatgttactttcctccaggtatagggagtgcaaatctcacatgagaat

SEQ ID NO: 11548 - DNA, 449 bp, Homo sapiens
  misc_feature (1)...(449): n = a,t,c or g
gactaaatataagacatggttcttaaaaatcatcttttgtacaattgaggacacaatcaaaacccagacaccagggtcctgaagcagaatgcaggcatccacagaagaggcggtgctgatggactggaccccagagagtccacacctgcttggtgccataccttgggtccctccagatcaggatgctcccagcaacttttctaaggatggttatacttgcacatgctgcaaagattgagtgggcatccctgcaaagcctaatggttttagagnaaatnggttccaaaagaaggtatgaagcaggcccatagatgggggattagtgcataggagggttttattgggggnagtactcttggggatcaacaatctgtgagcaaccgagaaaaggangcaggattggagcaggggaaggaaggntgggtgttcntggaagctgagattcaaac

SEQ ID NO: 11549 - DNA, 325 bp, Homo sapiens
gggaacgccgaggctgggtgtctcctggaggcggggtgaggcctgcagctggccacaaggccctgggagccagggcagagcctgggcccaagaaagggggcagtttcagagctgcagggtctggggcccagaaagcacagcctgggcatggcccctgcaaccctagggagctgccacagtgagcacctgcccattgcccacagctggcatcttggagtgagggcagattggggcaggaacagctgcacaaggggacgggttcctgtgagccgaggcaccgctgggggctgcatccagactctgcttaaaagaatctcatccacct

SEQ ID NO: 11550 - DNA, 456 bp, Homo sapiens
cactcaataaatgctgctgcttgacttaatgatactctaacatcagataaagtcaggctgtagtaaaggtttttgatataatggggtaaagtctctagagaaaaaagaaattgaccttggggcagggtgaagcacctctaagctgggggtatgtgacaacccaggttactttcactcgtcttttggttcccattagccagtgtcagccatctggtccttccgaaaacatgtgtgggttcagaacataacagactagaagattagaggaaaaataagattattctgtgcaatccccattctggaggtcccatatcaacccccggagtctgtctttgcttctaaggctcagccaaaaattagaccagcataaagaagatgaagacttggatctagacgtggtggatgtgaatgaatattggcaatattatgtatttaggaatgtatttaattagtttc

SEQ ID NO: 11551 - DNA, 532 bp, Homo sapiens
  misc_feature (1)...(532): n = a,t,c or g
aggtcgttcggctcgggtaccatcctccgcgccatggacaccagcgacctgttcgccagctgcaggaagggggatgtgggccgagtgcgaccatgaacccgtcctgacccaggctctgacctccttcctgcccaggtacctgctggagcagcgagacgtggaggtactatgcctgcttgtgtgggcacgaggagctggtactctaccttctggccaatggagcccgctgcgaggccaacaccttcgatggtgagcgctgcctctatggggcactgagtgaccccatccgccgggctctacgcgattacaagcaggtcacggcttcctgcaggaggcgggattactatgacgacttcttgcagcggcttctagagcagggcatccacagtgacgtggtctttgtagtacacgggaagccatttccgggtgcatcgctgngntctgggtgcacgtagtgcctactttgccaacatgctggacaccaaatggaagggcaagagtgtcgngtntnnnangnnccnnnnnnctctgt

SEQ ID NO: 11552 - DNA, 700 bp, Homo sapiens
tctctttaaattattttattcaagaagtgggggaggacagacaaggggactgaactcaaagtcagagggtggagactccagccccacccagacacggttggggacagacaggacccaggaataccgactgactgtcctccaggggatggcggccgcagcacacagggcccggcccgttggaccgcccgggtggggctatttgggggtgccgccgccccttcttgggagtggtgggtttcttgccctgccagaggtgtccctggatggtgaaggcatcgacgctcatggacatggtcttggcggggatctgggtgaagcgcttgcggtccgagttgtacttgtagatgccttccaccatggcgggcgtgacggtccggggcccataccctgccagccgcgacagctcctctgtctcccccgacagcgtgtagagcgcccggaactggcagctcgagtcgcgaaagaggatcaggaagtggttggccttgcttttctcaatttcctgggcaggagtgctccagaatgcgattcttctgcggttcgttcaccttgcccgccaggcagcagtgtgatagggcattgtggatgatgaacttgttggacttggcgctgggttctttgtacagccgtggacctgtgtactcgggcactgacgctggggaggaggcattgctgccattttcccagtcccgttcgcggc

SEQ ID NO: 11553 - DNA, 1224 bp, Homo sapiens
  misc_feature (1)...(1224): n = a,t,c or g
tgctttttaaaatttattttaaaacatgaaacccaagctgaatagaaaccacagaaattacattgacgagatttttagtatttgccaagaaaaaaagcccccaaagaaataaaaatcagcccccaaacccagttctaaaaaaacaaaaaaacacagcgacagtacatacagccatggccctacagaggctggaggagggggaaatgcaaaatggttcaggcctcagttcctggatgttaaatcacactggggtgggggaggtcagatgcccaggccgggggggtaaaccaggaggctgagtcttaaggagattatatatatatatattatatataacaaatatgaagtggttcagttacacaaccattatggttaaacacaaaacaaagatcccacaggagaggccctggtcccccgcctgcccccttgtctggggttctggggtccaggggggctggcctcaccacccctctcagggctgggggcagagctggccccagggcaggagcaaatgttgcttggaactcgaattgcatagtgagatgggtgggtgggcaatgggccaggggctgctcccaaccaggcccattcactaccaaccttgccatgacattgtggggggccntggggtagtggatgcctgcttggggagcactctcagtgaggtaagcccctgggctcctccctcttgtccccagggccaccctgtcctcccaacgaggctgtgggcctgggggctgcaagaccccctgtgcagggtgagagtgggggctggccatggcagcaggcaccagccagatgccccagtaggtgtggcgaggtcatgggatggagtagttaggaacacggcaccgaaaactcagaacaaaaatacaaccaatggcaggcgctcccctccacctactgaggtggggtttgaaccccttttgattttccccgtttcctttcttcaaccttggtgagtagaaagtcacagatgggcacacacgcacaccacggtcaggagtcccgagacagcacgaggctggaagccctggcctcaccgcctctcacgctatgtccattcacctggcaggcacgtcacggccatggacagcatttgtgcttctgagcggtcgcagggcgtttggcggcacccacgccagggtgccagggcctctctcctgcctaggcctggagaactcctggcgggtcaagcccagaggaaagactgggcaggttggc

SEQ ID NO: 11554 - DNA, 424 bp, Homo sapiens
caatagccccttgaggtaggcatttttaccccatttacagaggaagaaactgaggctccttagatgtgtaacatttcccccaacttgtaccgtgagcctgcgaaggagctggagattcaagcatgagtctctgacctatgtcccagtgtcccagtgccccagctctgcccctgccctgcccctgcccagccctaaccaggagaaagacctttccgggccagtgcagctctgggcctaattggggcccgggtggcaacagggtggagaggagcagatgggtctgtggtttgatttccccagcaggtgtttcccaagcttggcgggaacagaaagggggagctggagggggggggtggcctcagctgcttgtccttaagacacgggaaggattcattgtctgccctctcggcaaaaaaaaaaaaaa

SEQ ID NO: 11555 - DNA, 1429 bp, Homo sapiens
ctctcgtcgcccccgctgtcccggcggcgccaaccgaagcgccccgcctgatccgtgtccgacatgctgcgccgcgctctgctgtgcctggccgtggccgccctggtgcgcgccgacgcccccgaggaggaggaccacgtcctggtgctgcggaaaagcaacttcgcggaggcgctggcggcccacaagtacctgctggtggagttctatgccccttggtgtggccactgcaaggctctggcccctgagtatgccaaagccgctgggaagctgaaggcagaaggttccgagatcaggttggccaaggtggacgccacggaggagtctgacctggcccagcagtacggcgtgcgcggctatcccaccatcaagttcttcaggaatggagacacggcttcccccaaggaatatacagctggcagagaggctgatgacatcgtgaactggctgaagaagcgcacgggcccggctgccaccaccctccgtgacggcgcagctgcagagtccttggtggagtccagcgaggtggctgtcatcggcttcttcaaggacgtggagtcggactctgccaagcagtttttgcaggcagcagaggccatcgatgacataccatttgggatcacttccaacagtgacgtgttctccaaataccagctcgacaaagatggggttgtcctctttaagaagtttgatgaaggccggaacaactttgaaggggaggtcaccaaggagaacctgctggactttatcaaacacaaccagctgccccttgtcatcgagttcaccgagcagacagccccgaagatttttggaggtgaaatcaagactcacatcctgctgttcttgcccaagagtgtgtctgactatgacggcaaactgagcaacttcaaaacagcagccgagagcttcaagggcaagatcctgttcatcttcatcgacagcgaccacaccgacaaccagcgcatcctcgagttctttggcctgaagaaggaagagtgcccggccgtgcgcctcatcaccctggaggaggagatgaccaagtacaagcccgaatcggaggagctgacggcagagaggatcacagagttctgccaccgcttcctggagggcaaaatcaagccccacctgatgagccaggagctgccggaggactgggacaagcagcctgtcaaggtgcttgttgggaaagaactttgaagacgtggcttttgatgagaaaaaaaacgtctttgtggagttctatgccccatggtgtggtcactgcaaacagttggctcccatttgggataaactgggagagacgtacaaggaccatgagaacatcgtcatcgccaagatggactcgactgccaacgaggtgaagccgtcaaagtgcacagcttccccacactcaagttctttcctgccagtgccgacaggacggtcatcg

SEQ ID NO: 11556 - DNA, 682 bp, Homo sapiens
  misc_feature (1)...(682): n = a,t,c or g
gcgtccgctcccgcggccccctcgcgctttgcagacgccgcctgcgaggcggaggcaggatgaagatgactgtggatttcgaggagtgtctgaaggactcgccccgcttcagggcagctttggaagaagtagaaggtgatgtggcagaattggaactaaaacttgataagcttgtgaaactttgtattgcaatgattgatactggaaaagccttttgtgttgcaaataaacagttcatgaatgggattcgagacctggctcagtattctagtaatgatgctgtcgttgagacaagtttgaccaagttttctgacagtcttcaagaaatgataaattttcacacaatcctgtttgaccaaactcagagatcaattaaggcacagcttcagaactttgttaaagaagatcttagaaaattcaaagatgccaagaagcaattcgaaaaagtcagtgaagaaaaagaaaatgcgttagtaaaaaatgcccaagtacaaagaaacaaacaacatgaagttgaagaagccaccaacattctgacagcaacaagaaaatgtttccgacacatagccctntanngctcgtnantcntanagnntntcntaaatcntnttctncctgnngtattnnttnatncatnaagnggncttttattttannatnnngnggganattgnnnttcccc

SEQ ID NO: 11557 - DNA, 493 bp, Homo sapiens
  misc_feature (1)...(493): n = a,t,c or g
gcggcgaaaaccatgagttatctgcctgcaggagagacagctcaggcctccaggagacttgaacatgcattctgtagcaggtaaacagtgactcttgaaaggtgcacataattggaaatggatgtgtttgtgagggggtggggagcgatggtgtacacctaacgatatactacaacacnaattggtttaaccttgggtagtttggttcnctgncttttaataatggggncacggcacantaattacacaggngatnantngttaccctaaccggggaantttatttggaaaaccncaaactggttacattgatctaaattcattgtaagcttcagcaaactttctttcccagatatcaaaatttgttgtcacatgagagttaaagggaaaaagctttcatagtttctcaagctatttaaaaaattccatagtttttgcttctggctctcctaacttttttaggttttgttttctgataacattttattcaaga

SEQ ID NO: 11558 - DNA, 434 bp, Homo sapiens
  misc_feature (1)...(434): n = a,t,c or g
gacaaacacaaacaccttgctgagctctctggcctccccttcctctctcctcctcccctccccaacaccctctttatctttgtacccttccccagctgtggaaaacattcggttaccagaatggaaaagattcttggggcagcatctggagcctgaggcctcagactgcctctcatacctgcctgaaatgggctcacagatgtgatgtgtggtaggggtggggatctgtggggcgatgcaagtggcctcttgagagctccattataggtggctggagctagaataagggcttccttcctcaaagacagctttccaaatttgaggcattaatgggggatcaatgggaaatgaatttgccttgtgattcacccntctccaagagcaggggagagagggggtagtgtgagatgttaggatttgaaattgagtaggaa

SEQ ID NO: 11559 - DNA, 702 bp, Homo sapiens
  misc_feature (1)...(702): n = a,t,c or g
gccttggcaaaataaaaatttattgattgaaattataatatcctagctaccttattgtgcctagctcttaccactgaggagaaaaaccaaacgcaaacaaaagtatgttcaaattggcaaaaatgtttacaaacctgcaaaatctcttcagcctatcccttaaactgcaggcttggtatttactaagctctgttgtgtacaatacccaccttaatatccattcttgcacaagttctgttaggtataagccaaaatcacatgggattttttttttttaccctctcatgcctatgtttgcttttgcttccaaagacccttctgagtaaggactgtcctcagactactggagtcatttagtcacaagcttgcctgaggtcagagctggcaatacctgggagtttatgtcaatcccacagcacccagcaaccttgcctgcaaattatttacccatgattgacaggtgcaggtgtatgaaagtccagctccttgacttgaggggtgcctttgtggtgaattagctttgggaaaagggaatccagaggccaactttgtaaaactccagatagataaatggaaagaaatctttgccttgggaagtccagttgagaaagatagtgatttacttcagactgtgggaaagagagactaaaatctttacttttcctcatggggaaagaagcctttnggttaaaggggnaacca

SEQ ID NO: 11560 - DNA, 1393 bp, Homo sapiens
  misc_feature (1)...(1393): n = a,t,c or g
ggttgagcccctgaatccttcctggcgaggcagccctcaggtgttagtccaaggtgaggtctattgcagagctgcctgcccttcaacccacacacacctctgaagccgccagggcagttccccaaacacagcggcttctgaaacagtcaatgaccagtaccccccaaacctgggctgtgcacaacagaccaagaaaaaggtgttccagtaagaaaacagatatatgcggtattttaaaaactgattttacaaaatccagccatgagatgtacaactcattccctaggaaacagcccaggaatggccatcttctccagccccgtacgctctccccagtagcccagggcacccagcaaccatcccctaggagaacaggcaaggaccctcgtgggaagatcccaccacagcaacacctttcttcagggcgggcctcttccgcaatgtgtgagtcaagacaatccattccattcaagaccaatttactctcaaattttgccaacacagaaatattatccttaaagaaatgtgcatttaaatcttttaattcacttcatcctgtattttaaaataaatgttttccatatagattttccccttgggggggaaaagaattcagggtcttaggttccaggcagttcaaaaacagccacgcggttcttttttctccaccagaataccacaatagcagaacttaagaatcgggatatgaaaagggaggcgtggtcctggcagtggcccctggccggcaggaatacacagcaacacccaggcaggggcagcggctgcccccatgccagcctgcccatccctgtaatgacagcagggcaggagatgcagctgtggccctgggggcaggtgggctctgaggctgcaaacaccctgagtgccagtggtcccagagggggtgaggcctctatctgtacctttattccagccagcctcctggcacagggctgggcccacatcctggcctctgcatctggatcagggctggtgctggtcagcctggtcactctggccagtgctcacactggaagtccatcacaggcgaagtcacctccttcccgtgttaaataacaagaatgccaacaccccacgcacgtgtcatctccagtgagcagacgtccaggcttcccgaagcttcctggctggaaaccgcgcagggccggcagcgccctctccaccaagggacacagcagcggcgcctcctccgcggcccgggcccccatcccgcgctcgctcgnccaggacgccccaggtcggagcctgcccccaccccgcacccggaggccagcagcccagtcccctaggccgcgcagcgccagcgagagcgaggctgcacggcgaggcccggtgaggcgctcgagaactggccgggaggagaagtcaggcg

SEQ ID NO: 11561 - DNA, 1169 bp, Homo sapiens
gcattgtatgtattacagaagttagaaacaaacacctggatcaattgtaaacataatcctgaattacagtattttccataggacaaaacacagcaagacattttctatttagacaggcaactttttgatatagagcttatttatactgaagaatctggaacaaaacacaggacacagtactaatctgtcaaatatactatgaaatgcatagtctccacttaaaatgctgaatgacacacacgttttgcaagcattactgctttccacaaaaactgctgaataggagttccgtccctgccaagatcagtgtttaagagatactttatgatgctgataagtattattggtggtggtggtgttcagaaagtttgtcactcatgccagatgtctgaaatcttgttccgaatccatggaacatagggtggaggccagctcccccttttttagatgatcacatagttctgagcagagatgtggtcctcaaccctgcagttcctgcaggagctgctgctgctgggatggctgctggacagaggcctccatggagcacgctgtgctggtgtcatcagaaagagacgtaaaggaaacccgggatgagagctgctcaacggtcagagttgccaaagctgagctctggccagagttaggagagttcttgagcataaggtcagaagcaggtaagagggggcctagaagttttacaggacagaaagctgatccggttgggatgaaattaaccttgtttttgtcaggacatgaaaagagaggggccgagataggctgacgagacgccatttcctcaaagaccttcactcgctcacatccctctgggggctcccgtttgaacatgtagctgttgtttggtttgggagatgaagcatacttgggtaacggtgagctactcccactgtctgtaaatttaaagcagttatattaactagtgattgaaagctcttgtaaatttgatttccaaacaaacagccttttgcacaatttatccactactgcccctatgctttgaccagtctcctttattgcaaagctatttcttataccctgtgtagcacatttcttctaaataaaaactgcaatgcaacagtcatctgccacaccatagaacataaaaaggacattttagtccagaaaactgcattttgaatacaacagag

SEQ ID NO: 11562 - DNA, 365 bp, Homo sapiens
gaaacattacatcagggctctggaaattcaccaaagattaaaaaaaaaacacacattgggaaatattttttcctgaaaaattgatagagcttcaggtaaaagcagcggaagtctgtggccttcttgccaatacacatgtacccacatgcttggtcgataagatctgtagtttgttaccagagtggcactgcgtgcaaaaaccagaagctttgttgtcagagagaatggattaagtggctcatgcctgtaatcctagcacttatgaggcctaggtgggggattacttgaagtcagggagttcaaggaccagcctggggccaacataggtgaaaccccgttttttacttaaaaattaccaaaattgg

SEQ ID NO: 11563 - DNA, 334 bp, Homo sapiens
gaccttggcttttagacgctccaagttaattggtaagtggggaagggagaaggctcagtatgcctagactgtttgtacaaacaatatggttaatgctgaacatctccttccttctgggagtctggaatttgggtacatgtttggtaaagagtgcttatatggctagcaccaatgaaaatcttggatgctgagtctctaatggatttccctgggcaggaataccacacatgcattgctgcattttcatgactaggaaaagagtgtgctctgtgtcacccctaaagggagtgggcataaaaaaacaggcacacggattcttccagattcttccagc

SEQ ID NO: 11564 - DNA, 325 bp, Homo sapiens
  misc_feature (1)...(325): n = a,t,c or g
gtcgtccccactgtgcctgtaggagggcaccgggtccccgtctatcctacttcatggctgaggaagctaaggcacagagtggccccgtcctgcgcccagggctctgcgttggcacagggcagagctggctgtgaatcagggccgccttgtctcttgctgtggtgtgaggctgtgggagactcaggaatgaggcacagccaggtgcccagtgcccgtgggacccgcctccccacagtggggtggcgccgctcacacctggnaatttcacgctgngggaggccttgnntnctatancccatntnnaatncctgnatnccangnctat

SEQ ID NO: 11565 - DNA, 537 bp, Homo sapiens
gggaaactgaagcctggacacgtctccccaagggctcagtgttcatgggtgtgtaagatccattgactggaccccagaaagcaccctgaggggcagtgcagagagagcccaggaagcccctccactagaggaggcccttggtctggctgaggaccacgtccaccctgggcctccaggcctgcttttcacattaaaggcggggcagtctcctctcaaaggagttctcccttgagcactttgggctctggggcagagttgggctaggagatctgggtgaatcctttagtcacagctagtctcatgttcctcttctgtcaaaggggtcatggccccagtgtgtcctacctcagagttgtcagggtcaaagtaacaggcactgggacaaatatgaagcctagctttgtgcttcctttcaaattcagggcctcctttctactccattccagcctttttttcctgtcagaatccctcaggaaggacctttatcttctggagtgagtggcagttccactgggttcagtgaaagagtcgcccatg

SEQ ID NO: 11566 - DNA, 178 bp, Homo sapiens
ggcacgagctttaaaaaagtaagctgcccacaggccttcttggagaatgaagaatatcagccccattcagggtttaccaatgtctctctgaggtgacaatacattctggttttccaggacagtcctggcttaggtctgctgtccttctataaatattaacaatgatccctcttatttt

SEQ ID NO: 11567 - DNA, 77 bp, Homo sapiens
gagtaccaacatgtgaagaaagagtgagcatagcaaaattgagaaaggttgcttgaaaaccaaacaaaaaaccaaat

SEQ ID NO: 11568 - DNA, 347 bp, Homo sapiens
gagctgctggcctgcttcatgccaggccctgtttcatgtgctgggacatggaggtgaacaaactcagtgggcctcctccccaggaacttgcctactggtagagatgtagcagtgagccccaactaagccacagctaagctgtgaaggttcagactcttctgagtctaataactgagagttaggagcaaagtgcgcctgccatcgaaaccataaaagaaaaaaacagaagtcttaagaaacctaatgataaaatatcacaggaaaaattattgctttaagtctggacaacacattacctcatctctaattagctgggtatggggtgtgtgtgtctgcagtcccagcta

SEQ ID NO: 11569 - DNA, 1839 bp, Homo sapiens
tttttttttttataattcactcaccaaatttcaaagtttattaaacagatgatattctctgaccaaattaaacttagattatcttctcacaatcaatagaagaccaaattatttttcaaagaaatttatgaatcaatgaaataattataacagaatataggaaatgctatgaattgaatgattgtgaaaataaaggaagtcagaagaaatgtataaccttaaatatttatttgagaaaacaaataaagatccaaatacgtgagttgatcatctgataaaagtaagagttgacaaaaaaggtacatcttctccaatccgaaaacagaaagtgggaaagatcaaggtatcactagaggtcaatgaaacaaaacatacaatagtggatgacaaaagccaatctctgaatctttgaaaagaatataataaatgaacatctgaaaccagtgatcgagaaatgttttagataaggcacaaaaagataccaagaatgttaacactagggctgtacatcctaaaaacagtcaagatggagctcactgttataattctggttcaccgccaagaaccttagcacaaagaaaggactcaacaaacatttggatccatgaataaaattatcttcccacatataaccacctgcctaaaacattctcctcctccttgaattaaattcaccatgtctgcatcataggaggcccaaggccagtaccccctccccatctgcacaccctgtgttcaaaccagtcccagctcctgtcatgttattggcttctgagtatctgtattaatagttgttcctgccagcatatgaagatgaacaaatacacaactgagagagatccagggattttaatccacagatgccagagcttgctgggatgtagtcagaaatcaagctgaactcaggagttcacagtctttcctgtaatgatggttgggaggtgagggaagtcagaggccttttctaggatctttctccatgctgctgtcctccaggaagtcatggcaaatttacatctccagcaggttgtagaccaacagccttgaaggacacaccagggtctctccccatggtgtctcctgtactctgctcctggggtcgagtcggctgctggggtttatcatctggaagattctctgcctcagcctcagcctcagggaacaacagcttaccctgcagggtatacagaagctggaggaaggtctgatacctctgcagcttgtcccgctcctgttctgcctgctgcttcaggtttccaagtttctgaaacaccccgtcaagctcctgctgagtccctgtcttacgctccctcacctctgcagaaacctccgccagatgctgcagatgcttctcctgttgtagctgccactggttctggactgctctgcgtttctccatggccatttgtttcttggcctggagctgctcaaaggcttcccggagttgtgtccgtttcctctgggcttcctccatctgagtcagggccttggtgaggccaattttgatggcctctacgtgctccctgtaggtggccttcagctctttccattgttccttagctgcaattgccttctgtcggctcgtgtcttcagaagccaaggggtcgagacccttagcagtgtcctcctgagccaggatgttctgcaggaaatccgctacctgaagctggctgcagagcagcttgtctttcttctgagagtccaccacaaactcaaccaggatcttggctggcagttctgcctcctcctgcaggcctacaggttccaagatgcctgccacctcagccaggacctctagggctgcagcttccgcctctgtctccgctgcctccatctttc

SEQ ID NO: 11570 - DNA, 368 bp, Homo sapiens
  misc_feature (1)...(368): n = a,t,c or g
ttcccgntcattatgatattaggtggttattttgcccattaggttnnntgtggtttcttccctagcatcccatacttggtaggattgggaaaggcagtagtgttttttaaaattacttaataatttcagtaacaatcaaactcaaccttgacccctgccttctctcacaccccatatccagtctgtcaggaaatcctactgactgacttcaacatgtatccaggctctaaccatctctcaccaccaccatgaatccggtcaggatcactatcatctcccaccaggatattgccacagcttggcccccatgcttctacccaaatcttcccatagtctttctcaactatggcagccaggtcgtgctttaa

SEQ ID NO: 11571 - DNA, 677 bp, Homo sapiens
tgttttagagagcgcaaagcagttttattctagcgagcaagggagtgagcgtccaggaaggagcaggtgtaacccggcggtcagtggagcctcagtgaggtgtgtcctgttttttcctgcaatcgccgcagaagacaccaatggtcgcgttcaccagctggatcccacacagtactatctccaggcaggaggcggccaccagcagcgagaagagcgtcacattccaggggaccacgcgagggggcgcctcgcaccgatcccatagagtgcggttgagcaagtaagctcccgcggtgtcttcgaagtggtagccccactcgccgttcattaagcatctgggtccatttcggagcccagctccagacaccgagaggcagtagatggcaccaagcaccccgaacgccgaggagaagaccgagcgcagcatcctgcagcggtttccacagcacccagcaccacagcagcccttgccccctgcccgaacggctgcaatccctggacacagtaccattagggcccccgccaatgaagccgcccatgagccagacttgcaagctgagatggttggtgttggtccaggaggtctccccattaggtaccagcaggagggcgttggccacaatgcagacgaggcagagggtaatgagggagagccccacacagcgggcacattttcc

SEQ ID NO: 11572 - DNA, 336 bp, Homo sapiens
ggatgtttcctcgggacaagtcattttcatgaatctgctgtaaaacgtctcccaaactccaagtgtttcccaaactgagtgaaaatcgctgcagaatgtggtttccagcagagcttttcccctctccttccttcacctctgcctgggttacagggtgcgggttccaggagtctgcctagaaggcaaaaaacaggctttgcttagaatcccctaaattgctcataaaacacagtgtttgacgtttatgtgtagacatgatccttatgtgggttaagctgaggcccctgccccagtgacacagaggcctcaaacggcacagtgcaccttctgtccgaa

SEQ ID NO: 11573 - DNA, 73 bp, Homo sapiens
ggtaatagaatagcccaaataatattgttaaaaaatgcccccaatttgttgctatcctttaaaatttaaccat

SEQ ID NO: 11574 - DNA, 458 bp, Homo sapiens
gattccattacctagtcatgaagaagttaccacccaccaggccttacctagtgtttcccatccctctgatcacatagcacttgtatgtgatttaaaatggaaatagatgtgtgtttaatggaattgaagtctgaaaaggaagtagttattttagcagaaaatttaatatgaatcaaagcttatatgtaaacttcaaggaggaatggtaaaatgttcagccctcctagttatgttcctgatgtcttcgttatgaaactgttgatgtttgcatcatacatcttctctttccttgttttcctctacaattggaggagaaacaaatatatttcttactagcaaaatagaaaattgaattatttttctccaacttgagactctcagaaaaggaagattgaattagcgtgttttttgtttgtttgtttttgtttttgtttttgtttttttgaggtgggagtttc

SEQ ID NO: 11575 - DNA, 3503 bp, Homo sapiens
agcggccggggccacgatggagcgcgacggctgcgcggggggcgggagccgcggcggcgagggcgggcgcgctccccgggagggcccggcggggaacggccgcgatcggggccgcagccacgctgccgaggcgcccggggacccgcaggcggccgcgtccttgctggcccctatggacgtgggggaggagccgctggagaaggcggcgcgcgcccgcactgccaaggaccccaacacctataaagtactctcgctggtattgtcagtatgtgtgttaacaacaatacttggttgtatatttgggttgaaaccaagctgtgccaaagaagttaaaagttgcaaaggtcgctgtttcgagagaacatttgggaactgtcgctgtgatgctgcctgtgttgagcttggaaactgctgtttagattaccaggagacgtgcatagaaccagaacatatatggacttgcaacaaattcaggtgtggtgagaaaaggttgaccagaagcctctgtgcctgttcagatgactgcaaggacaaggggcgactgcctgcatcaactacagttctgtgtgtcaaggtgagaaaagttgggtagaagaaccatgtgagagcattaatgagccacagtgccccagcagggtttgaaacgcctcctaccctcttattttctttggatggattcagggcagaatatttacacacttggggtggacttcttcctgttattagcaaactaaaaaaatgtggaacatatactaaaaacatgagaccggtatatccaacaaaaactttccccaatcactacagcattgtcaccggattgtatccagaatctcatggcataatcgacaataaaatgtatgatcccaaaatgaatgcttccttttcacttaaaagtaaagagaaatttaatcctgagtggtacaaaggagaaccaatttgggtcacagctaagtatcaaggcctcaagtctggcacatttttctggccaggatcagatgtggaaattaacggaattttcccagacatctataaaatgtataatggttcagtaccatttgaagaaaggattttagctgttcttcagtggctacagcttcctaaagatgaaagaccacacttttacactctgtatttagaagaaccagattcttcaggtcattcatatggaccagtcagcagtgaagtcatcaaagccttgcagagggttgatggtatggttggtatgctgatggatggtctgaaagagctgaacttgcacagatgcctgaacctcatccttatttcagatcatggcatggaacaaggcagttgtaagaaatacatatatctgaataaatatttgggggatgttaaaaatattaaagttatctatggacctgcagctcgattgagaccctctgatgtcccagataaatactattcatttaactatgaaggcattgcccgaaatctttcttgccgggaaccaaaccagcacttcaaaccttacctgaaacatttcttacctaagcgtttgcactttgctaagagtgatagaattgagcccttgacattctatttggaccctcagtggcaacttgcattgaatccctcagaaaggaaatattgtggaagtggatttcatggctctgacaatgtattttcaaatatgcaagccctctttgttggctatggacctggattcaagcatggcattgaggctgacacctttgaaaacattgaagtctataacttaatgtgtgatttactgaatttgacaccggctcctaataacggaactcatggaagtcttaaccaccttctaaagaatcctgtttatacgccaaagcatcccaaagaagtgcaccccctggtacagtgccccttcacaagaaaccccagagataaccttggctggctcatgtaacccctccgattttggccgattgaggattttcaaacacagttcaatctgactgtggcagaagagaagattattaagcatgaaactttaccctatggaagacctagagttctccagaaggaaaacaccatctgtcttctttcccagcaccagtttatgagtggatacagccaagacatcttaatgcccctttggacatcctataccgtggacagaaatgacagtttctctacggaagacttctccaactgtctgtaccaggactttagaattcctcttagtcctgtccataaatgttcattttataaaaataacaccaaagtgagttacgggttcctctccccaccacaactaaataaaaattcaagtggaatatattctgaagctttgcttactacaaatatagtgccaatgtaccagagttttcaagttatatggcgctactttcatgacaccctactgcgaaagtatgctgaagaaagaaatggtgtcaatgtcgtcagtggtcctgtgtttgactttgattatgatggacgttgtgattccttagagaatctgaggcaaaaaagaagagtcatccgtaaccaagaaattttgattccaactcacttctttattgtgctaacaagctgtaaagatacatctcagacgcctttgcactgtgaaaaccctagacaccttagctttcattttgcctcacaggactgataacagcgagagctgtgtgcatgggaagcatgactcctcatgggttgaagaattgttaatgtttacacagagcacggatcacagatgttgagcacatcactggactcagcttctatcaacaaagaaaagagccagtttcagacattttaaagttgaaaacacatttgccaacctttagccaagaagactgatatgttttttatccccaaacaccatgaatctttttgagagaaccttatattttatatagtcctctagctacactattgcattgttcagaaactgtcgaccagagttagaacggagccctccggtgatgcggacatctcagggaaacttgcgtactcagcacagcagtggagagtgttcctgttgaatcttgcacatatttgaatgtgtaagcattgtatacattgatcaagttcgggggaataaagacagaccacacctaaaactgcctttctgcttctcttaaaggagaagtagctgtgaacattgtctggataccagatatttgaatctttcttactattggtaataaaccttgatggcattgggcaaacagtagacttatagtagggttggggtagcccatgttatgtgactatctttatgagaattttaaagtggttctggatatcttttaacttggagtttcatttcttttcattgtaatcaaaaaaaaaattaagcagaagccaaaatacttctgagaccttgtttcaatctttgctgtatatcccctcaaaatccaagttattaatcttatgtgttttctttttaattttttgattggatttctttagatttaatggttcaaatgagttcaactttgagggacgatctttgaatatacttacctattataaaatcttactttgtatttgtattt

SEQ ID NO: 11576 - DNA, 605 bp, Homo sapiens
tcacgtttattacagatttattgggggaggccccaacgagaagacctatcatcatgtcacgggagctcacgttccataccaggaaaggagtgttcctgtcaccaggtgaagggggaagggtcctgggaccccggcagtgggaggcctcggggaggggtgtcatcagagtcttgaatggacccagacgctctcttcccgccaggacaggatgcgtaggagcagagaggaagcagctttgctggggaaccaccctggggtcgtttacttgaaccaaaggctcctgggggccagccagagggccaggggaggttaacacggtgctcaggcttctctctggccctctgccttgggcccagatacagtgggctcgctggcaggaagactgcctcagcatctatttccttgcaggggccgtggcatgaagaaaagttccagaaccggctccgtagtcagggaacttgtgggctaagtgctcagacccccttcacagcactttgcctggattcatgaggccttgggggtctagcacggccttgagctgccgcatggtctccacgcccacggcgcccacctcctcctgcagcagctgccgcttgcctcgtgcc

SEQ ID NO: 11577 - DNA, 632 bp, Homo sapiens
  misc_feature (1)...(632): n = a,t,c or g
tcctatgtgtagtaaatcggcaaatgggagaattctaacttagatctgtctcacttcaaaggtcacactgttgatcactacaatgtattagtttgggtggtcaaaatgagacccacaataatttgtnnnnnnnnnnnnnnnnnnnnnnnnnnnnnnnnnnnnnnnnnnnnnnnnnncaaaactctgctcaagcactgacagctctcgctgaatccagcagagggttctgctgcatagtcggtcaccaacgaggtgagattctgtggaagatccataatgcacagagacaggaaagtgggaaagcgtacccaattgctaggaatctgaaggcaactgctctgaggagtgttagggagagggtacaaaggaaggcactgccaaactcaggtgagtaggactgaaactagaagaaaaggtcggatgttggaaaggacagcaggagacacttgtgggactcagaagggcgtgaggatatggcagaggccccagtgagtgtccctgggcctctgtctgangcagatttaatacccacaaaaagtgggacaatccagattctcaaggttgccaggaattccgtgaaagcccaaggggatggggaagcncgtgataatttataagatcctttttaaagc

SEQ ID NO: 11578 - DNA, 479 bp, Homo sapiens
gcggcacgagactgcccgagcggagacaagtgcccgctggtcggctcctccgtgccctgggccttcatgcagggcgagatcgccaccatccttgctggagacatcaaagttaagaaagaacgggacccctaggctaccactgcctccaggctactgccctctgcccctttgccacccaccgctgccgcggataaattattccctccccgacccagcccagtgccacctctatctgtgtacatactcccttcttccacccagatgggtcccctggggtagatgcattgtgggtggggggagaaagcttgtggctcctgtccgagggggtgtttggggtcccttggcccctccagtttccctctgtcctccttggcttggctttgctgctgcttgtagttgggggagaggtgcccccctcctccttgagaagggacctcctgaaaactcgctctttataaacgaggcaaaagcatttaatt

SEQ ID NO: 11579 - DNA, 243 bp, Homo sapiens
aacggggacgaggatcatcatttggaatcttagaaggtaaacgtggacatagatgttgaccgtttgggaagtaaagtgcacgtgcagggtggtggtgttatattcatctctcgctacacacagtagatatacatggaaaggtactcattttcttggtgtagttactgatttgtctttgcccaggatatgttatagaggccatttcagcttcaatttgagatattttcatcttgttaaaaaaaa

SEQ ID NO: 11580 - DNA, 3931 bp, Homo sapiens
cgactcgtcgccattcccggagcaggtcggcctcggcccaggggcgagtatccgttgctgtgtcggagacactagtccccgacaccgagacagccagccctctcccctgcctcgcggcgggagagcgtgtccggccggccggccggcggggctcgcgcaacctccctcgcctccccttcccccgcagcctccgccccgccaggcccggcccggactcccgagccccggcctcctcgtcctcggtcgccgctgccgccgggcttaacagccccgtccgccgcttctcttcctagtttgagaagccaaggaaggaaacagggaaaaatgtcgccatgaaggccgagaaccgctgccgccgccgacccccgccggccctgaacgccatgagcctgggtccccgccgcgcccgctccgctccgactgccgtcgccgccgaggcccccgttgatgccgctgagctcccccaacgccgccgccaccgcctccgacatggacaagaacagcggctccaacagctcctccgcctcttcgggcagcagcaaagggcaacagccgccccgctccgcctcggcggggccagccggcgagtctaaacccaagagcgaattactaatttcagctggattcaatttgttgtcagttgattctgtagtaaggccatatgttgcccctctggaggtgcttgtcaactactctggatgatggatggaaagaactccagtggatccaagcgttataatcgcaaacgtgaactttcctaccccaaaaatgaaagttttaacaaccagtcccgtcgctccagttcacagaaaagcaagacttttaacaagatgcctcctcaaaggggcggcggcagcagcaaactctttagctcttcttttaatggtggaagacgagatgaggtagcagaggctcaacgggcagagtttagccctgcccagttctctggtcctaagaagatcaacctgaaccacttgttgaatttcacttttgaaccccgtggccagacgggtcactttgaaggcagtggacatggtagctggggaaagaggaacaagtggggacataagccttttaacaaggaactctttttacaggccaactgccaatttgtggtgtctgaagaccaagactacacagctcattttgctgatcctgatacattagttaactgggactttgtggaacaagtgcgcatttgtagccatgaagtgccatcttgcccaatatgcctctatccacctactgcagccaagataacccgttgtggacacatcttctgctgggcatgcatcctgcactatctttcactgagtgagaagacgtggagtaaatgtcccatctgttacagttctgtgcataagaaggatctcaagagtgttgttgccacagagtcacatcagtatgttgttggtgataccattacgatgcagctgatgaagagggagaaaggggtgttggtggctttgcccaaatccaaatggatgaatgtagaccatcccattcatctaggagatgaacagcacagccagtactccaagttgctgctggcctctaaggagcaggtgctgcaccgggtagttctggaggagaaagtagcactagagcagcagctggcagaggagaagcacactcccgagtcctgctttattgaggcagctatccaggagctcaagactcgggaagaggctctgtcgggattggccggaagcagaagggaggtcactggtgttgtggctgctctggaacaactggtgctgatggctcccttggcgaaggagtctgtttttcaacccaggaagggtgtgctggagtatctgtctgccttcgatgaagaaaccacggaagtttgttctctggacactccttctagacctcttgctctccctctggtagaagaggaggaagcagtgtctgaaccagagcctgaggggttgccagaggcctgtgatgacttggagttagcagatgacaatcttaaagaggggaccatttgcactgagtccagcccagcaggaacccatcaccaagtcaggcttcacacggcctcagcagctctccttgttactacttttaccaagcggaagatggacagcatatgttcctgcaccctgtgaatgtgcgctgcctcgtgcgggagtacggcagcctggagaggagccccgagaagatctcagcaactgtggtggagattgctgggctactccatgtctgaggatgttcgacagcgtcacagatatctctctcacttgccactcacctgtgagttcagcatctgtgaactggctttgcaacctcctgtggtctctaaggaaaccctagagatgttctcagatgacattgagaagaggaaacgtcagcgccaaaagaaggctcgggaggaacgccgccgagagcgcaggattgagatagaggagaacaagaaacagggcaagtacccagaagttccacattcccctcgagaatctacaggcagtttcctgccttcaattcttatacctgctcctctgattctgctttgggtcccaccagcaccgagggccatggggccctctccatttctcctctcagcagaagtccagggttcccatgcagactttctgctgacccctctgtcacccactgccagtcagggcagtccctcattctgcgttgggagtctggaagaagactctcccttcccttcctttgcccagatgctgagggttggaaaagcaaaagcagatgtgtggcccaaaactgctccaaagaaagatgagaacagcttagttcctcctgcccctgtggaacagcgacggggagagtgataattcagaccgtgttccctggtgcccagttttcaaaattccttcagcccaagcctattgaagcagccttcatgaaactggacacaccagctacttcagatcccctctctgaagagaaaggaggaaagaaaagaaaaaaacagaaacagaagctcctgttcagcacctcagtcgtccacaccaagtgacactactggccccaggctaccttctccatctggtttttgtttttgttttttttttcccccatgcttttgtttggctgctgtaatttttaagtatttgagtttgaacagattagctctggggggagggggtttccacaatgtgagggggaaccaagaaaattttaaatacagtgtattttccagcttcctgtctttacaccaaaataaagtattgacacaagagatctcttcctgccaaggtttttagttcattgccagtttagtctttttgacccatgtgtaattaatttttctcaacccaaagtaagattgagtcccctttgagatgcattagagcagtccaacccagaatggcacacactgctctgctgtagcatcatgtcagggcttcctggactcagtacacctctcagtttgtcttttaaaaaacagctgaatctttactacctatttagttctccttgttaaagaaacaggggtgggaataaaatggatttaggacacccagtttgaattgcagtttttttttttctgacacatggccagggctgtggtgccagcttaatggagtaggctgtccttggcacttgcatgtgtgaaaggagggttttgcctcttcttgagcatggcttgagttggtaaggaaagctgtaactcacgaagccctgagacctgctacccctaagatcgagcttgttttcagtgactggcttgagtcataggaggaggagtctggtacagctgcaggagagcagggccatctgaagcggtagcattgccaccatctccctctcatctagagcagttttcttatgccttggtttgagctgaatttgatgtgaattcttttgctgcttaataaagtgacctctaggtgcattagaatgcgaaggcaaatagttgcaataaatcacctgcacaagcaaaaaaaaaaaa

SEQ ID NO: 11581 - DNA, 454 bp, Homo sapiens
  misc_feature (1)...(454): n = a,t,c or g
gaagatgctatagggagaaaatctgttgaaatactatttgaataagatgaatatatttaaagctagaaggccagttacttgcattttaggggtagtaaagaaattgaccaagtttatcaaaacaccattgggctatccatcttggaaaacacaaagagtattacaaaagtgcataaaactgacaaagagcccaaggcggatcaatacttttagaaaatggagaattatgctttagaaagccacagacctgaagttttgctactcttctttcaaaaactgttttccagaaatcagtcttaaaacactaaggaacaaaatggaaatcaaggcaaggcaggaaccagccccatttaaaaatttgactttcagtggagtaaangttttgtttcacctnactttnttttttttgaaacggggtttggcaaccnccgtctccggggtttcaggcatttct

SEQ ID NO: 11582 - DNA, 1099 bp, Homo sapiens
gtcatatagattttaatagattttctgattaactcatcacagtagtcgtttttactgtaatgatatgcagctttactacactagtataaataaaaacagataaatacagctctaggcaacattacagattaactaagcattcttcgtgaaccaaaactgaaaacaattaattattaagaagaagagatgctgacacccttgcccattctcatcataccttctcaaaaagggtattcaaacaaggcgctacacttattatattggtaaattaatttgccaattagccagggcacaacaatttcatggtctccactatttcattattttggttgaaaaggagacacacttcaatgtatgaaaaagaaaaatggaacagataacaccaaagaaaaccactaaatgcattaaaaatacgggcacttttcctggtattttagcagtaagatagaaatactagggatagaaatataccaaaaaacaaaattaatgctttaattaatatccaccctgaaatgtcagtctctgaagcaagatgggcaattaaaggaggagcagaaataaaaaagggaaatatgataaaataaactccatgtgaagttttacgaagctatctgcaaagaaaccgatttgtcctttgaaggctattaactcaggacaattaagttatccagcagccatgctgaggagttcatagtctagcaatacgttgcacacaggcaaatacacttaagacgagttggagatatacagaactatcatttagaaatgattttactctggatggctcaaaaaactttgaaagggctatgaagaaaacttgaagtctgtcaaaggagagaagtaataaggaataattttaggcagatagcacagctaagaatgtttcccaaaatcccgaaaattttgctcaactttcaatcctcattcttatatggcttcatgatcttatgtcttcaggatcttacagatcttaataggtatactataattaagaactaggaagtgaagaatcactttcaaaatgtaaaaacagctcattgccagttgtgtttcagaaaatgtctgtctgggcccaggcgcagtggcccacgcctgtaat

SEQ ID NO: 11583 - DNA, 124 bp, Homo sapiens
gccctacccagtttcagggacctgtgctaacttccggcctcagcgttcttcttattcactcagaccctggcgagcaccttcctccttattcttttacagaagtaccaaagccaagcaaacataa

SEQ ID NO: 11584 - DNA, 324 bp, Homo sapiens
gtccacatggagcagagttaaaggcctgtggcctctgcttgcgggctgcatggcgagcattgtgcccgagaacactgggtcactgcctgtacactgactcccgccttgtgccaggccctaaggacccagagaccagagtatcagcccttacccctgagccctagtctagtgcaaggggctgtcagcgcggtgtgagggagggcagaatgtggagcacgtggcagtggctgcaggtggcacgggtgacctggcccccgtgatgatgcagcccagcccagagtgcctggtagagcgctcagctccttgagagagagagagaatgat

SEQ ID NO: 11585 - DNA, 321 bp, Homo sapiens
gaaaagcttgccacctgctgtcagaccggcgcttgtgtggagccaggggctgtaggtaccccggctgagtagcctctcagatgtccatggtcctggctgcacgccagcgtgggggcaggcaggcggacgctcaagaaaaacggaggcaccgatatgagtagtaattgagaacgagggttcatgatcctcatctgatttcaatccctgctcctccacccaaaatgtgtggccttgaaggagttaaccaatttaaattttagtttcctcagtgggaagataataaatccgctacctcataaaggtttggtgagaattaactca

SEQ ID NO: 11586 - DNA, 112 bp, Homo sapiens
gggagcagagacaccagcctatctggtttcaaagacctcttcagcatgaagccggaccagtccaacgtcaggcggatgcacacggctgtgaagctcaatggcgtcgtcctca

SEQ ID NO: 11587 - DNA, 552 bp, Homo sapiens
aataacatccagccggggacataaaatacatttctgggacagtatttttaaagtctgtttttaacttttgtcttcaagagctactttcttcttgctgttctgaccagtgacctttttctgtttatccttagctttttctaagaaacattttggagttgtactaatgctctccctttccaatggtttcttaatcatctttttcttttgtttgcttagtagtttctgaaaaccttttatgtattctggtacaggacacccagcctgctgtataacattagcaacgcttcttaataatggcttatcatcctcagtgaaaaatgtaattgcttttcccttattccctgctcttccagttcgacctatcctgtggatatattccactgagctagttggaaagtcatagttgatcaccaagttcacacctttaaaatcaatccctcttgctagcaaggctgtacaaatcagaacccagatttttcctgctctgaaactgtggactgtgttatctctctgttgttgtgttctctctgcatgaataacatccacattaat

SEQ ID NO: 11588 - DNA, 414 bp, Homo sapiens
  misc_feature (1)...(414): n = a,t,c or g
tttttttttgtttgtttgttaggatcaaagtcgttaacatctgatgtacatggaagcacttagttttaaaaaaaaaacaaaactttttccaannnnnnnnnnnnnnnnnnnnnnnnnnnnnnnnnnnnnnnnnnnnnnnnnnnnnnnnnnnnnnnnnnnnnnnnnnnnnnnnnnnnnnnnnnnnnnnnnnnnnnnnnnnnnnnnnnnnnnnnnnnnnnnnnnnnnnnnnnnnnnnnnnnnnnnnnnnnnnnnnnnnnnnnnnnnnnnnnnnnnnnncctggcgacagagcgagagtccgcctgggcaagcactaccggaagccttcctattcccagctctcggtagatccaggatccactgctcgtcccagttctccagctgacagatcatctcaggtttgggaaactgaaatc

SEQ ID NO: 11589 - DNA, 485 bp, Homo sapiens
  misc_feature (1)...(485): n = a,t,c or g
aaacaatgccacatttggtggggaaaaaatttgaatgtgaaaactaaaacgggtccantgtangccccccccagataaacgctgtgtaatgggttgccantctttccagccagggacccctgtgaaagtaggtgccctaacagatatccccttgaacctcacccatgtgnatggtatttccacttcctatcatccctgagttccatagttccttgggctatactgctgagcctcagaactgctggtacacttttagttctttagctatttgagaaactagatctatatatgagtgctttgtgaaagcggagtacacatattcttccctattcccccaataagtacaactaaaaatcctagacattatatgcaaaacaatcataagacaactctgaaaggtggagagaataaggcacaccagctagggaggtctcaaggcaaaacacaccagggagttccctggaatttcttttttgcttcaaatc

SEQ ID NO: 11590 - DNA, 208 bp, Homo sapiens
gagtgaatgaatgaataagtgaatgattgcagagttctatacagaatcaaggacaaattcccacagcatgccatgaaatgttcatttttaggctgatttaaacctgatcatctcagaactttggttgcagttaagtcattggttcattcactttgtcatttatccacctatttattctatacaggagtcatttctttttttttttttt

SEQ ID NO: 11591 - DNA, 255 bp, Homo sapiens
  misc_feature (1)...(255): n = a,t,c or g
gctttgaatattaatctttgtccacactgctgattctttcctaggggggtttccttgaactaggattgctgtgcattttgccttagctgtagtatttactatgaatagactctggagtctaggtttgactgaccgagtggagagagtgtctcaggccgggcaggctgattggggtggctaggaatcacagtaacacattgtgatggagaagtattcaactggtccaagcnagggcccggaatagcccccggggaa

SEQ ID NO: 11592 - DNA, 490 bp, Homo sapiens
  misc_feature (1)...(490): n = a,t,c or g
ctggaattccaagaccaatgcaccagcagaattagtgtctggtgaaggctgatctctgcttccaagatggcacctcattgctgcatcctccacagtggaggaatgtatgtcctcacatggtggaagggacagaagggaaagaggagcaaaatgctttcaaaagagcatttaatctcattcattactcagtcacctcttaaaggccacatcctttgatactgttgcctnnnnnnnnnnnnnnnnnnnnnnnnnnnnnnnnnnnnnnnnaacatccaaaccatagcaacataaatgtatagaatatttcacacaaagcagagtgcctgggtaatgaccagatataaagaagtatttgaaatgaccttacctccaagatgcttatactcttagaaaagttgacaggtacagatggctgtaatttgaagcagcaggtaggattcattgcacctattattcattaaacacctgttgtatgtcttctactgtaaaa

SEQ ID NO: 11593 - DNA, 362 bp, Homo sapiens
cagagagaaatgccatcatgcttactgctcttttggattcttcatgcagtggcttcccatttgctctgggaacagtgcctctgtgctggttatatgtatgcaccacatgtgcacacacgggtgtcggtgcaactcaccagcaggtgtgcagtaggcaagcttgaaggtggcccatgcttctctgttgtcacacaacacctttccctgtttctcttcagttgtcctctgatattttcacagcctgttagtggcagctgatctgtagaggtatgaaaatacagccccaaagggggaatttgtcatggggaagggccagccactggactacttgatcttggagaccacattttagatggaaaatg

SEQ ID NO: 11594 - DNA, 505 bp, Homo sapiens
ggtctataaaactgtgtgactctgaaaaggatgatgttacgtctgtaatggttgacactgaatgttcttcatatttattaaccaaagggaacagggtgcaaagtagcatgttcagtgtgatctcatttttgtaaaacaatttgcatgcatgtgcatgccttaagtgtgcaagcaagccttgtagaggaagaaatctggaagggcacacattaaaacattgacaatgggccgggcgtgagccaccgacgccaggccgacatggtgattcttaattgctatgtcattctttttttctgaacatattaaaagagaaataacaaagtgggggaagtacttgcagacatttaagaagaataagtatctataatatctggaagttttttaaatcagtgaaaaaaaaaaaaagacaaaatagcctgatagcaaaaatggacgaaggtcaagagcaggcggtttacaaaggaagaaatgcaaatgctcaataaaattgggactttacttgtgc

SEQ ID NO: 11595 - DNA, 1225 bp, Homo sapiens
cctccctccctgctccaactcctcctccttctccatgcctctgttcctcctgctcttacttgtcctgctcctgctgctcgaggacgctggagcccagcaaggtgatggatgtggacacactgtactaggccctgagagtggaacccttacatccataaactacccacagacctatcccaacagcactgtttgtgaatggggagatccgtgtaaagatggggagagagagttcgcatcaaatttgggtgactttgacattgaaggattctgattcttggtcactttaattacttgaggaatttataatgggaattgggaggtcaggcggaactggaaataggggcaaatactgtggtctggggttgcaaatgaaccattcaattgaatcaaaaggcaatgaaatcacattgctgttcatgagtggaatccatgtttctggacgcggatttttggcctcatactctgttatagataaacaagatctaattacttgtttggacactgcatccaattttttggaacctgagttcagtaagtactgccccagctggttgtctgcttccttttgctgagatatctggaacaattcctcatggatatagagattcctcgccattgtgcatggctggtgtgcatgcaggagtagtgtcaaacacgttgggcggccaaatcagtgttgtaattagtaaaggtattccctattatgaaagttctttggctaacaacgtcacatctgtggtgggacacttatctacaagtctttttacatttaagacaagtggatgttatggaacactggggatggagtctggtgtgatcgcggatcctcaaataacagcatcatctgtgctggagtggactgaccacacagggcaagagaacagttggaaacccaaaaaagccaggctgaaaaaacctggaccgccttgggctgcttttgccactgatgaataccagtggttacaaatagatttgaataaggaaaagaaaataacaggcattataaccactggatccaccatggtggagcacaattactatgtgtctgcctacagaatcctgtacagtgatgatgggcagaaatggactgtgtacagagagcctggtcgtggagcaagataagatatttcaaggaaacaaaagaattatcaccaggatggtgcgtaataactttttgccaccaattattgcacgttttattagagtgaatcctacccaatggcag

SEQ ID NO: 11596 - DNA, 306 bp, Homo sapiens
  misc_feature (1)...(306): n = a,t,c or g
gaaggatcttactctttctgtttaggatcaagctcaaatagttaagggttataaatgaggatgacgtggccgggcnnnnnnnnnnnnnnnnnnnnnnnnnnnnnnnnnnnnnnnnnnnnnnnnnnnnnnnnnnnnnnnnnnnnnnnnnnnnnnnnnnnnnnnnnnnnnnnnnnnnnnnnnnnnnnnnnnnnnnnngacaacaaaaaaaattaggccagggcgtggtggtnggcgcctgttagtcccagcttgaggcttgaggcaggagaactgctttnggacccngggaggcgggaggttncggtt

SEQ ID NO: 11597 - DNA, 349 bp, Homo sapiens
gaggagaagtgaagatcagagattggggagagagcgtcggtagaatgtgaggctttgaatgatgatgccttctgtcctgcatagtagggggagccagggcagagttttaaaatagctcctacagtggtcccctccccttattgacaattttgctttcccaaaagttacccagcttgagttacccagccatcaactgtggtccaaaaacataaaatggaaaattccagaaataattcatattttaaattgcacctcttagccacttagtagctgactcagttatcaaatccactgtggcagcattgcagtgcatgtgttcaaggaacccttattttacttagtaatggcc

SEQ ID NO: 11598 - DNA, 352 bp, Homo sapiens
gggttttttttaaaaaagtattttcttaactttttaccttcatttttcaaaacaattagggtacaatttacatatagtaaagttcactctttatagttttagttatgtgagtttgtacaaacatatacaggagtgaaccactaccacaatcgaaatatagttgcatcacccccctaaaactctccaggcccttttgtagtcaactcctacccccgaccctcagattctgctaaccactgatttgttttctgcccctatagttttgctttagtatgactgtcatatcaatagaatcatacaatgagtaggcttattttatgccttcaggttttaaaaattataaacatttaca

SEQ ID NO: 11599 - DNA, 733 bp, Homo sapiens
ttttttgcttgctttccgcataaatattgcttttattacaagaaagaagagaccacctctgaagtaaggcacaacacaattccattgtcactgtggcagaagtccctgttgctcatccctttgatctcagccaagactgtggtccacgggcctaaggcacttgagcttttccctcaactgaagtgtagggggtgcctgagagctgagcctcgtgggagtgtccatggtctctggacctgcatcgaagttcatgtgtttccactggtgctggtccagcccatccagttcaggggcatcaagggggctgaggccccggtagccactgtagaccctgtgactatcaactgacaccgtcactgggctccattgggcaaatgtagtccgtcgattcatcgaacttcttttttcttatgtttccgaagtgtgaaaatcctagtttccttggccggactttggctgtggtggtcagtggtgtgtaagctggtgaggccattttctctcgcttttcctgttcagctccggaccaatcaaggcattgaacttggtggtcaggtggcgcctgaggagcgtcttttgtggggggatgttgagaagcatagcccagggtgtccccagtgaagcgtggctccaggataatgaggcctccatggactccactccctcgaagattgggtgcatactctgccaggtccacagatcgtaaccactccatcaccctgtggttggaccactg

SEQ ID NO: 11600 - DNA, 699 bp, Homo sapiens
  misc_feature (1)...(699): n = a,t,c or g
tttttagtaggaatgttttattagcaaagaagtttcagagagtgggtggatcagggctctatcacttggtccccacctcaccttggtggggccagagtgagccccttcctgccacagtcaccccaactgaaattgcctttctcttcggccagtgttagcctctgagcaggggaccctggacccttctgtgcgccaaaggctgaggtgactgacgaggagatctccccacagctaggtgtagtgagccagacgaggcagcttactgaacctgggggttctctccattgtcaccgcattctccttcaccaggtgtggctgtctgggagccagggggtgactcgctctgggtgtcgggctggcccgagcttcaggtgggcatgtagcagagcggccacctcatcctgctcagcctccagggcgatggccagggcactggtgcctncattgtctaggatggcaggggtcacagcctggctgggtgagcagcagccgcacggtgtccaggcgcccatactcactggcacacatcagcgctgtggccccatccgcatcctgcgcattcacatcagccccacacgccagtagggttgcccaccatgtctgtcggccatggctgatggccagcatgaaggctgtctgccccgtctgactggccttggcattgacatcacccatgcagaagagtctctggaccacagc

SEQ ID NO: 11601 - DNA, 402 bp, Homo sapiens
ctcatgttatgtttgcggaggaaccgtaacaggagatcaatggccataggaagcccgagaattagttcccacagacccagttcctgatgaattcccagcccaaaagaaccaccctgacaatttttaggttctaaaagtctcaattattagacagtattgcacagctattgaaggaaaacaattcactcattctatagggcggcttagttgtcttgggcaaaagctgtataatggtaccacaaaaacagttacatggtggagttccaattacacagaaagaaatccattcagtaaatttccaaagttgcagactgtttaggcccacccagaattccaccagggactgggacagcccccaccaggttatactggatatgtgggacacagagcttatttttaagg

SEQ ID NO: 11602 - DNA, 478 bp, Homo sapiens
gtttttaaaacctgaaggaaattttatttttcttcccactgaggtgtgatccaccctcttggtggggcctggagagcttctttaaacaatccacgtttaaaagtgccttgcgctagaatttctgacaccccgaggggcagacagtgttgggccaattgggtgggtgtttggggctgagagatcagggttcctcactggaacatctttctcaatcaagtgggcaaacctgatctacagcccggcccaggtgtcccggattcccactcattctcaggcctgccggggagagcacactctcgatttctgcccgttgttgtcctggactcgaagggacagggaggggctggtcacttcctccgtgcctgggcctggttactctgtcccttctgatgctgctgcttaacctgggccaggatgtctcggatcttccgttgagccatctgactggcatagaaatgtccgatgattttcacgatga

SEQ ID NO: 11603 - DNA, 323 bp, Homo sapiens
  misc_feature (1)...(323): n = a,t,c or g
gaaactagaagttgaaattataaacaactgggacagcgtgcccctgggccagagctgtgtgtgtgcatgcatgtgtgtgctaaccagctgcaccagatgttaaccccgtagttgctgactgaggggaaggggtctgggggagggggacagtggccagagcagcagggatggggtacttaagatcctgcagcacgccgtnnnnnnnnnnnnnnnnnnnnnnnnnnnnnnnnnnnnnnnnnnnnnnnnnnnnnnnnnnnnnnnnnnnnnnnnnnnnnnncctgnctacntgatggaactatttannctgcnctnnnatanatatt

SEQ ID NO: 11604 - DNA, 371 bp, Homo sapiens
gccaggagcccaccccgtcccagcctacatttggataataacctttcaaagactccccgatactatatttttcaaaggcacaggtaaatatgttgcctgcctacataaagcaagtttaaaataaaatatgctgcttggggaattttcactgtgattagaaattgcttcaaaagtatacttgatttggacttagagtctcatgggtaggccaaactatttcccagaaattagaaaggcagacttgagagcagtctgtcagcaagcattgccaactattctgtaagtattaatgaacacccatgagtgcagaactattaatttacatcacagtgccaccactgatgacactgaagcagtaatctgttaaatgc

SEQ ID NO: 11605 - DNA, 799 bp, Homo sapiens
ttttttttttttttttttctgtgcatattttattgaataaataaaaattttattggtttggtttttaaaacctataaacaatattcttagtttgatcacttaaaacatacaactttatgtaaccaaaatgcttaaaggattttgttcactgagtgttggctatttatacctatacatatgaaaatctgacctgtcaaaactggttttgcagtagccagatttgagatatatgtggatttctaaaaggttaacttgtcaaattatgagatctaatacaacacccaggtattaagggaaaaaatgattttgcaaccccaagttgggacttaacataagaaatccttatggtgttgccaacgttaaaaattctattgagcactttcatttttcagaataaaacaggataagcaaataactcacaacagtacctcatagtcttctataaatagctaagctatactttacagctataagaacgtgatatttgtatttccctgagagcgtagtttgctttgagttcaagggcatggtgtatgtgtatatgtgtgtttcccgaagccattgagaccagaatagatgaaagctaagacgagaacatgaatctgttggtgttctgatgagcttagctccctgcctgtttcagatcaaccttggcaactggagtcccttaacctcatctacagattccgctccaccaaagactctgggccaccttccctctaggacaggagacccagctgagcagctcagaggccccacagtaagttggcccaaatgctgggcctgctctaacttgtgc

SEQ ID NO: 11606 - DNA, 401 bp, Homo sapiens
  misc_feature (1)...(401): n = a,t,c or g
ttttttattattccttccatcatttatttaggaaaaagttttatgtattagggtaaagtggtagaagttaacctagaatctaataatctccaatcacccattcctgatctaatagtagccatgagaaaaaatctctagaaagaatcatacctctcaaaaaataaaaaataaaacaaannnnnnnnnnnnnnnnnnnnnnnnnnnnnnnnnnnnnnnnnnnnnnnnnnnnnnnnnnnnnnnnnnnnnnntaggcatatcgcttgcagcctgggcaacgtggcgaagccgtctctaccaaaaaatacaaaaagtagccgggcatagtgacatacacctgagcccaggaggttaagcctacattgagccgtgattgtaccagtgtactctagccagggtgacag

SEQ ID NO: 11607 - DNA, 323 bp, Homo sapiens
  misc_feature (1)...(323): n = a,t,c or g
gctcctttctactgactttgaaatggaagattaaatttcagaaaccttttgattgcacacatgcatcccacagtgtttcatacaccaatacatatataggtagtttgaattctgtgcaccaagccacttgcactgacactgatactaatgtactgtgagagagcagcatactttaaacacttgccgatgtgaatcagacttgatagaacttgagcgtgcgtaagcaccttgatgtcttatccatttggaagcttattgttacagtgcgttaccttttctttntttcttttnnnttnttnnnggnnaangttntaattnggttc

SEQ ID NO: 11608 - DNA, 120 bp, Homo sapiens
taccgttttttcaaccggttgtcgttaaaccctaaaaaataagttgttctacctttctgttctacagacccacagatccagggcagtcagcggtggcagtgtttgaaccatcaattggga

SEQ ID NO: 11609 - DNA, 174 bp, Homo sapiens
ttcagatgaaaactgtagaagttggaatgaagggacgttaagtgggcagtcatctgaaagcggaattgaggaagaacttcatcatgaaagtggacagtatcaaatggaacaaaatggcagccctacttcctctaaatcaagaaagggagaagcctcagataacaaattgtatac

SEQ ID NO: 11610 - DNA, 401 bp, Homo sapiens
gaggagacactactggcctgggtgacctccaaattcgagctctatacctgcctcagccctctggtgaccaaggcaggtgcaatgcttggtagtgaccaaactcctgcgctgggtgaagaaagaggaggaccggctcttcattcgttacccacccaagtactccacaccaccagccacctctacggaccaagctgcccataatgggcttgttcactggactctgatagttggagctcccagaccagggcagtgctgggagcaaccacctttgttttttaccttctgtctaccctgggaaatgtgtgtggggggtgtgtctgtggccagtcattgtcttcccttaagcaatggggggcaaggtctgaggggcccaccgatggaggagagatggttggcagccg

SEQ ID NO: 11611 - DNA, 120 bp, Homo sapiens
gcagcttaaaccaaaagctattgggttaggaaaaaatgagttagggaaaatggattgggggaacgggttagggaaaaaaccacgagacaaacccaagtttttttggtcctgttttttttg

SEQ ID NO: 11612 - DNA, 475 bp, Homo sapiens
  misc_feature (1)...(475): n = a,t,c or g
aagcaggggtcgactactgctgggggaggagcaagaaactcacccaagaccagtgcaagtgagacaggttttgctgccacagagaagggggaaggattgctaaacatggaaaagaaatcccaccttagagggccagatgtacagagcctgcctaatactggaagctgggagcacgacaaaagagaacatgcccattcctgcccagcctaacatgttgtaataaggaagagcaggccactgctcgggagaagagtacggagcatggagaattacctcatttaaggcccaggcactgcaggactggctggaagttgagggaggtcaacgaacactcacacaaaaagcccctngcaccccagctccaactcaaagttcaagataaccgcagtctacctttgtaagaatgtgaaggctgtgggtgcactggaagtaacaacaaaactcaaactcaggtcaacccctgagattgactcag

SEQ ID NO: 11613 - DNA, 190 bp, Homo sapiens
tttaaaagtccaatgtctctctctttttttttcttttggttgctcatgctttgggtttcttatctaaggaaaccattgcctaaatctaaggtcatgaagctttccccaatactttcttcttaagagttttatagcttttgctctttcacttaaggtctttgggtttgacttaagttaactattttttttt

SEQ ID NO: 11614 - DNA, 358 bp, Homo sapiens
ataaacagcaaacactgatttctcattctggaggtcagacatgagagaccacagtgccagcacggttgggttcggatgaggccactcttcccggtggcaaactgccaccttctcttgtggaaagagcttgctagcctccagcctcttcttataagggtactggtcccattcatgaggactccaccctcattacctaattacctagcaaagattccacctccaaataccataacattggagtatttcccatctccccccaaaaaagtgccaaatggtctgatgtacaaggaaaaaaattcagtcactgtgctccagatctgcaaattgcacatcttgattttcagcaccatagagacaa

SEQ ID NO: 11615 - DNA, 316 bp, Homo sapiens
  misc_feature (1)...(316): n = a,t,c or g
cttaaagttttttgtagaggtggggggtttctctgtgttgcccgggctggtcttttaactcctgagctcaagcgatcnnnnnnnnnnnnnnnnnnnnnnnnnnnnnnnnnnnnnnnnnnnnnnnnnnnnnnnnnnnnnnnnnnnnnnnnnnnnnnnnnnnnnnnnnnnnnnnnnnnnnnnnnnnnnnnnnnnnnnnnnnnnnnnnnnnnnnnnnnnnnnnnnnnnnnnnnnnnnnnnnncgaaaccatcagttaaaacaaacaaacaaacaaaggacaagctctcccttttcccagagaagagcttgtgtgagctg

SEQ ID NO: 11616 - DNA, 1246 bp, Homo sapiens
aggcttttgattaatcaatattcttttcaagtttgctgtgaagagtttagttctcttcaaaatttcttaactaatctgatttttaagaattctctttgcagtgtttagcttcctattcacattcttaaaattgctttggtgttaccatgagtctaaaatgaagtttagccttccttttgtttcattctgagaacttctatattatattacctttaaaaattgtttatgatattaaatttaaaatacaaacagctctctttttttttttttttttttttaatcatccagcccaaagtggcaaaaacagctcttttctcatttggcaccaccaataacgcaagttaaaaataatgttgagtttattatacttttgacctgtttagctcaacagggtgaaggcatgtaaagaatgtggacttctgaggaattttcttttaaaaagaacataatgaagtaacattttaattactcaaggactacttttggttgaagtttataatctagatacctctactttttgtttttgctgttcgacagttcacaaagaccttcagcaatttacagggtaaaatcgttgaagtagtggaggtgaaacctgaaatttaaaattattctgtaaatactatagggaaagaggctgagcttagaatcttttggttgttcatgtgttctgtgctcttatcatcacacaggtccaggtgttgttacctcaggattctggaagtactaagccgtagttaaccaggctggatagatcttcagccaatcttctttcattatactgctgcttttctgtttcttaaaaaacaaaaatcaatgaacaacttctttagaaggaagcaccactgttcaattggttaactgaaagtatgaatcactgccgctttgcttggcccacctgtttgctttttctcacaggttttatttatctgaatgattgttgcatttgaatactgtagccatggtgagtgagcagttgaagacttcctttctgcaccttcatagttaagggttcatcttctcaagaaataaagttgtgcctgggttgtttcaattctgtagatcacctagaaactaggtaacaaggcccttggatcacaatgagcacattgcaggtctttggaaatgctgggaaggggttacattcaagtaactgctgacgtccttcctctctgtcagacccatgttggcctgtaattatatttttctgaatctaaaaacaaatagaaatttctgatatcttttc

SEQ ID NO: 11617 - DNA, 124 bp, Homo sapiens
gcggcacgaggctctttgtgtacgtttcccttacctcctgggtcctcaactgtcttcccatcttgattctgtgcataggttgtggaaaggaggagaacccctgcttgaaattcgagaggagttt

SEQ ID NO: 11618 - DNA, 258 bp, Homo sapiens
  misc_feature (1)...(258): n = a,t,c or g
gagatcagaaatatgttgtgttcccttttaaattgccttcatttgtcaatttcttgggaagataatttagcacctactcttagagcaattttgaagcagatctttgctatatttcttttttttttgnttganacggagtctacctatggaccccnaggcgtnctgcggnntgnncngcctnaactttgnctcngtnatnanngncntccctgantcaagncatatnnctggannnnnctnactanttgngagattcct

SEQ ID NO: 11619 - DNA, 246 bp, Homo sapiens
ggtatccctgaaggagcaaaatacttaaaaaggaaagacattgaatccattagaaactttgcagctgaccattttaatcaggaaatcttacctgtattccttaacgccaatagaaactggaattctccagttgctaatttcataatggagtcacaaagactggaattaatcagactaatggagacccaagaggaagatgtggtcctactaactgctggagagcacaataaagcagtaagaaaaatt

SEQ ID NO: 11620 - DNA, 110 bp, Homo sapiens
gtgcagctgccaaggggccaagggatgagctggggccctccttcccaatggcatctccccctggtctggaactgaagacactgagcaatggtccccaaagccccaaggag

SEQ ID NO: 11621 - DNA, 103 bp, Homo sapiens
ggaaaactgtaagggaggagaaggaggggaatacattccctatatgggatgttcctactgttaactctgggggaacagatagctccgggggcagcagatgagt

SEQ ID NO: 11622 - DNA, 1207 bp, Homo sapiens
gccggagctgccgcgccagtcgcctagcaggtcctctaccggcttattcctgtgccggatcttcatcggcacaggggccactgagacgtttctgcctccctctttcttcctccgctctttctcttccctctcgtttagtttgcctgggagcttgaaaggagaaagcacggggtcgccccaaaccccttctgcttctgcccatcacaagtgccactaccgccatgggcctcactatctcctccctcttctcccgactatttggcaagaagcagatgcgcattttgatggttggattggatgctgctgggcaagacaaccattctgtataaactgaagttaggggagatagtcaccaccattcctaccattggttttaatgtggaaacagtagaatataagaacatttgttttcacagtatgggatgttggtggtcaagatagaattaggcctctctggaagcattacttccagaatacccagggtcttatttttgtggtagatagcaacgatcgtgaaagaattcaggaagtagcagatgagctgcagaaaatgcttctggtagatgaattgagagatgcagtgctgctactttttgcaaacaaacaggatttgccaaatgctatggccatcagtgaaatgacagataaactagggcttcagtctcttcgtaacagaacatggtatgttcaagccacttgtgcaacacaaggaactggtctgtatgaaggacttgactggctgtcaaatgagctttcaaaacgttaaatgaaattggatatctaaccaaggacatgtttgataaaattggtctaggcttgttacaacaaaattagtttgtatcttggttattaaacagtatctgggactggtttgggcagaatattaaacttattttgttgccaattattgtttaccgagtataatgttgctatttagcaatgtgcttggttttaaagaaattctccttgggaaaaaagtatcctcttttaattttacttcccataagcgtaaatgcctggacatagctcttgtgcaacctttaaataaattgttttgagtgttttttgagccccagacaaataatgttttaaagttatccccttgctactttactgatacctttatcattcctgagacagtttgctaatttaaaaatgtaggcattcccatttgtatttatttctctcccttgccaaaagatttcta

SEQ ID NO: 11623 - DNA, 406 bp, Homo sapiens
  misc_feature (1)...(406): n = a,t,c or g
gggccaattgatgataccatttggtaccataaaacctgatttgattgaccctggggataacaggtaccaccacactcacagattcttcccttatccatgtcagagtgttggaaagataaagttattttttccacaacattttggggactcctgatatatatttctggtcatattttgaggcaccagtgtttagtccctgattgacttttatttgactctcagcagttctgtctcagccccatagccatgggaatttccttccctcattgtcacagataatgatgttctgaacttctgcctttcccccgtacaacttgtatgaatttggggtacttttagttgtaaggaactgaatacccaagggggnttaaactaggagggcttttattatttcccnaataggcaa

SEQ ID NO: 11624 - DNA, 554 bp, Homo sapiens
  misc_feature (1)...(554): n = a,t,c or g
ctggatcttgctctagtgtgagcactcctgaacttcacatattctccttgtcccaaatgcaagggtttactctcaagagactctaggctcactgcccataaacctttgagttggaccaaatcttaacatccctgtggatttgctcatactgccctgggcagaactctttccttctttggaagtctgaattacttcatatttgacatctattttgaaattctgttttacagggtttaggatgggggtaggtaggcacaggaaagagagtagagcattctctcttttctagcaatttccattatcatgccccttctagcttttagaccagcagttctgagacagggattatttgcttttgtttgataggtcaggttgtctgggatggtttgccaatagaaattctatagactattattgttcaaagagcaagaattatacttaactctcttcacttatatgtgaggctctggccatacttaacagataccacgtggcactaacacagatatgttgtgcctgctgngctcttcccatggtcccaaacaaggccacag

SEQ ID NO: 11625 - DNA, 518 bp, Homo sapiens
tttttcggtcataagtttaatgaagtctgaaaggtaagcgccatcgtggtcagagatacggaggcccggtcagactctccctctgcacctcaatggaaacgatgtggtgtccgggtaccatggccaggcccagcacacggggctccccggcagagaaggaatccgacggcttgaggaactcctgcgccgagcccaggatgacattgcagtcacggtcagtgcagaggaagcagccgaccagtgtccgtccatctgtcatgcgaatgcgcatagtcttgttgagcagcgcctctagctgctgtcgggcgcgctcagccgccgagtcctcgcgctctccgtccgaatccccagcactggagctgctctgacgccgactgcaacagccattctcttctcgtagcagcatggtcggtccagctccggccatttgcccggaggcctcctctgggcctttcaacttcctaagcacctttcaggttgggtggtccgagatctcgcgagcgctcccgacctctttc

SEQ ID NO: 11626 - DNA, 622 bp, Homo sapiens
  misc_feature (1)...(622): n = a,t,c or g
tccccctcaagagacccccacagccctcaaaagagttgcctattatccagatgtcccgaaattccagaaaccccaaagtccaggcaaagaaggaaactgagataatgatttaatttttttaagtcactgccaggatttcctctcaaagaaaacatctgaaaatggttgagaaagtagttcccagatcattaactattttacagagggactgaaagccagggaaaataaagaacagaatgatagtagtatcttgatattaaatttgcatcagaaatgagcaaaatatgtcaatatgaaataatttgaaatcaaattcagattcacatgtatagtgcatagttcaagaaataatgcttactcttgtaaaaaaaaaatatatatatatatatgtatcagcaggtagagtgtgggagctccaactttgttgtgaaagctgataacagagtatgattctttccagttacaaaatactgtattactttagttatagcaagcagtacatanatgacatcaacaactcaggctgctccctgacataaaagccagttccatctttactgcagatgacaggngactttccaagacctgcagaggccccctccaccccaaccttagtgcatgc

SEQ ID NO: 11627 - DNA, 516 bp, Homo sapiens
  misc_feature (1)...(516): n = a,t,c or g
tttgagatggagttgcgctctgtcttcaaaataaatcaataaatacatataaaaccaaacaggaataaccatattaatcttaggcaaagtagaattaagagcaaagacattacaaacagtgaaaaagatttacttgtgtcattaagcaatatatttcacaatgattcttaagtaattatggaccattttagcccaataatatagcaacgagaaacataaagcagaataagaaattggcaaaaatacaataccattgagaaattttaagttttctccaattgtgatagatcaagaaagcaaaaaacaaacacagaaaggatctgaaatatatctgcttgcaatcacaagctatggatttatatggttttttgctaacgaatcaatgaagacagattttattagggcattcccatattcccatacactcattttgaaaggaacatttctgtatttccngatacaatgtttctgagggtctgaatctaggcggaatagttcngggaaggntagccaggg

SEQ ID NO: 11628 - DNA, 233 bp, Homo sapiens
gaaaccaacgaaataatagggagaataattgaagctttctaatcattagactctaataaagaaactcgatacactgtaaacccaccactacattctaccgtgacgagcagaacaacctgagaagaatacagttttttactctaagcagccttggttttccttgtcacaccactagtaaacaactctgttttaaaaatctgtaattttctttttttttctgtttctttttcttg

SEQ ID NO: 11629 - DNA, 147 bp, Homo sapiens
attcggcactgagggggagctaagatcagggattcttaaccttggctgcacaccagaatcacctggcaaattaaaaatacgtggacctgccaccagagcttgtgatttaatcagagtcggcatcagagttttcaattttttatttat

SEQ ID NO: 11630 - DNA, 226 bp, Homo sapiens
gcggcacgagcaggtcaagtgccatcaactgttgctaaaaatggcaacaaagtagagtggaaatcagaaccagatacttgattttcttatgcctcaaaatgttgggagcctcgggtagggagtaccacacagtccattactcttatggaactttgtgtttgtctttaaaaagggacacaatcccaagagtcctgttagggttaacttttttaatgattaaggttaa

SEQ ID NO: 11631 - DNA, 130 bp, Homo sapiens
tacaggaataatgacatatttgtataaaaatatagaagcacaaaatatgaaaaaaaattttaaccctataaaaatgaatttacactagacaaattgtctttattctgtaatgcatactattttataaagg

SEQ ID NO: 11632 - DNA, 1328 bp, Homo sapiens
atttctcttccctcccataggcctgagagtgcagaggatgcatcttatcgactacctgctcctcctgctggttggactactggccctttctcatggccagctgcacgttgagcatgatggtgagagttgcagtaacagctcccaccagcagattctggagacaggtgagggctcccccagcctcaagatagcccctgccaatgctgactttgccttccgcttctactacctgatcgcttcggagaccccggggaagaacatctttttctccccgctgagcatctcggcggcctacgccatgctttccctgggggcctgctcacacagccgcagccagatccttgagggcctgggcttcaacctcaccgagctgtctgagtccgatgtccataggggcttccagcacctcctgcacactctcaacctccccggccatgggctggaaacacgcgtgggcagtgctctgttcctgagccacaacctgaagttccttgcaaaattcctgaatgacaccatggccgtctatgaggctaaactcttccacaccaacttctacgacactgtgggcacaatccagcttatcaacgaccacgtcaagaaggaaactcgagggaagattgtggatttggtcagtgagctcaagaaggacgtcttgatggtgctggtgaattacatttacttcaaagccctgtgggagaaaccattcattttcctcaagggaccatttccaaagatttttatgtttgatgaggacacaacagttccgggtgcccatgatgctgcaggaccaggagcatcactggtatcttcatgacagatacttgccctgctcggtgctacggatggattacaaaggagacgcaaccgtgtttttcattctccctaaccaaggcaaaatgagggagattgaagaggttctgactccagagatgctaatgaggtggaacaacttgttgcggaagaggaatttttacaagaagctagagttgcatcttcccaagttctccatttctggctcctatgtattagatcagattttgcccaggctgggcttcacggatctgttctccaagtgggctgacttatccggcatcaccaaacagcaaaaactggaggcatccaaaagtttccacaaggccaccttggacgtggatgaggctggcaccgaggctgcagcagccaccacgttcgcgatgcaaattcttctctgcccagaccaatcgccacatcctgcgattcaaccggcccttccttgtggtgatcttttccaccagcacccaggagtgtcctctttctgggcaaggtcgtcgacccccacgaaaccatag

SEQ ID NO: 11633 - DNA, 330 bp, Homo sapiens
  misc_feature (1)...(330): n = a,t,c or g
gaaaaagattacttgaattctgtctgattaaataaagtatattgtgatttttttattgcttgagccctagtgcttctgtttctccttgtgtagctattaagactcaagtatatcctatggaatctttgtgtatttggaaagtattaatttgtttttaaaaacttgaggcattaaaatgaccttttgattatcacttaacagtagatggttccttttcttcctttttctcnnnnnnnnnnnnnnnnnnnnnnnnnnnnnnnnnnnnnnnnnnnnnnnnnnnnantncannggnnccannnnggctnanngnnncctngacctntnnnctta

SEQ ID NO: 11634 - DNA, 667 bp, Homo sapiens
gttttttcttgagtataggtcacattttcctattatccagatagacactgcgaataacaggctacagaaactcagacttctgctatgttccaccaaagagaagtgccctccactcctgttttagtgcagttaacttggctatagtcaaactacaaacttctcccatacagtaagcagcagctgaaatcccagttcaattctttcagccttagctgggaaatgtggttcaggggtcagccggacttgggggaaggttaaaactggggcccccccgaaccccttccggctctctccctttctagggatttctctttgttgtgggctgccctgaggattgcctattccagctttagctggccccagccatggaaaagactgggaagtgaccaacaggctaacagccatcagaaataagaaatttccccagtgcaattctcttcttccaaatgccagcccccacctctctggtctccacctgccctttggttactctctagtgtcttcaggtagttcttgtatttttgtccacagtttacacatgttatcaatgggaggactgggcccacagtagctactcagttattaaattgttgtagctggacatggtggtgtgcacctacagtcccagctacttagggggttgaggtggggaggactgcttgagttt

SEQ ID NO: 11635 - DNA, 327 bp, Homo sapiens
ggctttctcagcgaaacaggagttctacttttggaaacaaacttctacaccctgactcttgcttggattaccataggagctgtccaaaggagaaagttatttagatgaccattacctcatcaagttctttcatgcttggagttctccaaccccagaaatgtgattttaaagttcaggacttacaaggaatttaagctgttttgtccttcagattggatcagcagagggagctggtgaaatgtgtttgagaaatcataaagctatttttagatattaacctagggcacaagaaaggtaataattatagaagctgtggcagaaatagag

SEQ ID NO: 11636 - DNA, 324 bp, Homo sapiens
  misc_feature (1)...(324): n = a,t,c or g
gattaaagaatcttactccttttatgttcctaaactttgaagattatgtttgggaagtttaaagtaagtattgtttattgtgtcatatttacacatttcagtatgatttaccgtctggacttaattggaaacgtattggcggncatatattgnagnntcctnnancctgagcttgntncaccanntntacngtccnttntttccngngntccngctcatncnnntgccctgngggcttncctncctgagtccncagctctgctgngngnccntagctgcncnggananccccntnaggtactggngntgncttccctanttagg

SEQ ID NO: 11637 - DNA, 296 bp, Homo sapiens
  misc_feature (1)...(296): n = a,t,c or g
gagcagatgccagagtaaactgttaccctaggacattgaaaagcaggggacaagattcactccatatctttttaagtacttgaatcggtacccaaatgtcagctgactgtgaataggaatatgaaactggaaattgcatttcacaggcaaatccacagtgagaattgtaaaggtattgatggggaacctgagaaactgaggttctccaattccataatgcaagggtctgcatttacctgtaggggtgttggaagtggggnaaggatattgcaagttttntaggggtntttttggca

SEQ ID NO: 11638 - DNA, 310 bp, Homo sapiens
  misc_feature (1)...(310): n = a,t,c or g
gcaaactgagcaaatcgcctaatcttccaaattctttttcctggcttgttagagcagccaagggtggggtggagcttgtgaataaaaagcctgcttcatcttcctcacgcaggagaacatggccaagcgagttgccattgtgggagctggggtcagcggcctggcctccatcaagtgctgtctggaagaaggactggagcccacctgctttgagaggagcgatgaccttggggggctgtggagatgtctgcagtgtaacnaaatgctcanattctgctgtntctggccaatgngaggtgnccantatgca

SEQ ID NO: 11639 - DNA, 326 bp, Homo sapiens
  misc_feature (1)...(326): n = a,t,c or g
gcttagctagtacgtaatagagcctttccacattctattaagaagtacaggccaggtacagtggctcacgcctgtannnnnnnnnnnnnnnnnnnnnnnnnnnnnnnnnnnnnnnnnnnnnnnnnnnnnnnggacattcttcaatggtgtatttgaacagttagctgccccctggcccatgtgcacactgttgtgcagaatctgttattccaggggnaatcgngtttnctactgngtgcagntactgnccannnngcangaacnnacttacnacntctgaagtnngctncantgtccattanntgngatncnnttantatntactg

SEQ ID NO: 11640 - DNA, 340 bp, Homo sapiens
cgccaaacttcaccctcatacgaatgggccccagtaaaacagtgggccttaataagcacgttcctttcccttcaggtgcactaagatagagaagctaaaagcagactcgggggatatgcctgaagctgcagaaagatgtatgggaacagacacacacttctccctcccagataagcacaacaaagacacagaagcagtccaagcctcttctaaactctcccaccctgaatccttataaaaaaactcttagtctgtaagagatgtgcctctgacctaactcggccagacacccctcttaggtttgtattctctaaaataaacctgtcttgactggcaagcc

SEQ ID NO: 11641 - DNA, 528 bp, Homo sapiens
gctggacatcattttatttcatataagagaggttcatcctctacatctgaggtgtgtggtgctgctaaatgctgctctaaacaggaaaccagtgcacacaaggagggcagtgaggaaaaccctctcctgagcctctgattggtgaggctgtctgagtgccctgaggtaggtccttagagcagcctgctgatggcttaggtcccctctgagtcatgtgtggtgccaatcagtaccctgggaatctattactaggtgctctgtcttcctcccagaaagcaagagcagactggaacctctggttacttcgctgagaaacggaactggaggatcctaccagagggaaggacatgcagaatctgtgtcaagggaggtgacgtgctcttaggacaagcctcacacttcaatgttcaataatttcaccacgagcagtttacactggttttctgccccgtttctcagatatgtttcagagatggagtagcagttcactttcacacagcagtcaggaattctactcctggaacatct

SEQ ID NO: 11642 - DNA, 351 bp, Homo sapiens
gcgacgagggcgacccctctgagaagctggagctggtgacaggcaccaacgtgtacatcacaagggcgcagctgatgaactgccacgtcagcgcaggcacgcggcacaaggtcctactgcggcggctcctggcctccttctttgaccggaacacgctggccaacagctgcggcaccggcatccgctcttctaccaacgatccccgtcggaagcccctggacagccgcgtgctccacgctgtcaagtactactgccagaacttcgcccccaacttcaaggagagcgagatgaatgccatcgcggccgacatgtgcaccaacgcccgccgcgtcgtgcgcaagagctggatgc

SEQ ID NO: 11643 - DNA, 346 bp, Homo sapiens
gttacaggttaacctgtatttttttaatagatgtaagtataggtatgtacttctttgctaatttccacaaatgtttcatggaataatatgaataatgacgccaactgtaatttacataagtagaatgaggatagatagaactgactgctttagggcagcctcacaaatcatagcaatttattctatttatacagggtagacagttgttcatcctgacagtgaaacactgctgataagttactttatttcctctatacctcttgataggaaagaggctgctttttgagagttcaggaagttgtagatttggtgcgtatttcatagttcctctaaaagtagtaaaatg

SEQ ID NO: 11644 - DNA, 1264 bp, Homo sapiens
ttttgctaaatgatatgatgccctcgtccgtttagaaagctcatgagctgtgtcacatagagggcctgagaaaaagcagcctttgtgaattgggagccatttgccccaaagtggagcagaaactgttgggcattttgtgcctcttcaggaattgctttggccggaaggaagttgtgtctggaagaggagggctgaaaccccatgagggccatgttagttcctggccagctttcagagcagctgtaagacattgctttgacctcatctatatttttattcttagcagtcgaaccagctttctctctccagaaagaatggtattaattctgcaagatttttgctaatcctgtttccagagaagacgaagaaggctacatcgaaatggtaatcttatatttttcacactcttcttatccttcaccccaatctgtagtcttatgagctcattgtaaaggaaacacatccttcagtaagccctgtgcaattttaaaacaaccacttgatcgtaaaaccaggccacaagcttttctagacttggaacaaatcaatttgaagttggctttctttcctgcaacattcaactcctcataccattttgagattgcagtatttcaagatagctcagggctgaggcttgcttaatttgaaaatggaaatgccagcaattcttttcaccaaggctgtgatgtcctgtttgaccccaataggtttgtagttctctggatgtccagagttcaaattgtaaaaactcaacatattacatggtcccttccaccagaacacctggtggccctgtcctgactgcttctgaaccttcctggaggatgaatcacttagagtcccattgggaaaggtacagtgccctggactgtgagtgtatcttagcctctggaagattcctattatgggtctttctatagacctgagtggatggagacttgattaaccatttgcagttaaagagtcctgatgtttcccttctagcctgttgttccttctattctcttcatcttggatgctattgagaacatgggctttttgaagatggagaggaacttttagcacctctggcaattagcagacactttagccatgacagtgcctgttctgcaatttagaaatgtagggaactcaagagagagcttctgtttgaactacgaaattttgaaaagagatcttagaaggacaatgttcaaggctctgtgacaatatactcttgagaagacaattctgccttcctatatgcaaggataatcagcaactg

SEQ ID NO: 11645 - DNA, 567 bp, Homo sapiens
ggacaagtgccacattctagatttaatcaaggcacagagaagacagatgttgatcctgcctgaaggttttagggaaggttcctggagcaccctgctcttcagggccacccatcacctggccctccatccctttctgggactctttggagccctttctcccacacagtggcaggccatctccctgacggtcatcgagaaggtccagattgctgccatagttctgggctcgctcttcctggttgccagcatctcctggctcatctggtcctcactcagcccttcagccaagtggcaacgacaggatctgctctttcagatctgctacggcatgtatggcttcatggatgtcgtctgcataggcctcatcatccatgaaggctcctctgtctaccgcatcttcaagcgctggcaggcagtgaaccagcagtggaaggtcctaaattatgacaagaccaaggacataggaggagatgcagggggagggacggcagggaagtcaggccccaggaactcacggacgggccccacctctggggcaacgagccgccccccagctgcccagcgcat

SEQ ID NO: 11646 - DNA, 346 bp, Homo sapiens
  misc_feature (1)...(346): n = a,t,c or g
ggcaagtacctgcttcacaaggtgccaggaaagagaaagtgagcagaaagagccccttataaactgtcagctttcgtgagaactcactcattatcacgagaagagcataggggaactgcccccatgatacgggtcacctgggggtttacacnnnnnnnnnnnnnnnnnnnnnnnnnnnnnnnnnnnnnnntanagcccaaaccatatcacatcctgaccatgctttatgatatagctaagaaagtctacctgctcttttcccatgctaaactctgatgatctttcctgattcctcttgccagaagctaatccagtgtggacttgagcctgtagtcttagctacttg

SEQ ID NO: 11647 - DNA, 527 bp, Homo sapiens
tttttttttgtaagcttcaagtgctgaaaagcaaaaaataccagatggtttctctaaaagaatcatttttgagaagtcacgggaggtgtcagtctcttaccaacatttagataaataaattgtacattataaaccattactgatgacgcttatgcaaggatataactatgtaaggattttaagcagtaaaaaataccgtaaatcaagacaatgttttaaccaaactgtttccaaccatgttaagttacagttgtacactaaaataataattattcatgtttgagaattagagatcttcacaaaaatacttcaaatatattcacagctggacaaaaaaatttcaccttacactgttaccatggagaaaaggttctacatttggtgtaactcctgtagcactgacaatgaaatcgcagccatatatcttttcattggtcaattccacatagacaggccacatctctgtatcagctgtaactgacttatggtctcttggaaaagtgaaggactttttcttcaaaattctc

SEQ ID NO: 11648 - DNA, 42 bp, Homo sapiens
gtttattgcagaacatatgagcagttgattagttaaagatat

SEQ ID NO: 11649 - DNA, 88 bp, Homo sapiens
atgtccatcagtggggcacttccacaataaaccacagtttatccaaacagttgaatactctgcagctttagaaaagaatgaggatgct

SEQ ID NO: 11650 - DNA, 308 bp, Homo sapiens
  misc_feature (1)...(308): n = a,t,c or g
gctggaactatatttacccttcttcctgaaacaaacaaaaaagcaggtaaaatgtgtgatactgcaatgctcaaaaccttgggacatcaggcaatgactcctgagagatggggaaacaaatgaggatgcccctctgaggaagtgcccctgccttgatcttttcaaggccatggcccaggggagagggaaccgcaggaggagccttgacagattccctggggtttggggnaggacagagctggaggagtctttggaagacccgnaaacagccattnttttcacaagggcagattacccgttttgggtgt

SEQ ID NO: 11651 - DNA, 885 bp, Homo sapiens
ctcgcttcctccgcggtcttccgagcggtcgcgtgaactgcttcctgcaggctggccatggcgcttcacgttcccaaggctccgggctttgcccagatgctcaaggagggagcgaaacacttttcaggattagaagaggctgtgtatagaaacatacaagcttgcaaggagcttgcccaaaccactcgtacagcatatggaccaaatggaatgaacaaaatggttatcaaccacttggagaagttgtttgtgacaaacgatgcagcaactattttaagagaactagaagtacagcatcctgctgcaaaaatgattgtaatggcttctcatatgcaagagcaagaagtttggagatggcacaaactttgttctggtatttgctggagctctcctggaattagctgaagaacttctgaggattggcctgtcagtttcagaggtcatagaaggttatgaaatagcctgcagaaaagctcatgagattcttcctaatttggtatgttgttctgcaaaaaaccttcgagatattgatgaagtctcatctctacttcgtacctcccataatgagtaaacaatatggtaatgaagtatttctggccaagcttattgctcaggcatgcgtatctatttttcctgattccggccatttcaatgttgataacatcagagtttgtaaaattctgggctctggtatcagtcctctacagtattgcatggcatggtttttaagaggacaccgagtagttgtcacatctcacaaagatgcaaaagagcagtgtactcttgtctgttgatggcatgataacagaactggggacagtttaagacgctgcggagattgatgatgtgaggagggagagcacctcatggcacgcaagcaagctt

SEQ ID NO: 11652 - DNA, 337 bp, Homo sapiens
gtctacctccaaaatgtatcttgtatccattcatctctctccatcttcaatctatttcaatgccccatcatctcttgcatggaggagtgtaataattggctaactggcctgttcttacattttaaaatcaaaagatgtgacaggtgaaatgcctatttcagtgtccattgatggttctgcttacacaccacctggctgcctggtgtcgcagtggcagagttgagcagtgtgaaaaagactgcttggccctttacagggaaagcaggtccactgtggcctgtgaggacgagagctctgggcaggctcggacactggcagaccctggtcctggctggcc

SEQ ID NO: 11653 - DNA, 344 bp, Homo sapiens
gcagaattctaaaatggtccccaagacttacccccactgtacacaccctgttactgtaaatttgatgtatctactaccttgactaggttacgttttatggcacagttgacctaattatccaggtggacctgccctaatcagatgagccttttaaaagcaaagaattttcttggctggttgcagaagagaaagtcagagagttgaagcatataggccattgctggcttaaagatggacgcaggtatgtagtaaggaatgtgggcaacctctaggagctgagagcagttcctggatgacagccagcaaggaaactgggacctcagtcctgcaaggaaatgaattct

SEQ ID NO: 11654 - DNA, 183 bp, Homo sapiens
gctgctcttttatgactgttacctatctcctgccatatacactgttttgaggcctattatctgatactactatagccatgccaactttcttatacttaatgtgtatctttttcttgaccaattttaagtagctttctcagcttagaatttctaattcacacgtgtagtatttttttttttttt

SEQ ID NO: 11655 - DNA, 651 bp, Homo sapiens
ttcccactggctagaagccctgggtgactttgaagagagaatactgcttggatgtgttctcattgttgtatttcgcaagagactcggtggcagcctccagcacttggtgattggaagagtcagtgggtatggagcttgggcagtcagggcacgtcatgtaaatctttttttttgaaactgggcgaagagtacagttataagcagctaaatagagaactctacttgggttgttcatataaaatattgctttgcattgaccataaactgattcaaaaaatatcctcattccacagtcttgccatgccttctttctgagcacatggcagtcagtctctagcacatccagtgtaagatagaacagagatcccaggccaccccgtctgtattcctgggcgtcgttcactcggttgagtctcagcacatagccatcctttctgtctttgttaatatcccgcagggcaaagcctgcaactgccagcacatcggagtcattgcagccccgggagagcagagccgaggggttgagggccagctggggtggagacaatttccgcagcacaggactaggatgcagagtgccaggggaaggagcagacccattctgtggagaacaaggcccaggatgggtcaagtttgtggagctgcagggac

SEQ ID NO: 11656 - DNA, 52 bp, Homo sapiens
ctgtccagcagccacggcccggggttttcaaggcttaatcgaagagatggac

SEQ ID NO: 11657 - DNA, 282 bp, Homo sapiens
  misc_feature (1)...(282): n = a,t,c or g
ggtaaaaataaagaggagtcctgaaacttgcttaaagtcaatttagtttatcaaacagctcctgcctgctatttattagacccttggctagacatctaggaaacaaaggtaaataagacccagtccctgtgctgaaggcacacacacacaaaagacaaatatttaaacacattacacccacagtaagtccaaaactgtaggnatatatcatgttccacatgtcttcagtcaagaaatatttagaaagcacctaataatctggcaaaaggcacacagagcctt

SEQ ID NO: 11658 - DNA, 137 bp, Homo sapiens
gggaataggaactataactactgtttcttcttagtttattttagccttttcattaccctgagtcacagtcaaactatgacttagaaatagaaggttacaaatagaagggttttataaaaagacccaccaaaaaaaaa

SEQ ID NO: 11659 - DNA, 418 bp, Homo sapiens
gggacgtgcattgccgctgccggcatggacaacacagtgaaggtgtgggacgtgcggactcaccggctgctgcagcattatcagttgcacagtgcagcagtgaacgggctctctttccacccgtcgggaaactacctgatcacagcctccagtgactcaaccctgaagatcctggacctgatggagggccggctgctctacacactccacgggcatcagggaccagccaccactgttgccttttcaagaacgggggagtattttgcttctggaggctctgatgaacaagtgatggtttggaagagtaactttgatattgttgatcatggagaagtcacgaaagtgccgaggcccccagccacactggccagctccatggggaatctgccagaagtggacttccctgtccccccaggca

SEQ ID NO: 11660 - DNA, 405 bp, Homo sapiens
gggctcagagaagtgaaggcatgagccccgttgttatgaagtcattagatagtagagctgggatttgaacccagagccccactctacctttgagccatgctgctactttgacaaacttttggatgactttgggagatggggaccttggggaaaaatgcactttgaaagaattggatcatttcagtagaaacctgtaaacgtgtgtcttaaaaaaaaatgtcagtgacagtttgcttctcggtgagatgaatgcagataaacctattttgactgttaacttattttgttgcttaaaagccagtgacatgtagtgttgaatttatttttcttcacaacatttaagtgtttgccacttcttgagtgacgtgtgtgaatttgggaattgcctgtactttgggaatggag

SEQ ID NO: 11661 - DNA, 379 bp, Homo sapiens
  misc_feature (1)...(379): n = a,t,c or g
gctccagacttgcaggaaccagtttgatttcccagggctgttgactttttcttgtacttgtatcattgcccctgactttgaggcttaggggaccatggagcactggggaaatcatatgccctcagtcctcactaggggctgggccatccattaaacaaaggctgtccagatgtgttaatgaggcggtgtgagtaatgggaacattatacatgattacttacataatcatgggacagatgcgggtgttagagaaagaggaaccctactggtagaagttcttgagagctattcttgagagctggtgctgcctaaaaggtctnaattggattttaagttctaattttgtaagtctgtcaagctccaccacccatgaaagagg

SEQ ID NO: 11662 - DNA, 263 bp, Homo sapiens
  misc_feature (1)...(263): n = a,t,c or g
tttatctctctgtcttccatatcatcttctgttattgttttcatctctatgccacttctttgtattctgacactttctcagatttgtcctttatgttaatgatttagtttcnttaacttttttcccctgaaagtaatgtatgttcattgaaggcaaatttagaaaaaagaaaataaaaatcacctattcaatccaatactgtttatgctttgtnggtacttttttaagacttttttcaacaaaatgtgttttgtataatattt

SEQ ID NO: 11663 - DNA, 814 bp, Homo sapiens
gaggattttacagctggatgaaatcttagaaataattcagtttaacctcctcttttttaaaccacctcactgtaaaaatagaaatccaaaggctctaggtgccaggctggcctgcccctgtcctctgctgttccctctgttgacgaattgatgagctgactcaccctgcccctccctggacctcagccctggggcttggccattgtgagcctcatctgttctgtgaagcgtgttcaactccagctgaataccagaaatgcaatgtccctgtttacttccaattcaggtagaattgtatatacttcccttatacagcttcccacactgagctgttctcaccatctctggacagatgagtaattcgtgcctgctctcccttctcagtttgtcttctgtgtgaactggccaacatggtctctcctttttagaaagtcacataatggtgagtgcaactttgtggaagtcaatgtacataaacatgtgaaatgtgcatcccagctactgtagataatgaggcagctgtatatgtaatgttgaggaacaatcaccaagataatgtcagtgggaaagcccagcacagaagaggctgaggagcacgctgccatgtatcctacgcatagtgtagctctagcaggattcgcgaggagcaagtgacagcaggtgcctctgcagagaggaactggggacaacagtggggatgaagttaatacgtcgtcattattttattttttagatattctacaatgtgaatttactatttattaaaaaataaataaaattataagcgggcatgttggctcatgcctgtaaactc

SEQ ID NO: 11664 - DNA, 331 bp, Homo sapiens
ggtaacatgaaataaacattctttcacatggctactgggaatataaatttcgctccagaaaggccgtagcagtttgacgataggtggcaaaaccttaagattgtgtactggggcccagaatttttatttctaggaatgtatcctgaggaaattatctgagatccccacaaactggcaatgtttaggaattgtccttatagcattgcatacacaagaaaaacagagaaaagcctggatccctgtcagtgggaaaaggggttcaatggaattacggtgtgtctggcatggaggcttttatggacatttaaaaattggttggaacaacggcagg

SEQ ID NO: 11665 - DNA, 307 bp, Homo sapiens
caatacgacttcatcagtctccagtgccagcaggtggtgcggatagcgctcaacgcagtagacaccatttcctacggagaattccagtttccccctaaatcgctcaacaagcgagaaggttttgggattcgaattcagtgggacaagcaaagtcgtccttccttcataaacagatggaatccctggtctaccaacgtgccctatgccactttcacagaacacccgatggctggcgcagatgagaagacagcatctctgtgtcaattggaaagcttcaaggctctgttaatccaagctgtcaaaaaag

SEQ ID NO: 11666 - DNA, 347 bp, Homo sapiens
  misc_feature (1)...(347): n = a,t,c or g
gaagcaaaaggtgcagtgtcagctaggggtggagagagaacactgtgttagggttttagaagtggacatctcaaagcagatactttgcacactgaattttaagaatactgatgaagacaggtacnnnnnnnnnnnnnnnnnnnnnnnnnnnnnnnnnnnnnnnnnnnnnnnnnnnnnnnnnnnnnnnnnnnnnnnnnnnnnnnnnnnnnnnnnnnnnnnnnnnnnnnnnnnnnnnnnnnnnnnnnnnnnnnnnnnnnnnnnnnnttgttttaaaagaatactgacagaatgctttcttttccaacagaaacctgtttccctccaatcttgtggttgcagctttccgg

SEQ ID NO: 11667 - DNA, 224 bp, Homo sapiens
ggtacctgagagagaaaggcctgcgcaccgagggcctgttccggagatccgccagcgtgcagaccgtccgcgagatccagaggctctacaaccaagggaagcccgtgaactttgacgactacggggacattcacatccctgccgtgatcctgaagaccttcctgcgagagctgccccagccgcttctgaccttccaggcctacgagcagattctcgggatcact

SEQ ID NO: 11668 - DNA, 328 bp, Homo sapiens
gcgaggaaacaccggtgagtctgtcatgaagctccttagagaagtcaacatagatagacactgcaggcaaggcccttcctaagggctgttgttggtttctacttagtctatttttaaaaaaccttaaactgccatcaaaaacagaactatggaatcttatttccactgggaattgctagtatttttctataagaatacagcagccttcagtatatttggtatgttaagagtcataaaaattacggttaccagactgcatttgggttaagaaaaacatatttagtagcttttgcagtaaaggttacgtaaacaattactttaacatcat

SEQ ID NO: 11669 - DNA, 838 bp, Homo sapiens
ccggagcactcaagtcacgtgacttacccagaagtctgagtgcagatccaagtcagaaaccctggccagtctgcctccagaccctgttccctcacacttaccctgccatgagggcacgatggaggtgacaggtcaccgagtgcacaaacccacagatacctgaacacaccgtggctttattattaacggatgccaaaagcacacttcccagaaccgcgctagaggcgggcgcccagaggcagcaggacactacagctccttcctctggggcagaaaggagggtgcctgggaagttcgagggctgcagtggggaggcagaggtcccagcaacattgtcaatggcaggcagcggcaggaggggcgaggcgtgggcgagtccatgagtccagtgaggcggcgcgactcacttgaggcggtagagaaccttgcgctgcatgcgatgctggatctcgccgcgccgcagcatgagctgcagcaccttgtggatggcgtgctccgggtatttctgcttggtgaagtccttgatgatgctgtgctcagacacctgggagccaatggcaaagcggcgcttgagctgcttctcgatgcggctcagcatctcctggtcctcctggctggtgaagccctccacccctgacagggtaccggacaaggcagcatccaacgtggacacttggaagagccgcagggcctcctccacatctgcctctgtggcgaagggctgcagcttcatcttgctgagggcttccgcgatgcgcacaatggcctccagctgccgcacagtgatggggatgctggagccgcggtcactgtccctctcgtgctgacggggccccgc

SEQ ID NO: 11670 - DNA, 198 bp, Homo sapiens
attacaggtgtgagccactgcactcagcctcagtcattgtttcattcattcatcacacatctgagtactgcagtgtgccaggatgacagtgaggtaggaacacagaccagcacggaggtgggacagagcttcctggagaagggcttttcaaggttgaataggagtttgcaatgaggaaaaaaagtcacatgatctttc

SEQ ID NO: 11671 - DNA, 353 bp, Homo sapiens
ggacagcgcctgtttactccaacccagccccagagctgaaaatttcctgtggctgccagccgtctacttcaggaaagttcccatcaagggagccaggcctctcccattttggctgcaaccccagtgtccctggtttcttgagagacatttggcctcttgggataaccagggccttctcctatgctcttcatagtgtggaactctcccccatcacagataagcctattttgtgactccacctgggtgtacttgggagcaacaaaatcaaacctcctgtaagaatatttttgtctgccaagacccgcagaggctagctaggatggagagggagacagggaagcatagccacggcc

SEQ ID NO: 11672 - DNA, 663 bp, Homo sapiens
gctgaagggaagtttgcatcctcactgtattccacagtgtcttttccagtaagcttcttttccccctgagtcttatacactggttttattaatctagtctagaacattccccagaaattaacatctaatttgttgactccctttttttgttgttgttgttttttttttaaagaacagggcaacattttttcttctgtgggcctccagccttctcccattcccttgactgccttagcgattactcagaagcagtccggggtaatgtgtctcagttccctcagtgggcctgggactgtggccgtctggtctctccaaacttgaggctcattaaaagtaggctaggtattgatcttactatctcctcatcaatcttggaggcttctattccttcttgaccatgtttgttccatgttttccgtttgaagatagttctcctcgataaagaagctggaagaatataggatgaatggttctcctgctctttggcatttttaatattgtagtgcctactccagacaataggcctgtcccttcattactttattgcttcagatatgcctcatccttctgtgttttcccaaatataagctgatttggagagctgccttaccctggtagtcttactggcttattctatacattcgtattctagttttactaagt

SEQ ID NO: 11673 - DNA, 316 bp, Homo sapiens
ggcagaaatttacaagctgatgctaaacacacatgtgacaggatcagggttcaggctcaggtctgagcctcaatctgacactctctgtggaatgggcagtcaggaaataacagataaataacatcaaatttgaaggtttgccgaggagtgagagaaaaaactccctttgcctacctcctaggcttcaaagctttctgggccaagacgtcaatttaactgcatcctgggtcaatgaggcttttgcacattaagcaaataaatcaaattactagagtttaagctgtgttttctttcagtattccaatgaatcactttt

SEQ ID NO: 11674 - DNA, 326 bp, Homo sapiens
ggtagcacacttaatgtagcctgttctcttgggttggaatttttggtttagcaaagctgaaattcagacatttattaggtcatattatttgtaaaagcattcaacacttcaagagcatcggttgtggatggtaaagtaggagtagactggtagaaaggaaggcatctcactgaagtttactcagtcatcagttaatgaagccatggaagaaccaacccctgatctgtcacttcaaaaaagagtatattaaaatgttgaggttttgagaatcaaatgcattaatggctgtgttgaaagcactttgtaaattttttattttattatat

SEQ ID NO: 11675 - DNA, 545 bp, Homo sapiens
ggaaagcctttgcactacagtaagaacaacgcaaatagaactttctgattatagtccatcaatggcattgaccaccgaaaagtacttgcatgtcatctttgtattgccaaacaataccttgattttgaagtctgtaatctttgataatagttaaacacttttcttggcatgaattgagacattcagttcattcactatacatgtgttttggtccagtctttgctttacttatgtctctgtgggcgtcagggcaaatcaggtaacttcttacttacacccttgattgtaaaacagattatacttgtcttgcctactgacctagtgtggcaatttggggggaaacatccttgggtgctgaattaggttctaggctcagggcacctaaacatgatttaaaacttgatcatttgaactagaagccaagtacaaccttcaagacaactctgtataaggtcataggtataatcactattttacagatgaggaaacgagattgactacaaatttggttttgaaaataaatcacatgctcaacagaagcagtt

SEQ ID NO: 11676 - DNA, 487 bp, Homo sapiens
tgtccagccagggctccttttattcattcaggggtgggtttttgaaacgcagtgcaacttttatataaagtcgagggtgccaggaaagtgggcctgccgggtgcagagaagcgcaagaagcttgctggaatgttccagctttaagggcgcccttgatacaccggccacagctgctggcccagaaggtgccatgtggacctcagaatgagatcagggtgcctgctccgtccagagctcaggaccatgtccacctgtcctccatatgcaaaaaaaaaaaaaaaaaaactctgaaaatatcttcacacaggatcacagactaggctccgcatggtgtctcttggcctaagaagcgttcaggccgtgcgggaactgttgaagtggaagtgttgaagtggaagtccttccacaggacagggtatcaccagctacctctggcctctctgctgcagggtccggagagcccagcattcatactggtgtctcctct

SEQ ID NO: 11677 - DNA, 300 bp, Homo sapiens
  misc_feature (1)...(300): n = a,t,c or g
ggtaattgtcttatatatctaagtgaaatcgtaacatccatcatttctttactggtttatttcagttggcataatattctcaaagtgtatcttcaaatgtgacgatttnnnnnnnnnnnnnnnnnnnnnnnnnnnnnncaaatatgtcttcaggttcctatgttatgtattttagatatagattcataaatggaatcactttatttaataatttatattatttgaagtacatttataacattataaaataattggtacatctttattttccaccgacaatcaacccaactaacttttgta

SEQ ID NO: 11678 - DNA, 135 bp, Homo sapiens
cccccctggcctatttgtagttttaaatcagtattaacagaagccaaatgtgtaagtaaagtcagccatgaatagaaaagttcattaaaaatccatttcatagcttcttggcgttcagtgtaaatacaaaaagga

SEQ ID NO: 11679 - DNA, 463 bp, Homo sapiens
gcttaaggttccataaaacagaaaaagaatttcctttgtgatgccgcagttgggcccttcagggactatagtgtgggcaagccagagtcactagggaccacctgggcaaaggtaacctagaagcctggcatgctggcaaaaggtaaagtatttcttaccaattagactgtggcccctctgtgcaaactggttagatgaacggtaaaaatcactgtttatctcctctgtaatgctttgattaatacaaaaaagaattctgaggttggtcttaggaagctgtaataaatctggtatgctttgtgtctttctgtattctgtcacgaagaggggtaccttcggatgaaatgcgtgcccagggccgataagcccgctgttcaagacggcccagcaaactggtcaatcatgtccttggaagcttaacctccctaataccatggtggccctgctttctcttttcacaacg

SEQ ID NO: 11680 - DNA, 828 bp, Homo sapiens
gactttctcctgagacatccaaaggtctttggctcaggcgttggggtagtctctgtatgtcaaggagtacagattggactatctatggctatttacctaaagcaagtcacagccacggtacttattaatgggaccaactttccttttggcattccacaggtatatcatggtcagatccatcagccccttccccattctgcacaattaatatccaccaatgccttggggttactagagctctatcgcacttttgagacaactcaagttggggccagtcaatatttgtttcctattgaagaggcccaggggcaattcctcttcattgtaggagaaggtgataagactatcaacagcaaagcacacgctgaacaagccataggacagctgaagagacatgggaagaacaactggaccctgctatcttaccctggggcaggccacctgatagaacctccctattctcctctgtgctgtgccttcaacgacccacgatttgaggttacactgggggagggagaggtgattcccacacgcagcttgcacaggaacatgcttggaaggagatccagagattttttcagggaggcacctcattccagatgtgaccagtcaactctaagaagactagatattcctagaaaataaagaagcaaatctctttaccgggaccttctctcaattttcatggcggaatgtctcccccagctgccacacacacattttgtattaattttaatgattaaaaagagcatagggtaaaaacctgatatttcacttatactgcataacaagctaaccaaactggacatggtgaataaatcataaaac

SEQ ID NO: 11681 - DNA, 238 bp, Homo sapiens
tccatatgcttcttatagttgaagaagtgaagggtcaatgactttactaaaatactattaaagtaataaagctaggacttagccccaattattcatccttaaagtccaatactttcaatatattaagttgctctttattatatgaattctaaatatcttttttaccttttgttatctaatctggaaatcctatataaatgtataattttatacatgctgactgatatcctctctagtc

SEQ ID NO: 11682 - DNA, 347 bp, Homo sapiens
taaccgttcaaagtgtttgttaattatttattaagataaacaatttcttagcccacatattcatgtttcacagatagttcaggaacacaggtacagtgacaaacttctatgtaattcaacccaaagaaatactttatgttccaaaatcactttgtactctgagagatattagccttcctcacctcaaattctttaattcaattataatttctgtagaaatctgcatatgccttctttcttggtcaggccacagcagacttacagagagctgcaaccccagggttataaggaatgctccagcaatatgaaatgacagatgcctggccagaaggcacacatcccaggtt

SEQ ID NO: 11683 - DNA, 326 bp, Homo sapiens
gcgcagtttagctgagagcctcaagctcaaggtcactatgagatttgggaggagttggtggccagggtcatagtctcatctgaaggcttgactggtgaggaatccacttacaaactaacttggcaggtctcggtccattgtcaaatggttctcttcacaggggtggccttaggacatggcagatggcttcctcacatggcaaattaaacaggagagagcaagagagatggaagtcacagtctttttataacctactcttgaatggtaccccatcacttctgctatattctattcgttagaagccagtcaataagtctagcctcagg

SEQ ID NO: 11684 - DNA, 564 bp, Homo sapiens
  misc_feature (1)...(564): n = a,t,c or g
ggccgggaggtgatcaccatctactcctaatgcccaacagcatcacggcactctgggacaggcacggaggacggcgtgggcagcctggccctgggcttggccagcgnaaacagacggcagacacacctgtcccccagtgatgccacccaagctgcccatggggcttcctacggaagtttctaggcccgtcacctagggctctcctgttcagccttaacaggctcagcaaatcagggcgtggctggacgatttccttgcatctgagggcagacgctgctaccggagtgacctgggacgtggccagatcttctcgcaggtcacaagaagccagtgagcccttgccttggtttctggaagttcttttccttggctggatttacccagtggttaggttgcatttctaccccatccagaacattcttggaagagcacccggagctgaagctgtccctgatgatgaaggtgaaacgtcagccctggccatggctccgctcagggccccggtcacctccgagtcactctgttccttgactgtctttgtgtttctgtacctcaaggcactga

SEQ ID NO: 11685 - DNA, 216 bp, Homo sapiens
taaagtgctttaagttataagtgtgctggaaaataattgaaataggatagttgacatgcgagcgtggattgcacgttaggtaaatggttttctaacattgtcagctctccttccctttagaggagataagattatgccactatatttgaatgctgaccaatgctgtatggccgtcggtgctttattttgattgtagtaactgcaacttaagaaagt

SEQ ID NO: 11686 - DNA, 265 bp, Homo sapiens
gggatatgaagcttgtggtaggtgccctgatggtaaccagagcaacagtaaggctcaaacccagtccagcttctaatgaaattaactcgattcttgcactaatagcttagcaggagggaaaaacctgtaggtctattagtaggaattacccatgctgaaatacaaagagaaagaagagtgaaaacaagacaaaataaacagaattaagtatccaagagctatgcaccattatcaaatggtataacatatttataattggacttcc

SEQ ID NO: 11687 - DNA, 421 bp, Homo sapiens
ggttgattttcatgattcatgagctgggtactgactgagataagaaaagcctgaactatttattaaaaacatgaccactcttggctattgaagatgctgcctgtatttgagagactgccatacataatatatgacttcctagggatctgaaatccataaactaagagaaactgtgtatagcttacctgaacaggaatccttactgatatttatagaacagttgatttcccccatccccagtttatggatatgctgctttaaacttggaagggggagacaggaagttttaattgttctgactaaacttaggagttgagctaggagtgcgttcatggtttcttcactaacagaggaattatgctttgcactacgtccctccaagtgaagacagactgttttagacagaccttttttaaaatgg

SEQ ID NO: 11688 - DNA, 59 bp, Homo sapiens
aagaaatcctgggaagggcatctcccagctctgagactctctgatgctatgaattcaag

SEQ ID NO: 11689 - DNA, 122 bp, Homo sapiens
gcggcacgaggcaaacatggagtacctcttatgtacacaatgctgattctgggatataaagttgaataaggaatacgtggtccatattttcaagatgctggtggtctattaaaagtatttac

SEQ ID NO: 11690 - DNA, 203 bp, Homo sapiens
ggggagctgaaagctgaggctccgtcctcatctctaaactctccactaaccaattttaaaggatcttaaaagcttctccaggagagagacttaggaaaaaaaaaaaatttctgagtcagtgctaatgagtccagttactgaatttgtgaatagctattccctggcttctggatgttagcccaagttgaatagcatggatgtgg

SEQ ID NO: 11691 - DNA, 324 bp, Homo sapiens
ggtaaaatgaaaatacagttaaatagatacaatgacccaagatcctcttgagtacaagcataactttgtattgaaaaggtaaaatgggaccaatagaccaaagctttatcattggttctatttttacttgtcaacagagcccttaaggaaggggactgtggagtaggtcatggagagataagcacaaattataactgttggctactttttaggatttgtgttccagctctgcacccagggtatttctctggcatggggctaggagtctatagtctggccacacaagtgcggaatggaagaggaggctggatgcctgtccagcag

SEQ ID NO: 11692 - DNA, 1537 bp, Homo sapiens
ggcctaatgaagtcaaaccatctcactctgagcatttcccaccctaggtttttaaaacacaaaaatacttaggtaaaactcccaacaaacttgtctgatcattagctgattatcacaggctctagtatgtactggaagcccagaatatttgagaaataccaaacctcaggttggtgagtatgatgaacaggaaacccagtaattctgaagcagcagtatcacagttggcaggatgaggaacaacagtggctttgtgatcacagaactggaatttaaagaggctggaccttcagaactgatcttggtcagccagcggccctgcttacagatgagacactgaaaggcaaaaggcgatggtcttccctttccgtgtcagcattgtatacaggttccctatcgcacatacaagggttatggaatgtaagccaaaataagggtctggcctaggaggcagcagcctgaaggaaaggaaggccctgaagtcagttttcaaaggggctgacccttggcctattatgtttctgatacatctgtttaagcaagcggctcctaagactacactaaggtttcttccatcccctagcagctcacagttgacaattcccagttctctcagcaccagtgatgcctgccctttaagacacattgctgttgatcagtgcttgaatactgacggctaattctgataaatttctcaggcttatttccttaatctacattggctcacattgtcccctaacacatccctgttaactgaaatgcattgccaccataaatcctcacgttttcataggtaacatcacttgctaatgtaattgtctacttggctattttatttgtaatttaaaaagttctgtcctagtagtccatattatataagtatacatatgcaatttgtattaattgtataagatagttatacatagcaccatatgggaaactgcagtatggagtttctcccatggggaggttatcagctacttaagagctagaggatactagtttcgaacctggggatgggctaaatctatgaaaatcacctattaactatggtgtcacagccctgtggctactggagtaagttgtcatcaactagtgacaagagctggtcgcaacacttagtaggaagcacagtggcataaggaaacctggactagtggggcctttatatctaaaattatgtattattccttataggcagaatctgtaagtacgttatgactgctaatgacttttaaagcaaacatgttaacgatctttctatggtaaaaactgttatttggggacatcaccagatgatgtggacattcttgcaggtattttggcatacccaggcaagctgtcattggtgtatattccagttaacctctggagatgatcgtaacagtttacagggcctttccatttgggatggatatatcaagagggagacaaactggtccaaatcaccagaaagaaaatctcacagcaccgacttggcatctgtgttaaaaaatagcaactatatttaaaataaactgtacaacataaaaaattt

SEQ ID NO: 11693 - DNA, 549 bp, Homo sapiens
  misc_feature (1)...(549): n = a,t,c or g
ttttttttttaaattttagatgatgttttgcaaatttattgcatgatatccagcattttatctggcaactctagccataatgtacttctaaaaaagtatcacttaaggagaattttaatgactcagataaattttcatataaatttctttccatattttgaaaataaggctattcttgcttttccattttattttttaannnnnnnnnnnnnnnnnnnnnnnnnnnnnnnnnnnnnnnnnnnnnnnnnnnnnnnnnnnnnnnnnnnnnnnnnnnnnnnnnnnnnnnnnnnnnnnnnnnnnnnnnnnnnnnnnnnntcacttttccaattctaaagaatgtgtctgtgtaagccttcccctcaacaacttagtgaaaggtgaaaaaaaggtttggaaataaaagcatctgatgtttgaaaaagtactttgtgaagtaaatgcactaagagttatctgtgtattactgcaaacaggtgaacatagtaaaaacaaatgaacttactgcaagtagctcaacatagtaaagacaatagaaatgtttggctttac

SEQ ID NO: 11694 - DNA, 545 bp, Homo sapiens
aatcactaggagggtcccactgataggccatgtttagcactggttgccagggattctctttttgagagagggaaagcaaaatgaatggaagtacccagctggaggtttcagggcttctggaggatgctctcgcatagctcgaggtcctctgcccacctcttctctccaaggaaaatgaggactgccccttccccctgcaggattgggcccccagcctgcgcatgcaccctcctcttgcccaagtggggagcacagaggcggagaggaatcccttaccacacccacggcccagcttgctcacgagtgtcacctctgtgacggtcaccactgctcccttggagggccacttgagttactgttgcttcctcgcctgctggcttgatgagcaccgatggtggggatctgaccccgaggggcagagctgtcggtgactgaggactggactgtggtgaccatgccgattttgctcagggagaacgttgcaattgcacccagcagctcctgggtcttcaggcggcacagctgggggccctgtgatcctctgg

SEQ ID NO: 11695 - DNA, 1224 bp, Homo sapiens
gggtcgcggtgcggacttcgagcacgagccctaaagacgctcagcactcgtcgcttctcctagcagaccctgcccggcttggcgatctgagtttccggagcctcggcgctcactgttcggagccgagctgtcagcgcttggattttctgccgcttaagtgtgatgcctgctcaggcatcttctgcgcagaccatgtggcctacgcccagcatcactgtggatctgcttaccaaaaggatatccaggtacctgtgtgccctctctgtaatgtgcctgtgcctgtggccagaggggagccccctgaccgtgctgtgggagagcacattgacagagactgtcgctctgatccagcacagcaaaaacgtaagatcttcaccaataagtgtgaacgcgctggctgccggcagcgagaaatgatgaaactgacctgtgaacgctgtagccgaaacttctgcatcaagcaccggcatccactggaccatgattgctctggggaggggcacccaaccagccgggcaggacttgctgccatctccagagcacaagctgtggcttctacaagcactgtccccagcccaagtcaaaccatgccttcctgtacctctcccagcagagccacaacccgatctccgtcctggacagcccctccagtgattgctttgcagaatggcctgagtgaggatgaagctctgcagcgggccctggaaatgtccctggcagaaaccaaaccccaggttccaagttgtcaggaggaagaagacctagctttagcacaagcactgtcagccagtgaggcagaataccagcggcagcaggcccagagccgcagctcgaagccgtccaactgcagcctgtgctagggcccctgggcttggggagggaggttcacctgaggaggactgtggccctcacacctctagggtacacagggagaggaggcccggagcaccctggagggcagagacaagcgggagtgatgtggaggtcgccctgggagcctctggaaggccttgctagtgctccagctgcatggaagagagcggctagcaactgttccctggttgggccctcagtggatgctggccaggccctactcttagccccttcatcatgtcatctcccttatgctggagctgccccgatgtggagtgggcaggaaggggcctggaaaaaataaaggatcttggcagttgataaaacgtaaaaaaaaaaaaaaaaaaaaaa

SEQ ID NO: 11696 - DNA, 882 bp, Homo sapiens
ttttttttttttttttttcccggaaaaccattttaattataatagcttacacaggctgcagagagggagacgcagagccggacctgacgggctgtgctttcaaaactgtgcagtctccttcctggctctgaacaggttagcaagagttccaagaggcctcaggcctccaaccacaaaggcagagaagttagccccagaaagctgacagctgaaggcggcggaggctgagagtgcttggtgtttgacagatgagtgttgtggtgggaggagtatggagtcacacagaggctccacccagcaaggcctctggccaggggctatgtttaaggctggggtcaggcagaggtgggagccgcaggggagagaagtctggccggcaagccccaagggaaggacaaaggcactggggcagatgtgaccgtggacaaccgcagtgcaggcagggcccctacaacgctacagcaagcaaggccgtccacgaagctccctgagctacattctaacagaatgtggatgtggggctgggtcagcatgtggccccaccatctttagctcagtggcagttctgacagcttgggtggcaaggaatcccatttaccctgcagcggcagcccccgctggtgtcttcccgtgccccaggccccagcgtgggcccttggtgacccagcagatctcggtgtggcagacggtgcagcggatccagtcgcagccgtccttcttctgtaccacgatctggcactgggggcagcgcatggcctcgccctgctgcagcatcaccttcagcatctctgtcgtctgccgggcagccacatcgttctgagcccgcaaggccaggtcctcctgatactccttgcagttcatctgctcatggatggcctctga

SEQ ID NO: 11697 - DNA, 213 bp, Homo sapiens
aaaacaaaaaagctaataatctcctcaagcaatttctggcctaatagaattatagtagacagtgaagtatctaaacccagggaatcagattgaggcaccatgtccatcgccttgagaattaataggctgcatttctgggttctcctttttttttttttttttgcccaactgagtctttctgtggacttacatggaacttcttattctcttaaa

SEQ ID NO: 11698 - DNA, 324 bp, Homo sapiens
ggagaaaactgatgtggaaggaaccttatttgtttatacaaggtctgcttctccaaagcatggattcaccattatgaataggctgagcatggaaaataggacagaacctattactaaagacttggatttccaactccaggaccctttccttctctacagaaatgccagatgtgagtctttcttactacagtgggttgttttacttctgaagtttggccaagtgtttaaaattgtacagtgtttgccattgtgtttgcatttggtatcagtggctatggggggtgtcagcattttaacaaatgttaatgtttaggaaatgcatgc

SEQ ID NO: 11699 - DNA, 375 bp, Homo sapiens
ctctgaagacctagatggtcacagtgatccagaggaatcctttgccagagaccttccagacttcccttccattaatatggatcctgctggcctggatgatgagacgacacctagcattggcatgcccagcttgatgtaccgttctccgccaggggctgaggagccccaggccccacctgccagccgggacgaggctgcgctgccggagctcctgcttggtgctcttcctgtaggatccaacctcaccagcaaccttgccagcctggtctcccagggtatgattcagctggccttgtcaggggcctcccaaccaggcccttctggagcacctgcccagagagcaacgagaggcttcctccggtcccccagttcaga

SEQ ID NO: 11700 - DNA, 464 bp, Homo sapiens
ggcgtttctaggcacatttacaaagctgcattcagattgatgaggagcttcatcattcagtttaatgtggccaactcctccctctttttggaaaagagcaggtgcactaaaccagcaaacacagccagcactgggctgtgcctgagagcagccacataggggtctctacagacagaaacccgagaagaccgggaaagaaccaggacccagactcaaatatgaaaaatctctgggctttgtcctacggccttcccatgagtaactcatagccttgttccagtggaatctggccttcactagtctcagtggcaagttggttatgtggaaagatctctcttcacacacttgtgcgaataacggtaaagaattttgtattgttttcactctacattagaccatgagtatttatgcctgtggttggcagtttgtattagtttccggccccaggtatctccttcagcatg

SEQ ID NO: 11701 - DNA, 340 bp, Homo sapiens
gttttgttaccccaacagacaactaattttattctctggacaggtaaaagaagtctctgtggactatggcacctgaggcacagttacaagtaagggtattgttccaaataaagtgaatgcatgcttcctgagtgcttgaagtctttcccctactgagcttgaagagtgctggtaaaaggccttttccctccacaaaggaaatgaaaagtcttctcttgaaaatctgaccagcccaagaaaaactaaagatactgagataagggctaccaataagctcaataagatcatcatgcaatgaaactccgttggtaagtcctacccacaaggttttagaccctcc

SEQ ID NO: 11702 - DNA, 509 bp, Homo sapiens
acgctcaacctgcagcagtaggagggtccgggaggccctgccgtcctgtctcctgcaccattgggtggagtctggtgatcacattattgattatgtttcttaaactttccgcgaaactaatatacctcagtattccatcatggtctgaaagtcaaacttcggcaaggcacggacgactgtgcagacacagcagcggcaagaagcgagaactgccctccccctcctctcggtgcagcccagccgggcccccttccccaggccggagcgcccctcttccttccagctttcacttctgccggctccgcaactgagtgacacccagcgacaaccgactggggagtggtagaagcaactgaacggatgcgtgcgagctgaggacagggcgggaggagggggcacacatgcccccaggggagcgaggagaactcttgaaatctccattttcaatcccttcgaaatcacgtatggtttcccacaaagccgagtcgtgtcacgtggcaggtttacgt

SEQ ID NO: 11703 - DNA, 285 bp, Homo sapiens
agaagttctaatttatttgtgaactcaggatgttgctttacagcattgctcgtgttctctcatttacttattatgcatcacggttggaaatgctatccacgtgccgtgcatcgaggtggagatttgctggatctgtctgtggctatttttttccatgtttttctcactcaagcaaagtctgttagtggaaacatgggctgggggatggggagaggacagataaagcaagagaatagggattagggtccaatcctcaatgcacagggcttagttcaaaatctaagc

SEQ ID NO: 11704 - DNA, 289 bp, Homo sapiens
gagagcaaccacgtcaatcccacagctactgctagatttcataggaaaggtagctggcccagtttggagctaggggaaatgtcaaacacatgaagaaatgagaagcaaagaaatgccatcacacatgaatgcttcatgacacccatgatgtccctgcttaggaggtaatgactagatgacaaggacaaagatgagaggtacaaagttgtccaagtccaacagctcaactgaactttcctaaatggaattgttaaaaagtggtaaatttaaaaacttcccctgggctcac

SEQ ID NO: 11705 - DNA, 463 bp, Homo sapiens
gagaggaacaagaacttccattttatcttgcttacctgcacttatgaaaagtcaaactgagtcatgctgagagccagggaacataggagtcagttcttctgcagcagcactcagccagttgaaggcaatgtggagtgatggaaggagagcagtgatgcagtgatgctggcaccaactcctttactatggcatccattgtaccagctgccatacaccaggcaacttctacactttatctctaatcatcctagaataagtattagtttccccatcttctagaaaggaaaactcagacccagagacactaagcaagtagctcaacatcacacacgttatctgtgattaagcctgagttagaaatggagccttggatttccacatttatgctcttttcatgaagctacctgactttgatactcaagtttgtccatctacaacacgggactgctggactagaaatctc

SEQ ID NO: 11706 - DNA, 334 bp, Homo sapiens
ggaggcagcacccatgggagtaagatattgaacgtttacagcatgtgtacataagttacctcaaaggataattagatgattataatgacactttctttgagatagctaattttaaaaatctattgctcccaagtctaattatttgagtaatgataacatattagcaatcatgaaacttcagtcacagccaaccccattgaagaaaaaaaagtaaatcatagcattttctataaagacccaaaggattgcaccagaccaatccttgcattttctgctgtgtattctatgcccagcctcccatccgtgtgtactctaaactacctacacatgtatc

SEQ ID NO: 11707 - DNA, 512 bp, Homo sapiens
ggtgagctaaaatcaatatctgctgagaagaaaccaccatgtagttaattatattttataataagacaatttatcatgaaaaactgttttacttaacctctttcaacatacattgtaggtcataagctttctgtgcactgtcattttcacaaagccttgcagactgattacaatatttggtacttcttgatgttttacagacatatattcaaaccattgcatatgagacctgatcctcataagaattacaacagttatacacaccactttgatctttgacttaagctatttgatctccaaggctaaaagtagataccaaccaacccaaacccaatgcagaacttctatttttctactgattatttacaacctgctcttgggtgagacaattatttttccacagcatcctccagaaggccagaaaaagggaaaatatttgggcaagtaaactcttaattcaaattattttaatggtgacagaaatttattttataacaaatttggatggatta

SEQ ID NO: 11708 - DNA, 546 bp, Homo sapiens
gggatccagtgtccacacttaaaagttgtatgtgtttaaaaaacaacaacagtaatgtgcaaggtgaaatgcttttggataaacgtaagcctattttctgacgtttcttaatgcaaactctttgccttaaatggtagaatatttagaaatttgcacaaaattaaaaaaataaacattgtcttggagggttaaaaaatagaaaggtgtatgtgtatagattcacatacacatatgtatatacaggctgacttgatctagaacattaaatccgccctgcaagttaaccccccattgcaatggttgccttaaggtgtttgctagttgtgtacatagtgtggttaatcattagctacactgcttcccacttgattagagcaatgggaagcatactgtggcctaccagcatctggaagtgtgtgctcgatctgtatgtgtgcagaggtggtgtggatgtgagcgtgcatgaaggaaaaaaagctgctactcccagtaggcccaacgctcaggtttaaacaactgacgagtgttactgtagggtgttttttt

SEQ ID NO: 11709 - DNA, 186 bp, Homo sapiens
tgagatatgactgtttgactttctcccttgcttccttcagggaagaaaatttttaactcagacatcttaagcctttccataataattgttcaatatgtcaataaatgtaagtaagcacccatcatatgaaaaacataggacctattgggcaagtgtcacagttgagtcaaaagaaatacagcttct

SEQ ID NO: 11710 - DNA, 355 bp, Homo sapiens
ggccagagcttgaaggggaccccttcttcctgatgtcacacatgggaacataggatggttgtggtcctcaggaagctcattggggccatggaccccaagggagataggaaccaagggctttgtcctatttaattctttatcccctgagataataagtgtatccttcctttcttatagccaattttaagccttccatctcccagaagtgagcagtctatatacctttaaaaggagatggttctaccacgtgccatcatctggagtccctggaaacaaagaagtgaatattcaagaaaccagatgcgagaactataaagattgttactgtctacattgctcttttctaagatagctt

SEQ ID NO: 11711 - DNA, 1127 bp, Homo sapiens
ccggccacactttgcatttcaacactcagcccggaaagatgctcgttcggttgttggacctctttcactccctgcgtgtaagaaggtgaatcacgtgggaaaaagtggcttttcagtaaacgggtacagctcattctttctgagaaggccccaggtcctgctccctcctcggatttgattgtcttccgtgctttgcctcactcgtagtaaatgaccatccatagaatatgtgaatctttggtgagcttcagtgggcagagtgaagtcccgcattagcatttaggtgccctgagctgtttctgccaatagattagaaagcagccatgagttgacagtctttagggcccctgccagtgtgcaattagtcattgacaagaacaatgccatttgagagtgaggtggtccctgctgctacgaggccattgtactgttttttccttgaggtcaaagcagtgcttcccatagagtttgctgcctcttctgtggacaggaagaaaacttcatgaccgaatcagagccttggtggccactgactctcgtgcttattgcagatgctgtggttggcctcacaagcaacgccttatgctgatgtggcagaggtgccagctgccatttgccaaactctgcatttcatttcatctaaggcttaacccctcttccttcctggtgtacctgtgtctcctcggaaggaagtcatagtttagatgaaaccattttttgtacaatgtaaagatcatctgagcaagatgagcattttgtaaaaatgaaaatgtgactcacataaaatcaggaacttgacacagtgttgcattaataactttagggtgcagacatgctgtgtgaatctcacaatgcgtcgtagatgtcgcgtgttggaagggagcaggaggaaggactgatactggcaaatcagtagagtgaggtgatccttagcaacgtgcccgggacacttcctgtgtgcctgcagttgtcagggaccatttggggatcccgaatctcattctctaaaactgctttcttgaaacatgttacttccttagtataatcaatgtatactcccttactggcctgaaacgttgtatagctacttattcagatactgaagaccaacggactgaaaaaaagaa

SEQ ID NO: 11712 - DNA, 170 bp, Homo sapiens
ctacaaggataattctaaggcttctgatataaatacccagttctactagttgccatatatagaggtaagtgagcagtaataggactgtcatctcagctcacttgatacgtcatatgtttgggtgaatgatggttttgtccttaagttttagacatttaattatatctaga

SEQ ID NO: 11713 - DNA, 424 bp, Homo sapiens
gagactgatacatacactcatacatatatgtgttccccttttccctgtaatataaattacaaatctgggctcctttgaagcaacaggttgaaccaacaatgattggttgatagactaaggatatatgcaactcttccagacttttccataaagctctctcggcagtcgctcacactacagtgcacacaaggattgagaagagttaaaggctaaagaaaacatcttttctagcttcaacagagaggtttcaccagcacatttaccagaagaatctgggaatggattccactacagtgatattgactgcatctttaagaagtgaccattatactgtgtatatatatataaacacacacacatatatatatatatatagtactctaatactgcaagaaggttttttaaacttcccactttatttttt

SEQ ID NO: 11714 - DNA, 989 bp, Homo sapiens
  misc_feature (1)...(989): n = a,t,c or g
ttttttttaagtctacaagatttcaatatttaagagacttggtacatattcaaagttaaaataactccaacttttatagctatacatattgttttaaagcaacttaatatattttaaaattttatatatacactctcaaaggttcttcaggtgaggtatgtaaacattgtctaatgaaaaatttcaatgtttcaaaccaacaaattcacagcatacattgaattttcatccattaaagacacagtatattcctacactcactaacatagtagaaatccaggcccaagagctacagactgatcttccgggtggccacttgcagaatttctcatttcactgcttcgggaaagacactgtcacacaggccaggagcacacgcttggtaccaggagggcgctaggcctctaggaggcgctgtccttgggcagctggatcactggctaagactcacaagacagcaaaaagagcacaactgaacaactacgagatcgacctcagcaatgacaacactgggaggaacnagaaagacctttaaaggaacggtagagattcattttagagctccctgaatccacagccggatcagcagcccctgccctaaactcattcagaaaggttgcggcctaataagaataaaaatccaacgtggcacctgagcttcagttaaattgccatgggcctcctatggccccctggcccctcaaaggcattcatgctagcctcaattagggccctgggctgtgcttttcatacaggttggggttgaatttcttagtatcataatgcatatgaggaaataatgccatgagtttacaaagatgaccaatgcctgcacacagcattggccaatgaccttggaggagctcaattttgaaaactacttgttccctgagggtaaacagcaggcttctattgagattaagtgaggctaatatggggatttttcatacaaggtaataagacttggggacctcaggcctgtgccgaat

SEQ ID NO: 11715 - DNA, 426 bp, Homo sapiens
  misc_feature (1)...(426): n = a,t,c or g
gactgggttctaggtttaattttatttaaaaagctcaggtcataatgcagttgttattgcttctttaacatcatacttagtaaacaataacatatcaggngttcagtttggggtatatactttttaaaactttaaacttatatggacttgctaatggacattgaaattttcttctcggaagtcttccatggtgagaaaacgtagctattacagttggtttctgatgagttctataatagcaaagatattcagatcattggatccaaggttttctgttaaccatgatattttcaagctctttataaaattagttattttaaccatggagaaactgtgcctgtagtcaaagtagcccatttttgctgaggaaaaataatggaccttgggagctgagagggtccgtggaccagcagctgaaacgccggc

SEQ ID NO: 11716 - DNA, 200 bp, Homo sapiens
gtcctcagattaaaagtttctcttttccccccacagttgttttcaagccatgaatacaaatcataaatatagtattattaataatctaatctgtcctgtaatttttacagtgaactatttacaaactgaattgggcaactggttcatcagacgttaagaactctatgttcttagtaccaacttcagcaagtaactgatta

SEQ ID NO: 11717 - DNA, 328 bp, Homo sapiens
gcaggtcagctacaacataaaaaatgtaatggtggaaatttgtcagccttgaattcaggcagaacaggattcggtgcatgattttatgtgttttcgaaacggtgtctgtcacattgtgatcccctgatggctcccctctctgttgctgatcctctttgttctgtacagaagcaaattctcacctgtgtaacatcctgaagcacctggtaaaatgtgaggcaaagagaggccacttctcaaatgctgtggacggatgggctgcatcttttaaaggatatcagtatgtcttcctgttgcaattattttgactataagctcccagagagtg

SEQ ID NO: 11718 - DNA, 344 bp, Homo sapiens
tttctgatgcataattttattaaagccagagatggactttttttctagagaaacagatctctgaggttagaatggaagataatgaaacaagagatttcactttataatttacctttgtcaaactatcccagagcatgtcaattctattatgaaagtattactttgacatcatataaccaattattaatagaaaacacacatgccaaaaaaccttaaattttgtaatcttcaagtcaatcatcaacttttcttgaatttttgaagacccgaaaagaaaaataatttcaaacaacagcactcaaacatcatatgcatttgtaatgaggcacagcaatcaatttttt

SEQ ID NO: 11719 - DNA, 354 bp, Homo sapiens
gctaacttttctgcagaagttattattggtgttatactcaaaaataaagcacagtttagccctggcctgtgcatttacaccactgaataaattaccaaaagtgtctgtctagcaagagttcgttctaacaaagtggagaggaagagccagttttatacaaatattgaatcatcccacaactacatttcatgaaactccctgattttttttaaaaagagactcttgctctgtagcccaggctgcaaagctgggagtgcagtggcctgacctcttcagcttcactgcaacctctgtatcccctcaggcctcctggggtaggctagggactacagggcacagggccactggcccccc

SEQ ID NO: 11720 - DNA, 369 bp, Homo sapiens
gcgggtataagggagatagctcatggcccttgtgatgcaggaaaaatggatgtccttaaaaaatttaagtatgtagcctgtgagatgagattggggcattgagaggatccagtactcagaaatatctcctgctggccctgcatggtgcctggtgtcccactactaggggacacctttgggttaggacactgtctctaggaggtttcatcacccaagagtcaagcatctctgccaaatgacaccacccaaaccaattgagggaactagtctgttgccaaagtgctcattagttaactactgtagttatctattgctgtctaacaaaccacctataacatagggctttgatgattatctcccagggttctg

SEQ ID NO: 11721 - DNA, 612 bp, Homo sapiens
  misc_feature (1)...(612): n = a,t,c or g
gcagtcctacatttaagaatagagctatgcaaactctgttaaaaactatgaggaaaacttatattagaacttttgatatatactaaaatactgattatcttaatcacattttccccagagataaacattgagagaacgaaagccaaagtgtcatttaagagagatatatatgaaaaagtaacattaatatatagaactttaccatcaccagccgtagttgatagaaaatattagtttcagaattaccctcctttaaaaaataagagactatttgttttcttttaatttctatgaataaaagaaatttttaaaaactttaaaattttaaatattagtcaaaatactttttaagtcctgagtgcttacaggtagttgttaaaaaaattttaaggccaggcatggtggctcgctcacacctataatcctaggatcttgggaggtcgaggcaagctgatcgcttgagcccagggagtttaagaccggcctgagtagcatagcaagaccctgtctcttacaaaaanaacaaaaatttggctggggcatgggtgggcntgcacatgttgttcagagcttactggggggtcctccngtagggagggtccgcttgagccc

SEQ ID NO: 11722 - DNA, 365 bp, Homo sapiens
atgttaattagctgggtttaattattatacattgtattcataaaatatatcactttgtacccttgtaaataaacacaaatataaattgtcaatttataataaaattttgtaaaggactaggaatatagatcttcagagttattagcatcttgcagacagggctcagtaatttgcctgagagcacacaagttaggaggccacgacactgtcgttccactaggccctgcttgtcctagactgtggcgtgtcacccacccaggaggagtgcaccatgcccagaagagttcagtcttcaagaaatcagctctgagaggctgcctttttctcttcttctgtgaatttccaggcaagagaagagctttctc

SEQ ID NO: 11723 - DNA, 1051 bp, Homo sapiens
cacaattataaaatgtcagcttttaaggaaataaaaagagatccaggcagatatttacatagttgtcctgaatctgtgaaaaaatggcttcgacagctaaagaatgctgggaaaattcttctgttaattaccagttctcacagtgattactgtagacttctctgcgaatatattcttgggaatgattttacagacctttttgacattgtgattacaaatgcattgaagcctggtttcttctcccacttaccaagtcagagacctttccggacactcgagaatgatgaggagcaggaggcactgccatctctggataaacctggctggtactcccaagggaacgctgtccacctctatgaacttctgaagaaaatgactggcaaacctgaacccaaggttgtttattttggtgacagcatgcattcagatattttcccagctcgtcactatagtaattgggagacagtcctcatcctggaaggaactcagaggggatgaaggcacgaggagtcagaggcctgaggagtcagagcctctagagaagaaaggaaaatatgagggaccaaaagcaaaacctttaaatacttcatctaaaaaatggggctctttttttattgattcagttttgggactggaaaatacagaagactccttggtttatacatggtcttgtaagagaatcagtacttacagcactattgcaattccaagtattgaagcaatccgcagaattacctctgggactacaaatttacaagattctcttcaagcaattcaaaaacagctgggctactatccaaatcctccactgggtccttatcaagtgatgagacactggatatccaataagttggccttactggaaaattgaagtggagacccatatatgcaggttaaaaaaaggttaattttcaaaaaatggctgtaaaagactttaaggaacaagttttattgggcaataagttgatatttgtccataggtctcctttctataaatcatcttgatgtttaacaactcttattatattaaaatctcagtatcctaaaactt

SEQ ID NO: 11724 - DNA, 650 bp, Homo sapiens
gcatagagtaacggttcagagcaagggctttggggtcagacttgggcttgagtgccagcttcacagtcaactgtgacctgagaaaagggaagagtgagcccttcccagctgtttcagagaataatggtagaatagtagcctgcacatggctaagtgctcagtaaacaacaagtcttattattaggtattccctggggccatatgttttatttcagctaaatgctgatattcgtagaatcatgtagaagaatgtgtaggtataaaggaatgtaatggtgcctttttattttacagggttcttgaagcttttgagattaacaatggcaggaaaatcatcactttttaaagtaattctccttggagatggtggagttgggaagagttcacttatgaacagatatgtaactaataagtttgatacccagctcttccatacaataggtgtggaatttttaaataaagatttggaagtggatggacattttgttaccatgcagatttgggacacggcaggtcaggagcgattccgaagcctgaggacaccattttacagaggttctgactgctgcctgcttacttttagtgtcgatgattcacaaagcttccagaacttaagtaactggaagaaagaatccatatattatgccgaa

SEQ ID NO: 11725 - DNA, 601 bp, Homo sapiens
acatttactaagtttgtctcatttgatcttcacaattctgtgaaaaaggtaggacagatagtgtcactcctacttttaaagataagaagtttgggcttcaaagaaattcagtgacttgccctgagataaatagctagttatgtctgctatcttttgcattagttttcattctcctatatcaaagagtttctatgcagaaagacttctatatgatttacttataatttctaaaatataaaattcaaattgttgaatttccggcttttctgcatttaccagaaaagtatgccatttaaaaaaatagaccattgaaaaaacattggaatgcttcatgaatttgtgtgtcattcttatgcaggggccatgttaatcttccctatatcattccaatttcagtatatgtgctgccaaagcaagcatgacttaattttttttgagcagttttaggtttacaataaaactgagcagatttctcgtatatcttctgcccccacacatgcatagtctccttcattatcaacaaatcccctaccaaattggtacatatgttacagctgatgaatgtacattgacacatacttattatgcagagtccatagtt

SEQ ID NO: 11726 - DNA, 1306 bp, Homo sapiens
gcgtcgacttttcctccaaggcatttattaactccttagtgtcacggggccaggggaaggctggagccaaaaccaagtctctgggggcgggggtcctctctggatccccactactcagctccccgggctccccatgcagccctagagacgggagaagtccagtgtgctgttccacctccctccaagtcccaagaaagtgggaggcagtgttccactccagtgtcgtccagacgaacaagtccaaccagtctggaaccctagggccggcgtggtcaggtcgggggcgggagggccggggcctggctctgtctctgtctgtgtccaggtcacacataaactgccccgccgtgagatgagggagccgtccagctgggactccatgtcatcctcgagtgctgggggtggaggcaacatgagggctttctctgccttctcttcctcctcctcctcctcctcatccttgccatctggttccatgggaccagggactactggtgtccagaagacggggtccccatttcccaacacctgagctttcggatcgtagaatcccccgtcgccactggctcctcctcctgctcctccagggctcttcctcctcctcctcaccctcagcaggatgaaggccaaggaccccccagccagaagcagcagcaccagcagtgtcccccccacggccccccacaccagcgggcccacatctcggggcgaggccctggggggtttctcggacaaagatgacctgctcagcgcggcccaatgcccacgggcattggtgactgtgcagacgaaggtggtattgaacagactgtccactgcgtggatgaccagctgggagccctgggccactgcggaggtcgggaaggtgcctgaggtcgtgctccagtcatagcccgtgggctctgggttgctgcggacgtcacagctcagggtggcatcagtacggccgaggtaccagttgtcatcatagccggagatggacacttcaggagggtagcgtacagagagggtcacaggtatcagggctggttcctcgaagctctcatgctccactttgcaggtgaccgtgacaccatctgctcgcccgagggcaccaaggtgaagcggctggtgacagtgacagttccggccagggtccctgacacctgagtctctttggcttcccagtccagggatgagagccaggagatccgggcaggtgggcggccctctttggagatgcagagggccactgtcgtagggtcctggctgaacgtgaccttctgggcctcagcttggttcttgggcttggctatgactctgagcc

SEQ ID NO: 11727 - DNA, 1306 bp, Homo sapiens
  misc_feature (1)...(1306): n = a,t,c or g
caggacgcgcccccgtggctcccggtctcctgtgggcctgctgtgtgccaaacctgagctacctgcacccgagccctgggctcagcccacncacaggggcgggtggacgtgctggccgaggaacaagcaatcatgtttgcgtccccgtccgtcacatgtgccaaatccctggcaggcagatggctcctgccccatattcttgccgtgtcttggaaaagtcacaggtgacagccctcctgaggcccacactttggagggggtccatgtccaagagaccctgacaaggaaggagttgagccctgggtaggcttgcttgaaaagtgagtccttccagaatattctcagagctgccagaaacatcatctgagggtttggggcatcagctctgcctgggctggtgttcagggcctcagtcactttggaagtgagaagaacccttcagccaaacctttgggatcccattttgaagtccagagctggagcaggcgggcagtgcctggggagaccccgctctggataagacacccaaccccaactccagcagctggactctgggcccacaaggggaagggaccccagccagtattccctcagagccggcacgaccctgctgtggggcggcgggcccagtcgtgttcctgcagtggggcaccctaggcgtatgtgtatacacgcacagatatttattcctttcgcttttagtggttgttatttctgtagcagccaagtcctgcggctccctggggctgagatctccctttgtggaactccgagagccgccctgacagtcccagccgccacccaaggagccccatccgcccacccaccctgggacccacgcggccactccagggatcattgttgtccttttgtgaggggctgaggcgactgtcccatggaggcatccaaggctttctgtgccaagaatcccaagtgactggggctggggaccacttctccaggcctctctccccgaccatgagagcccctggccctgggccccttgcacaccagtgggcccagaataaccgccacccttgccatcctgcaacagctggacttaagtttccagggaagtgggagatgttgttttcttagaagttttcctgtgggaacctgggaggctcctggacgcctttgactccccaggctggggcgatttccgatgcttgacccgttcctcctgggggttccccacccccggctccccaagttttcacacagggcatttttgttacacatcngggttttttttaaggaaggggaanttttgccattcaagattcctgttaaccaggggnccacg

SEQ ID NO: 11728 - DNA, 453 bp, Homo sapiens
gcaaaaactcaggagagaacttcctcagcctgttaaagggcatctacaaaaacccatggctgacatacctaatggcaaaaaattgaaagcttctaccactaagatcaggaacaagacgagttcctgatcgtttctggaagtggcagtgccattgccacttctcttcagcatcgtattggaggttctggctagggcagttaggcaagaaaaagaaattaaaggcatgcaaattagaaaagtagtgaaactgttcacagatgggatgatcttatatgtagaaaaatctaaggaatctactataaaaaccagtaaactaataaataggttcaacaaaggttcagaatacaaggctaatattaaaaaatgagtagtatttctatagagtagcaatcaacaaaccaaaaattaagaaaacaattttatttataataggatcaaaaaaaaaaaaaaaaa

SEQ ID NO: 11729 - DNA, 478 bp, Homo sapiens
catccaccgtctgaagaagacgtgggaagacgtttccagggacagtttccggatctttcagaagctgtcagagatcttgtcagatgagaacaactactcattgagccgggagctgctcatcaaggagggcacctccaattttgccaccctggagatgaaccccaagagagcccagaaacggccgaaggagacgggcatcatccagggcaccgttccctacctgggcacgttcctcaccgacctggtgatgctggacactgccatgaaggactatctgtatggcagactcatcaactttgagaagaggaggaaggagttcgaggtgatcgcccagatcaagctgctgcagtcggcctgcaacaactacagcatcgcgccagatgagcaatttggggcctggttccgggccgtggagcggctcagcgagactgagagctacaacctgtcggtgcgagcttggagcccccatccgagtcag

SEQ ID NO: 11730 - DNA, 518 bp, Homo sapiens
gtaagtaaacacgatttttaatttttattttttatggtggacagtgatcatttgccccaacagccatctgaagccaatagtcctgattattaaaaatcacaaagttatataaatgttctcctccttttcgaaaaccatgttcatttttttcccaagaaacagggctgtctgcaaagccttgaacggacagtgtaacccatggagctaacttcggttcatcaaagtagtgacagagatgttccaataggagacagatcttctctggaagtatgaagccagtgattgtacacaaataagcttttgccaccactgtgcttggctcaggacagcaataggttgatatgaaattattaggctcattatttaggtcgacattactgaagacggcgccgagccagtcgaagagctccagagcccggcaggacacctctggcgttccctccagctcgctgctctgcagcactgggcactggagatctctcaacgtgctcagtgctacttttggctgatgctcctgc

SEQ ID NO: 11731 - DNA, 224 bp, Homo sapiens
taacactcccctccaactcaggaagaaatgtgtgcagagtccttagctggggcgtggtgcactcggggccaggtgctcagtaggctttcggtgaatatttgttggctgatttattcagaaattatgtccagcccctaccttggatggatttatcacctctccaggccacctcttctttccaaataggaccacctaggtatagaccaaagacacgaaatcttctg

SEQ ID NO: 11732 - DNA, 568 bp, Homo sapiens
atatccaagaaagacaccttgacattttttgctttattaaacatcattcactgagaatttccaaagcactgtgtggtgcctagacctgtgtaccagcgctctgggggtcgggagaagtctaaggcacgggccctgcctgtgcgcacggctccttctccctgggaaggcagctccactggtgaaaggccactgaccaagtccagaccctgaggacgacgaaggcctcggggcagaagcctgagagaatcatgccccactggcagtgggaggcggtgcaggctgggagccctgcccaggccccaggctgagctgtggggaaagctatgacccagtttgctgagagctgcaatgacgaacattggctctgtgcccagaggcccaagaaggccatggactgggctggcctttcctgggaaagggggaaggaggaagaactggggcctagcagggccgtctataccctggagaggcagggcctgacttctccctttagagcttgcatcaagaggaggctcaggagagagagacttgcatcagaacactccagacagccgatctcccactcagc

SEQ ID NO: 11733 - DNA, 522 bp, Homo sapiens
gctggagaccctctcccagatggagagataccagcaacattccatggtgtttctgggacggcgatcaaggaccaagagcgacctgagcctgaagatgtaccaggaggagatccaggagtggtatgaggagcatgccagggagcaagagcagcagcgacaactcagcagcagtgcagcccccgccgcccagcagcccccaggcagccgccagcgctcccagaccgttacctagcccagcgcccgaaagccgtctcttctatgcaataacacaatagtattactctactgcgatgtacggaactgcggtgtgtgtacacatactcacgtatatgcacatatttatatacaggaagaaaaaagacagacaagatggggcttggtttataaccaccttgccctgtcttccttaactccagaagccagtttggtgaggggtgggggtgcggccaccaggtctgagctcttcctactgtggaaggctccagaaggcccttcacaaggagacccctcacctggatccag

SEQ ID NO: 11734 - DNA, 418 bp, Homo sapiens
  misc_feature (1)...(418): n = a,t,c or g
ggaacttgggaaatgttcataaatgttcataatgttcaggagaccaaaccagtctcctggtttggtgaaacataaatacctacatttagcgttattatgagaaggagggaccacacgcatggctcctggctgtttgtgtctcagtctgaagtcattctaacaacaccacccagcgggctgcccctccccactgaggagaccccaccccaccccacgcccaaggctgtagtctggagcagcaagagccaaagaggtcctgtgagagcagggggtgcctcttgagaaccccagcaggagtcccaggagagccgcccacccctggatgcggtgcccgagtgtctgtcctacagtagtagctggcaatgcagcagcgagcaccactngcgcctctggtgccatcctactgggcctgtcagct

SEQ ID NO: 11735 - DNA, 630 bp, Homo sapiens
  misc_feature (1)...(630): n = a,t,c or g
gacacatgatgcttggatgacagatgagaggggatggctgagtcctgtggctggcccgtgatgccaggtggcccatgtgcccagggcgcctgcagggctgctacagggacctggtcaggaggtgcacatggtgccctgccctcacccaccctctgtgtttccccttctttgaaaaggtagaagagaaaggaatattttaaacctttttggcttaaacagaattttagcatcagaactagctttctgggattggaggcaaaccatcaaggtggtccctctccagtctggacacgatgccagcaaggatgacgtcctgccacctcctggagttaccctggcctcctagggtccctttttctgatgaagtcttaattccataaaagcgcctctttggacactgaggccctctctgcctttcctgggcctccggcaacagttttttacaaagattttttgcagtcgagtccatatgtccacccattgattttttaaagctttttgttgatatttttagtatttttgaaagacttttcacagtgaggagtaggaaggtagattttggaattcatgcattttnagcaagtgggantgtttgaaaacaggaaggcaaggggccttcaagtgtaagcc

SEQ ID NO: 11736 - DNA, 257 bp, Homo sapiens
ttagaaaaaattcagagtagtttactggtatattccatggaggatagcagtccacatgtaacaccagaggattattctgagattattgcagccatccttattggagatccaacagtacgctggggtgacaaatcctataacttgatttccttttctaatggagtatttggctgtaattgtgatcatgctccttttgatgcaatgattatggtgaacatcagttattatgtggatgagaaaatttttcagaatgaagg

SEQ ID NO: 11737 - DNA, 488 bp, Homo sapiens
  misc_feature (1)...(488): n = a,t,c or g
taaaaatagggttttatggtactctgtaggttcctggtgagccagggttccagggaaaagctgagaaaggatttggatggtggtgacggtgcaggctttggctgctacaggaagcggaggagaccagaatcccaaccctgaccttccttctccttaaagatgcatagacttcctggaaggctcacatggcctttctcaagtagccgatcctctttaggggagacctgccatcttccagccgcgtcatgttgcctttcagggcaagccttggccagtttgcagcgttgctgtttcttttgcagggnggggaggcaggggcnggtgtcaccggtggggtcttggtgaagttcctccttcctccaggcagatggctccggtgaactgcaagaaggacagactgtgtggactcctggtcctcacccgattccggattccctngacaatgctgcccagactgntcagcangctggaactacacaaggcagaat

SEQ ID NO: 11738 - DNA, 412 bp, Homo sapiens
catggacacgccggcttccagggccaaggaggcttggatggagccgctgcagcccaccgtgcgccagggcgtggcgcagctgaaggacttcatcaccaagctcgtggacatcgaggagaaggacgagctggacctgcagcggacgctgagtttgcaggcgccacctgtgaaggaggggccactcttcatccacaggaccaagggcaagggccccctcatgtcctcctccttcaagaagctctacttctccctcactaccgaggccctcagcttcgcgaagacgcccagctccaagtgtgtgaatgagcttaaccagtggctgtctgcgctgcggaaggtgagcatcaacaacaccggactgctggactcctaccaccctggcgtcttccgtggggacaagtggagctgctgc

SEQ ID NO: 11739 - DNA, 265 bp, Homo sapiens
  misc_feature (1)...(265): n = a,t,c or g
gtaattaattattaaattattatttttttaaatctatccatccatccatccatccatccatccatccatccatccatccttccttccttctttccacccatctannnnnnnnnnnnnnnnnnnnnnnnnnnnnnnnnnnnnnnnnnnnnnnnnnnnnnnnnnnnnnnnnnnnnnnnnnnnnnnnnnnnnnnnnnnnnnnnnnnnnnnnnnnnnnnnnnnnnnnnnnnnnnnngttttatttgttggtttctttttatgcctgata

SEQ ID NO: 11740 - DNA, 390 bp, Homo sapiens
agtaatattattgttatgcttgtattcttgcatttcagggtaagtaaaccctgaagaaatcttattttagtatagctacagctgcagtagcttttaagtatgtatcaacatttcattataaattatagcttcctggttctgtgtctcagctgtttcagaactttcagccaagttaaatcttttttggtgttgaaacttttagtaagttgagtaagctatttttttccctacggtaatccacaatctgttctttgtgtgggttgacacctatttataattcttaaaataagggtagctcaaaggagccaagtacagtagtttagcttgctactgttgagcatgaatagcagtaggttgttttcattaatgcagttttcataatgtctccca

SEQ ID NO: 11741 - DNA, 132 bp, Homo sapiens
  misc_feature (1)...(132): n = a,t,c or g
gaaagaaatggggagtaagtgtgtgtctcctgccactcttctttcttaataggtcagagacatttattcaaggtgtccagtagggcagggaacataggcagttggaggtttggcttttcgagggcntatggc

SEQ ID NO: 11742 - DNA, 847 bp, Homo sapiens
ggaagctgctaatttcagagctaataagaccaaatgacccctgtgtcctttccccagaagcagtcataggcttgtctttttctgcccacctattctgactctcatccctaagtctctcctgagggctgatgatgggcacgggctttctgagaagtcagccaggaatgtggagctgccacctacggctagaagcagagccaccctccctggccatgtgggcatcagcccagaaatgttggcctgagtcagtcagctgagcctaaggacacacaatttcaagaagggtctcctgcattgctgcctgaagtgttatagtctactcatgtagagaccacattctgcacagaaagacgtcttcagtaattgctttattcaatgtaccttctttagcgtttcactaaaaatgtaattaatttccttcagtttatactatgtcatagtatttatttttaagcccttgtaaagtataaactttcaacctgtgagacggcaaagatctctaccaattgaaagctagaaatcactgtgatcacaattgatttagaaaattaaatgcactagagaccaggggtgtgcacagagacacaggccccccaccgaggcttgcatgctaacagagactgttggcttttctttcccagtcatgtcccgtctgcaggtcgcgtgtggagcatgtccagcacgtctatctgccaacgcacaccagtcttctcaatctgactgtaatctaatctgttgtgcttttgttggacttggcatgtttccatgaactgcactattataaactattaaaatgatagattgtggagaaagtaattattccaacacccatctgccatgcgatgtt

SEQ ID NO: 11743 - DNA, 364 bp, Homo sapiens
  misc_feature (1)...(364): n = a,t,c or g
gctgatttatggcagagccatgtctgatgtctgacagtccagtgtccatcccgtcaggaaccctcttcaacacaggtgtgtgtgcatttctttctgtaagtgtgtgtgcacatctgtatgcccacacacatccacgcttttagcaagcagaactgcctggtatggagtagactgcatggatctatggttagaacatgtgagttggatggctgcatgtatccatctgtttgtgtcttctgtgaacttctgtgccatcatgtgtaccagaggtgtatctgtcagtttgtccctctgcacacatctgtgggtacctctatgaccatggaactggtgtgtgtgtgcgtntgtgtgngagagagagaga

SEQ ID NO: 11744 - DNA, 577 bp, Homo sapiens
  misc_feature (1)...(577): n = a,t,c or g
ggaggccatcccaagccgagattaacaggacttgacataagccattagtttgtagctttgacaagtaattatgaatttttgttgcttattttgcaaaggatgcttttaagatcaaaataataaccctacctaaagtctagctccactgctatgggtcatactcttcagcctcccaacagggcagagagagagagctactgaggcttgtctaggttgccaggctaactgggcggcttgtccatattcaccccatggattgcaccatggcactctttgatttttccactgcaatggcaagtaatctcatcagtcataatagagcagtcccgaatgcgtgcagattctaaaagcagggctttaggagagaaacactgccaggggggaatagttttgggggagggttttcccaaaataacggtcatcctactgggtttatccaaccctttaaatatgaagcctgttacctccagaagcttctgaggaggatgatgtgaaaagacagngagtggngnntaggntaanaaaacntnntgaccatttanaggagtcagtatnaaantcacnnatgaagtntttt

SEQ ID NO: 11745 - DNA, 620 bp, Homo sapiens
gaaaagagacgggctgtttctatgtagcaggatcggcccagcttcgggaaaatggagttttcagaggctcatcgaggccattttttcatctccagtcgggggaactttttctgcccatggaagtgcagcagaaaggcatagaggccactaggccttgaagtggctgccattttaaagagtcgagtcagatggcctattaactcagattaattgctgtgcttttggattccaggttgatgccggcccaggatggatcagacctgtgaactacccagaagaaattgtctgctgcccttttccaatccagtgaatttagatgcccctgaagacaaggacagccctttcggatgatccagattccagtaccagtacattaggaaacatgctagaattacctggaacttcatcatcatctacttcacaggaattgccatttagactggccttgtcatgttgcccaggctggcgtcgggactcctgggctcattcgatcctcctgcatcagctagaactacagtagtttcagattttgaagtgtgtatgtgtatgtgtgatatgtatatattccgtgtgtatagaaatggagagtatcttatttgagttgttgttttcagtaatgc

SEQ ID NO: 11746 - DNA, 227 bp, Homo sapiens
caggcctccccttaaagaagggcaccttaactggactcactcctcccatagtagactgcacagtacacaagcagaagaggagagctcaataataaagtcagcataaaggataatttttaaatgaataaagaaatcagaaaatccagtattggctagcacatatggctatcagcaagctcaccctacaaaaaaatagtgagaaaacagttcgaatattggccgtttgg

SEQ ID NO: 11747 - DNA, 280 bp, Homo sapiens
gcctggttttgtgaacccatctaaaaaaaaaggctttcctaaggcagaaggaaaaaaaaaaatcactagatttagggcatgttctgagaaagcactccctagaggcagtcatgagcaagacaagtgttttccaagtctgcttctcagtttgcccacatcagaatcccctgggatgctcatcacaaatgcagatttctgggctcagtcttacagaagtaagtgtctggataggagcccaggattttacgtcacaacagggtccccaacttatgcacacaca

SEQ ID NO: 11748 - DNA, 149 bp, Homo sapiens
tatgtcctttttttatagatgtttcttcctgactagaaagcttcccttctgatttttctagatagctttcaggataatattcttaatattttcaacttcttgatttgtgtcttgttcttctagctacacccttgggcagattttcttct

SEQ ID NO: 11749 - DNA, 624 bp, Homo sapiens
  misc_feature (1)...(624): n = a,t,c or g
tttttttttttttgacaatgataagctaacgtttattgagagcttatgtgttttagaaaacttacaacgttttatgatctttacgcataaaaactcagactaggttagggtgtggcactcacctctggtacagaatttaagaaggttcaaaaactttggtaatagtaaacaatattttcaagacttaaaaaatattttaatatccaaaataatcaaattgttaaactacatcctgcagaccggcagcataattttgtaaataaagttttagtggaaccagggtgttgaggtcagtaagctcaaggcacgagtgcggggttctagcctcttcaaaattttatttaggccgggcacggtnnnnnnnnnnnnnnnnnnnnnnnnnnnnnnnnnnnnncggggcgcgaattcacccgaggtcaggagttggagaccagccacgactaacatggtgtctctaataaaaatacaaaaattcagcannnnnnnnnnnnnnnnnnnnnnnnnnnnnnnnnnnnnnnnnnnnnnnnnnnnnnnnnnnnnnnnnnnnnnnnnnnnnnnnnnnnnnnnnnnnnnnnnnnnnnnnnnnnnnnnnnnnnnnnnnnnnnnnnnctgactcaaacaaat

SEQ ID NO: 11750 - DNA, 518 bp, Homo sapiens
gaaccctgccatgatctccctcttgcaaaagcgagggctacagaacaggcattcaggagtcctgtgctccagtcacagccttttctgttcttcagctaggagacaccaaaccctcaggaagatttactatagctaagagaaaactgcagcagaaagggcgcggctacctacttcttaaattccgtttgtggaccctcagactcttagtcccctactcccagatacagcggccctaccgtggctcctggcaaggtggcatccacttttgtagtaagcatggatctcggaatccctgacctgctggacgcgtggctggagcccccagaggatatcttctcgacaggatccgtcctggagctgggactccactgcccccctccagaggttccggtaactaggctacaggaacagggactgcaaggctggaagtccggtggggaccgtggctgtggctatcaagagagtgagcctgaagatttcttgaagcttttcattgatcccaatgaggtgtactgctc

SEQ ID NO: 11751 - DNA, 2547 bp, Homo sapiens
atggcggacctggaggccgtgctggccgatgtcagttacctgatggccatggagaagagcaaggcgaccccggccgcccgcgccagcaagaggatcgtcctgccggagcccagtatccggagtgtgatgcagaagtaccttgcagagagaaatgaaataacctttgacaagattttcaatcagaaaattggtttcttgctatttaaagatttttgtttgaatgaaattaatgaagctgtacctcaggtgaagttttatgaagagataaaggaatatgaaaaacttgataatgaggaagaccgcctttgcagaagtcgacaaatttatgatgcctacatcatgaaggaacttctttcctgttcacatcctttctcaaagcaagctgtagaacacgtacaaagtcatttatccaagaaacaagtgacatcaactctttttcagccatacatagaagaaatttgtgaaagccttcgaggtgacatttttcaaaaatttatggaaagtgacaagttcactagattttgtcagtggaaaaacgttgaattaaatatccatttgaccatgaatgagttcagtgtgcataggattattggacgaggaggattcggggaagtttatggttgcaggaaagcagacactggaaaaatgtatgcaatgaaatgcttagataagaagaggatcaaaatgaaacaaggagaaacattagctttaaatgaaagaatcatgttgtctcttgtcagcacaggagactgtcctttcattgtatgtatgacctatgccttccataccccagataaactctgcttcatcctggatctgatgaacgggggcgatttgcactaccacctttcacaacacggtgtgttctctgagaaggagatgcggttttatgccactgaaatcattctgggtctggaacacgtgcacaatcggtttgttgtctacagagatttgaagccagcaaatattctcttggatgaacatggacacgcaagaatatcagatcttggtcttgcctgcgatttttccaaaaagaagcctcatgcgagtgttggcacccatgggtacatggctcccgaggtgctgcagaaggggacggcctatgacagcagtgccgactggttctccctgggctgcatgcttttcaaacttctgagaggtcacagccctttcagacaacataaaaccaaagacaagcatgaaattgaccgaatgacactcaccgtgaatgtggaacttccagacaccttctctcctgaactgaagtcccttttggagggcttgcttcagcgagacgttagcaagcggctgggctgtcacggaggcggctcacaggaagtaaaagagcacagctttttcaaaggtgttgactggcagcatgtctacttacaaaagtacccaccacccttgattcctccccggggagaagtcaatgctgctgatgcctttgatattggctcatttgatgaagaggataccaaagggattaagctacttgattgcgaccaagaactctacaagaacttccctttggtcatctctgaacgctggcagcaagaagtaacggaaacagtttatgaagcagtaaatgcagacacagataaaatcgaggccaggaagagagctaaaaataagcaacttggccacgaagaagattacgctctggggaaggactgtattatgcacgggtacatgctgaaactgggaaacccatttctgactcagtggcagcgtcgctattttaccctctttccaaatagacttgaatggagaggagagggagagtcccggcaaaatttactgacaatggaacagattctctctgtggaagaaactcaaattaaagacaaaaaatgcattttgttcagaataaaaggagggaaacaatttgtcttgcaatgtgagagtgatccagagtttgtgcagtggaagaaagagttgaacgaaaccttcaaggaggcccagcggctattgcgtcgtgccccgaagttcctcaacaaacctcggtcaggtactgtggagctcccaaagccatccctctgtcacagaaacagcaacggcctctagcacccagaaacagggagggtcctcgaggaggacacaccagggtctcagccttttggggtgaacgaggatgaggcatctgatctattcgctaccgggactcctccaggctcccgagaggagtcgggacccttcggcttggggtcagctcagctccctgccttgtcacatttgtctgcattagaaactactgaagaaataaaagttctttttctttgctacacactttggtacctatgaacctagaacttgaagtgactcctactttatcacgtaaatttttatgtctgatatcaaacacatcttagactccccagaatgggaatttaaagatgttcagtgttgggtaacagattgccctaaggcattgccacatattctgtctagttcacttgctggattttctatggtctttggctccataactgctggggggatggggagagccacagtgtgtttcttttgtggcactttcggcaactg

SEQ ID NO: 11752 - DNA, 774 bp, Homo sapiens
gtggaagcaggtgtattgtgggcagttttgtcattgtcctcaagtccttcgcagacagtgcacagcctgctgtctgcagtcggccagaccaggctcctccccagcacactccctgtggatggccgctgctcaggacacagtgggacaaagttgggttgataggatattttagattcattttacctttgacaagggcaggccttgaattgggagcagcagccacctggccttcactctggccacaggtgacacttggtccttgctgccacctgcttggggctatgtggctacggcttacacaaaagcctgtgcaggttagaagacgactgtggtgtgcagtggtgctctgggagtggagacttcctctgttctcagagactcacccccagccctgaccctagaatttagggatagccaggaagtttctagtttgtgtaacctagaagggtcactttaataaaaattgttatgaactatagtattttagatgatgagtgacttattttaattccactttaacattttactgtgctgttaacttggaagacctgtttgaaattagtcttgatttcacactcatttaatctgctgagcacaggggctgttgtcatttgtaaaacgcaaacactgtgggaggtacttcttcgccatccagcttccttcttttacaaaaccatcattttcaacatgaaaattatgttcagttttatagggaatatttattgtttcagggtctgtaattgtatttcaaaaacgatgtcgtattcaagttgt

SEQ ID NO: 11753 - DNA, 376 bp, Homo sapiens
  misc_feature (1)...(376): n = a,t,c or g
ggcacgagnnnnnnnnnnnnnnnnnnnnnnnnnnnnnnnnnnnnnnnnnnnnnnnnnnnnnnnnnnnnnnnnnnnnnnnnnnnnnnnnnnnnnnnnnnnnnnnnnnnnnnnnnnnnnnnnnnnnnnnnnnnnnnnnnnnnnnnnnnnnnnnnnnnnnnnnnnnnnnnnnnnnnnnnnnnnnnnnnnnnnnnnnnnnnnnnnatctacccgactgagctggtctcagcactgttatttgaaacaatgtaaataaacctatagggtttattatatatactaagtgaaataagccagacacagaaaaaaaatgttgcatgatctcacttatagtgaaacttaaaaaaaaacccaaatacatagaaatagagtagaatgg

SEQ ID NO: 11754 - DNA, 357 bp, Homo sapiens
  misc_feature (1)...(357): n = a,t,c or g
ggggctcggtggttcccagattcctaggccagagtctctatactgaataatttataatagagatcatatccatcatggtggcttgaattctgtcctcccaagaacacaggctcnnnnnnnnnnnnnnnnnnnnnnnnnnnnnnnnnnnnnnnnnnnnnnnnnnnnnnnnnnnnnnnnnncagttaagatgaggtaggcccgaaaagcaatgactgacagtcctataagaagagaggacggagacccatggagaaagctgtttgaacaaggaagcagaagctggagcgatgcggccgcaacccaaggaacaccagaagctggaagaggccaggatgggctcatccctagcatcttcag

SEQ ID NO: 11755 - DNA, 487 bp, Homo sapiens
gagtactttattcattttagctagaagtactttattcattttagcttatcagctacatgatttgcaaaaattttctctcattctgtggattgtcttctcactttgttgatggtatcctttgaaccacaaaagttttaaattttgatgatgtccagttagtctatgttttattttgttgcttgtgcttttggtgccatatctaagaaaccattgccaaatccaaggtcatgaagatttattcctgtattttcttctaaagattttatggttttagctcttacatttaggtctttggtccattttgatttaaatttttatataaggtgtgaagtacaggtccagcttcattcttttgcacgtggatattgagttgtgccggcactatttgttaaggctgttttcctctgtttaatcatcttaaccctgtttggaaattaattgaccataaatgtgagtgcttatttctggactctcatttctataccat

SEQ ID NO: 11756 - DNA, 126 bp, Homo sapiens
ggtggaaaatcatgatcattctgtttaaatctgagtcagttttgagacctagagcccattaattgacaaggaggcttggttcctctcaggaaggatcttacaataccagcatctgagcatatacca

SEQ ID NO: 11757 - DNA, 319 bp, Homo sapiens
gggcttagctctatgtgttagtttttaaaaaaatctacattgttttgagtgtttggttattaatagtttatggatataactgctgcacagtagtaactccttcatctactggaaggaaggtcaatttttcagtcattagaaataggtagctaaatgagatgcttcttatttttgcttggaggtgccaggtttatttgccaactttccacagttagaaagcactttggatcaccactgtcagatatttagatttctttttgagtctggaggattgtatttcttatcaaaacaaatatccaagtttatgctttaaaaatat

SEQ ID NO: 11758 - DNA, 223 bp, Homo sapiens
gtcagcccctgcaggcaaggagagaacaggtcaggttcccgagagctcaggtgagtgacacgttggaatggcccagggcaccttcaccctgctcagcttgtggctccaacattctagaagccgaggcctctgccatccctgccctttcccatggatattccatttcaattagacaacccagcctggccggaatccccctgcgttccttcttttcctttgtgta

SEQ ID NO: 11759 - DNA, 1670 bp, Homo sapiens
ttcacttcactggctccctcaggctgcagccctgacccccaaggtagtgatggcagctggtgcatgaggtttgatttggaagtagccaggcaagccctggttgcaaaaaatacctcttctattccgacagcgggccagaggcgctgccattagacgcatccctctacttacccccgatcacttttcatggtcaggccggccttgcacaagcaggttctgttcactgcgcacccccatttcttagatggggtactgagcactgcttttcccttagctcacttcatgtggcagcttctcagggatgggacctaccatggctgtgggagatgctttgctactacttactacctttccgagggaggagggctcatttttagaaatgttactggggagccaaattgtaggcctccgaccagagggcctcgctctctccatctcccaggaaccaagggtagctctggctctctgaggagctgtctccagcctccaggtggacgtcctttccagcataccagggcttatggaggcaaaatgaaagctggtccacgtgggaactccctactgttgtcctttccttgggcagacaccatatactttttagctcctagcagtgtttatcccgttttccccaaagcatccttggactcaggcctttcatcctggacccatctgtctggcctgttgtgctgagcctttggtctaagtggttggttggtcccagccacttcttcaaaagaaggtttcctgaggtaaccataaattagggcaatcgtacttccaggaacagtgaggctgatgggcctgttcccaagggtactttggcagggggtgctggggaaggggctggcctagggccaggttcatcataccgttagccctgcagccccatgcctgtgtgtcctggtttacccgccgtgtagtggtcctgcaggagtggagcctgtaggacttgcttctcagcggctccaagcagaactctgtctgggaaggtgggaggtgcagccagtctagacctgaagccctcacactaaggactaaggtaggcctgctcagccttagcccttcgtcaggcccaagggtgggggaggcaggaggaggctgagcgtagtcgtggatagaaacctttccctaccgcacggttacacacatggcatgggactcctggctgtagctcactcgggtctactgaagaccaagttggtttttagaaatctatttaaaatatctatcatgtatctatttactgtgtttttctgaatacgcaagtgtaaatagtataatttgccagtgcaaaatccttggcaataactttgtgtattatgtttaaaaacactggaaaccgtgaccaccatggactgcccttcccctctgaggcaattattacatgtaggactctgaactttaaaccttcagcgtgactgaagcagcagcctggcacatgtggatggtcatcagtgcctcggcccagagatacctggccttcatccaaagggaccctgctgccacaagtcctccaggcagcacccgcactgtggctccttcgcactgagtatgttggactctgccatagactgaccctcttgtctggctgctgcagtttgtctgtaatgccctgacatgttgcattctccccatttggataaataaaaacaaacaaatgcttctgtcac

SEQ ID NO: 11760 - DNA, 774 bp, Homo sapiens
  misc_feature (1)...(774): n = a,t,c or g
cccccttatttcatgaactcctccaggaaatcataacgatcaaaactgaataccacacactacattaaatttcaaagcaggaaaaggaaaccctagtccatggatggtggattgctttatcactcaaaaatgcatatgggtttttaattcaaacaaagttttttaaatgtttttaaaaacgtcaaaaatgtggatttaaaaaccaaactaggctgagtgtggtggctnnnnnnnnnnnnnnnnnnnnnnnnnnnnnnnnnnnnnnnnnnnnnnnnnnnnnnnnnnnnnnnnnnnnnnnnnnnnnnnnnnnnnnnnnnnnnnnnnnnnnnnnnnnnnnnnnnnnnnnnnnnnnnnnnnnnnnncacctcgcccataagttagtaatttgaaaggtgtcaccaaacataaaagtgtgcactgcacggtgcctggagtaaattctgtcaagctagctgccttgatggaaatgcaaaaatgcaatttagtgagaacacaaataatgtctcttttcacttgttttttaaactaagaaaacgtggtgtaattagatagcattcaagcctgaggagaaataattcaaggttatataagacaggaaatatctgatatgtgcactcaagagcaaagagaagctagtgccttgtaaagcagccttcatgcagtggtcctggggatgtggaaggtctcaagccatagcgtgtgcagccagaagcaaggtacaatcaggcaaagtcctccgtcttcacaactggcctaccccccaaagacacagtt

SEQ ID NO: 11761 - DNA, 862 bp, Homo sapiens
tttttttttttttttttcaaacataccaggatttttttatttttcagtgtaaaaatcaaacatgataaacctagaaaactatcagcagggctatttcttacagggttccagcaagggttagcattgttacatttcagaagctgactttctttaaaccatctttacagaggagtaaacttcacagttccacacatggctgggctccaggtagaactccataggagtgacgagggaaagtcaccactgggcagggagggcatttctgagaaatgcagatgagaggagaggctgtgagcacaggctgtgtcaaaacccagggcaagggctccctcccgccttccctcccagtgggaaggccaccctgagccccaaaccacattctgttccttcctcgtcattctgcagacaatggtcatccacagaccacacgtgtggtggctttggcaaccagaaatttaaaataagctatggtttttccagtagccaaaatgatcctgcaccaaagctcatagactgagaacctgagcatgcaaaaccacagtctgggtgaagggatgtctgctttgtaaatgacctgctaattctttgcaacccacagtaatttggtttctgtgaacccacagaagcaggcccaccaaaaagggccttgtctgctagcctggagtatacatgagtcactggcggtgggatcagtcattttttaggctgccccattttcctaacatgttaaaatgtgtgttctcagtcttttcaagagaggaagaagcaaagcggcacttacagagtgtgagatagacacagatctgtggcgagggattggggaaggtgggtggcatcttgggactctctccaggctttctgg

SEQ ID NO: 11762 - DNA, 152 bp, Homo sapiens
ctcacctgcctgtgatgaccaacagcatttgggatacccagtgtggcactcattccagtgagttttagtgacacccccaccacacacagcttcccagtcacttccactaatactccagctggcttcccagcaagtcttatcgaagtcccaga

SEQ ID NO: 11763 - DNA, 555 bp, Homo sapiens
ctaaaggtcggcgaggcttctgaagacgcaattcctgcgacgcccgcggaggggccctggggggcggcgcgagcgtctggcctgtgttggctgtaggcaacgaaaggagccctcccggccatgcgccggatggccccgggcggtgactcggtccggagccctggaacgctacgcccacctggcggaaagcaccacggaaacgcatccttctgtggccactgttaggtctgccattttacacttttctgatctcctccttcccttctgtgagccatgtctcagggatgagtgacattccaagatgtggccattgacttctccaaggaagagtggggattcctgaaccctgctcagagagatttgtacacaactgtgatgctggagaattatcagaacctggtctggctgggactttccatttctaagccagatgtggtttccttattggagcaagggaaagaaccctggctggggaaaagggaagtgaaaagagatctggttttcaggtaactggaagtgggtgaaaaactacagaggagaggactactgtaattc

SEQ ID NO: 11764 - DNA, 425 bp, Homo sapiens
  misc_feature (1)...(425): n = a,t,c or g
tttttttttttaaaagctaatgattaataatgtttattataatgattgataattgttcatgatcatctctatatataattatgactattattattcnnnnnnnnnnnnnnnnnnnnnnnnnnnnnnnnnnnnnnnnnnnnnnnntgtcacctgcataatcctcagcccacaactgggactacaagtgcatgccaccaaacctgggtaannnnnnnnnnnnnnnnnnnnnnnnnnnnnnnnnnnnnnnnnnnnnnnnnnnnnnnnnnnnnnnnnnnnnnnnnnnnnnnnnnnnnnnnnnnnnnnnnnnnnnnnnnnnnnnnnnnnnnnnnnnnnnnnnnnnnnnncccaaaggtggtgttcaaagttgatttctcatccaactctgattctagactgaatagcacagaccctcaaatgtgaggtgc

SEQ ID NO: 11765 - DNA, 271 bp, Homo sapiens
aagttattctagacaatcactattggcttttttcttttatttttaaaaaactcacatagaggagacaatcagaaatttaccatagtcccaagaattcagctacatgatgactcgaatttaaatttagattaatcaaatggtctcctgttctctgatttctggtggcttttagacactaatttttgagaactacttttttttttttaccaaacttcagggacactctgctaagttttgaataagtaaccatcaaagttactaaaacatggcc

SEQ ID NO: 11766 - DNA, 184 bp, Homo sapiens
cccatggtgacaaagtgcctcaacagtgtgttgtatgctggaaattgatgagagtagatttcacaaaatgaaaagtgaggtaatgcatttgttattagctcaatttagccatttcacaatgtatacacatttcccaaacatggtatatacctacatgtatgcaatttttgtcaacttaaaaaaa

SEQ ID NO: 11767 - DNA, 210 bp, Homo sapiens
ggcagcacttattatggagaataataattattttcagaaaggatattctccattttatccattcctgtgcctttgtaaagctctttacagaatttgaaagtaaagctcttaaccatttatattgcagatattatccttagtttgtcattttcttttggaagtttttggttttcacttgggcaaattatactgtcttaatatatcctggaa

SEQ ID NO: 11768 - DNA, 338 bp, Homo sapiens
gtgaaaaccagaaacatggaagttttctttccgaagttcaagctagatcagaagtatgagatgcatgagctgcttaggcagatgggaatcagaagaatcttctcaccctttgctgaccttagtgaactctcagctactggaagaaatctccaagtatccagggttttacaaagaacagtgattgaagttgatgaaaggggcactgaggcagtggcaggaatcttgtcagaaattactgcttattccatgcctcctgtcatcaaagtggaccggccatttcatttcatgatctatgaagaaacctctggaatgcttctgtttctgggcagggtggtgaa

SEQ ID NO: 11769 - DNA, 713 bp, Homo sapiens
aattcatgctatgaattgccatgatcttagtaaactagaagaatgaggaatattggggatgtcaagttcatttatgtgactctttggctcaacttacataatctttgttttgatatcacagttgtctaattattttactttgtagcttaaggcaggctgaattgttgataaaatggaaaaagtagtatattgttatataagcttctgaggtgtgttttgttgtataagccctgggaggttaaaaagtcatcccttatgtatagtagttaaaggcataaaactgtgacttttagatattccacagaaccagacttatttgatgtggataataaccaatgatttagcattttgtttgcttttgttttattttatccgggttcattttttactcttcccatgtacatgaaacaggtggtggcgtgtagagatcagctgatccttgttttatggttaattgaactactttgtatccagggtttctgcaaatccaaaagtgatttttcatctaggatctattcctaacagtctactccaatcccactttagttttccacaattttaaatcttaatagtgagaattcaaatgaaagtcatttcatttgactattctgatgacatgattgtggcagaataaattgggtcttaaaatgccctagaaaatggtaaatgataaaaaataatattttaaaattcaaccaaagaaatggcccatt

SEQ ID NO: 11770 - DNA, 353 bp, Homo sapiens
  misc_feature (1)...(353): n = a,t,c or g
gagcagaccgtgacagttctcatcactggtacaatttctctaggacagttagaggagggctcatcacagcattcaattacagtctacgttttccttctttcaaacactgcagggccaatttcccctcattcagtgatacctatgtggcacacgcacacatggcacagcagataagactttggacattttgacagagaatttgcagatgcagctattgtcctctatcttggtggctgttagaagaggcacacaggcctcagcataatttgcataagagaagtagacaatgttcacactctgttcctcttatctgcttctcataagaaggaagtgattatgtggggngggcatgg

SEQ ID NO: 11771 - DNA, 213 bp, Homo sapiens
ggttagatccagaaaacgaagactggctgccctgaaacccccagaaaaaaagggatgtaggacattcaaaacctggtgcctcctaacaagcagcaagtagaaaaaacagactctgatgtaagtcaccatcaaaaggacttcgtttaaaaagaaaaaaaagttccacctaggctgtgaaagagacagagggtcagtgtggcccagagacaaata

SEQ ID NO: 11772 - DNA, 158 bp, Homo sapiens
gattcctcagctgcctcaccccctgcacatgtgcctgggggtgtggcctagaagggagtgatgttcttactctggtggtctgtgcttctgaacacaggctacatgcacacactgacaactaccaataaacagacaggggaaggtctttcatctcagcc

SEQ ID NO: 11773 - DNA, 1524 bp, Homo sapiens
ttttttttttttttaaagatatgtcgttcatttattctgaatcttatattgatagataataccagaagatttcagccatagccagataaaatacagcaaatcctaaccagcacaggttttagtgacaaacgggcccgttccatggacatagatgacttcatcaggtaattacatttttgttttcctaagtgtttacatttctttactgtgacaccttcagattggagattttaaaggcttttaagccggtataaggtgctacctgggagagttattgcataggcacttccatggcatggaatagtatttggtgtagaagatggaggctagttagctgcagccagaatgaacattttctttaagaacagtagtaaagaacagtccgagccagaagattgcctttgtgttaatgtggtgtgcaggttccaatgtggtgtgcaggttcctcccttcctgctccttccccaactctcattcatagtcttagtcttaatagcttatccctccaaaatagtccataaggtagaaaaatcataatacatgtaactggatctggatttttaaaatttccttactgggaatagctgttgttaaatcaatcttaagcatacaataatgccagttagaatcctacctggttatccatttaggaataatacagttttgtagcctgaagcaagttctacacttctcaagtaaaaagctgtcataattatctaggtaatttagaccaaaatttgttttgcttgaattaagcaagtaagtcttatgaaaacagaataaggcttcaattaattacccaggtaattactaacctgtacttactgtttttaatcattaagatgttaactttcagaaggtcttgcctatttagccaattcacttttaaagcttccatgttctagaggctgaataaaaaatgagagtagattgttctaaaagtcattggtttgactttttctaagctggaaacacagttctatataactaagacaaatggagtttatattttattggctggctagcagtactactgagtcattttagatgttaatcctaggcattgaatactattcataaatatctactttgcttttttagaaatttatctggacctgtttctatgggccagccctaaacataacctcaggtcctaaagagaaatattttctctttttcttcattttcactaaatttccctcaaagttattgggcatgtgcagtttactaactagaatctattaagtacataggtatctacagagagaaacaatgtgtatttaatttgaatataaacaacagctcaagagaggaagaaggggcatgtaagattggtttttcatctgacttctgccaattccaaacagcttcttgttcagttaccttgaaacaaatgccagtgagttcttaggcctgggataatgaaagtctaagataattttagtcaaattcattacgacataaaggctctaatgaaagaggcaccaacatggcatggttttaaccaatacatatcttataaat

SEQ ID NO: 11774 - DNA, 1505 bp, Homo sapiens
ctctaaagcgccgcagctgccaaaatgtctacaggtccaactgctgccactggcagtaatcgaagacttcagcagacacaaaatcaagtagatgaggtggtggacataatgcgagttaacgtggacaaggttctggaaagagaccagaagctctctgagttagacgaccgtgcagacgcactgcaggcaggcgcttctcaatttgaaacgagcgcagccaagttgaagaggaaatattggtggaagaattgcaagatgtgggcaatcgggattactgttctggttatcttcatcatcatcatcatcgtgtgggttgtctcttcatgaagaaccagcggaactcaaaactgctgttcaagaaacctcttcaagacttttgacttagaacctgctatattatcaagcttacctactgttatctctaaaattttttttgtgttaatgtaaagttgaatttctaggaaacgtgcctttgttttttaatatgcactccaaattagaaggccggccccgtccacattttgcacagtgcctttacagatttacgtatgggctgatgaagaggccttcttaagttccagagtgctataatctagatgtaatgttgtcactaattaattgccattactcccagttagttacccttgtcatttggcattattttcagaaccacattttaaacctttgggtaatcagatttccaacttatgccttccagaaaaaaacactactgcctaacacaaatctgtgataacaacaggctgtgccttattttgataattttctgattccctagaagagaaccctctactttttgtaagcactactgactctcgctgtatttaagatgctggtgaagagcttttgctcttgcattagatttgaagatgtttacattgttgttattgttatgtatcacttgctaaaaatattgttttaatcagagataacctctttaaaaaaatttttaaagaactatggctatgaccaaagcttctattttgccaaaaagttaaataccgataaaatggccttaagtgtattcctgacagttaaattcagaaacgtgccaaatgggaactcaaggtgccccttcagaattaaaatcattaccttgtgtgtgaaccttctacatcttcatagggcctttcttccttttggaaaggctgtagacagtgtgggctccccttctggattcagtattttgcatggggggttagagaaggtttgaggtagactctggaccgtctcataaaagagttctacccagcagttggcagattatcagctgtggactccagcatgtttctgataattatgcaagcaacaattctgtagcctcaagtaagaccacctgtgaacttgatcattatctggcccaaatatgaagataaactataactttggagtttgtttcctatttgtattcacattctgcttcctaaatcagttttctaaattatgcctgcaattaggcattggtcaggggtgaatggctcttttca

SEQ ID NO: 11775 - DNA, 564 bp, Homo sapiens
  misc_feature (1)...(564): n = a,t,c or g
catccctggcgcagcgcctacctgcggaaataacagcctcagccggggcccacccagcactgctgcccacttccttcccagcccccagccaaagggttggctgtcagggctgggccctgtgagtgctggactctcccgggccacaatagggacagggcagggacagggacagcccaggtcacacgtggggtcagcagaggtaccacgaagctaccttttggggatgattgctcgattgtttggtttttaaatctgagaagcctagataactaattctgcttttaatcacgatgttttaatctacctctgtctctttaaccatgctgtctctggactgagcaagagggaggagggagcctgctcaccccactccagggccttccccagcggccaccaactgacctggggcgctgctccccacagtccaaataagctgaaagtgcagctcgctgcaggccccanagcgagcttcccctcctccctgctctcccaggcccctgncacagcctctttccgccctntctttctgatccaggcccctcagtccaagctttggaaaacctt

SEQ ID NO: 11776 - DNA, 212 bp, Homo sapiens
aaaggcagacaattagaagttattccatgggtgttggggtggtggaagtcaaggtgtcttgggctgctggcagaaaagctttgtaagggggagtctgagagaggagaattgaaatgtcactgaataactacagctggtaatcaccttcatcctaagtcctgctgaaataacaaggcacaattaactctcaggaattgccctgtgttggggac

SEQ ID NO: 11777 - DNA, 292 bp, Homo sapiens
cccatccacctggtcacacaccctccacggaaggccactcaagggcagacccgtagcagagcagaccctcagggactgggcccaacctcgggagccagcccctgccaggtggggctgaagtctgttcactcctgttccctaagcctggaccaccttctacacaggctgcagctgctgggaggccccaagctcatgcagcgcaacttttccaaggcccagcctgctcagacgattcggcccaaagcacaaagcatggcagacaccttccgtaagccaaagaactgggagtagt

SEQ ID NO: 11778 - DNA, 356 bp, Homo sapiens
  misc_feature (1)...(356): n = a,t,c or g
gaacagcgcgttcccgttggcgtctgaggaacagcatctctgccttcctgttcacggtgaccttcgcttggtgtcctcctggcctcagcaacctgacaattctgtcgtgtcccggcannnnnnnnnnnnnnnnnnnnnnnnnnnnnnnnnnnnnnnnnnnnntgggctcaggtgttgctcccgcctcagtcttctgaatggcttggagtatagagagatggctaatgaatggcgcttgatgacagatgagtaatgcctgttgctgaaagattgacgatcatctttctcaagatgttttctgtcttcatgagtcaaaatttgaagaggaaaggatggtggctgggtggttgacaaat

SEQ ID NO: 11779 - DNA, 241 bp, Homo sapiens
gcgaaagaaaattaaaatttgaatgctgaatattctggctctactctggcctttttttctggttcccttccaaaatgcacaaatcatacccttgtctgctccaattcagtctccaaacctggtgcctgtgctcctggcccccctagcatcatgctatcccaggagtatcaggaccagacacatccacagccaggctcatgggtctcagacagcaacttgagttaaagctgaaactcatcct

SEQ ID NO: 11780 - DNA, 345 bp, Homo sapiens
gcataccgtaagtgcttttagtaatactgctgttattggtgatggtgatgattagttcctgttcagcaaattgagagacttgactgaaatcactataacatctcttttagagaaggaggcaggtgatcagatccacagcctctgaggtttttaaccacacactaaaatatttaaatgggcaggggacaggggaagctgtcacttgggccacagaggggaaggtagggaagccgaattaacatccagccacccctgaggcctgggcctaccagtacagagccatgctcagccatctggagatagaaatgctcaggggtccccaggtagcttggatgtttcactggc

SEQ ID NO: 11781 - DNA, 341 bp, Homo sapiens
ggaaatataaattaaaagatgtaagctaaagtatgaaagctaagctggagaacattgaataatttgtaattttgttcacctgtcagtaagtatgaacagttgttagctcgtagtaataaaagtggaatgttatactcttaattgtgcatactcttaattgtgctgatagaagggagaacaggtaaaaatagttagatcacagtgccttgtagtgaaaatttgtctatttccatcttcctctcttcctcccctaaattattttcttgagcttcagaaaatattgtggcctagattaagattgtcgttctaattagcggataaacaggtactaataaagcatg

SEQ ID NO: 11782 - DNA, 457 bp, Homo sapiens
ttgccacccagcttccccccgccccaccggcagtgctccagtgagcccaacatcaccgactaccctgacggactggaggagggggccaggggcagccaggagggctcggagctgaactgtgcttccctcagctgagtcgccacccctgggcctttccatctcctgttttgcaaccaggatgaggacccctccatctccgtggattactgaggggggctcttgctttatgcgatgctgccttatttcctttagggtactgtcctggtcaaaatgacctaaggggaaaccgttgttgtaaatctctttattttggtgactgtgaccacttctttggtagccaccaattgtaagttgaccaagtttgcctaatggtcactttctgactccaagcctttgccaagccttgactccagattcctcatctctggggcctttcttcctccgaatgttggactgg

SEQ ID NO: 11783 - DNA, 227 bp, Homo sapiens
gagtgtgtgtgtgttgtggatgtgtgtcttcatctatcctgctagtggaaaggttactgtttgaaaaatgtagttccaacacagccactagtttgtgctactttagacaagtatttaaatctttgcaatagagatattataatagagcattccttgccttggcacaaggctgttgttaaattggaagactaaggatatgaaagaattttgtaatgtataaagaaatc

SEQ ID NO: 11784 - DNA, 254 bp, Homo sapiens
tcctgtctaataacccctctgagaggcagacagaggagtaagacacacagaactaagagtgccagcttgctccttcctgtctttattcctgattcagtattacccacagctagaaattgacaactcagtaacttcagatgtccctcatagtagcagatgggaatgtaccccctctctaaaggcaaaagcagatcaagagaaaagagagcccagatgtctcttagctgagggcaggcctacctagttttttctcc

SEQ ID NO: 11785 - DNA, 340 bp, Homo sapiens
ggctcctcaccttgggctggacggggttggcactaacggggaactttccccagaacatggccaagctccaggatgggggtgatgagggaaggaaggccagtgaggagaggagtgaggaagaggacagctgcgagtcaggtggtgagagcacttggaggggctgagaggacatgggctgggagtgaatgcatgtgcacatacacacacacacctctccagcatatgtacacatgcacacacacacctctccagcatatgtacacatgcacacacacctctccagcatatgtacacatgcacacacacacctctccagcatatgtacacatgcacacacact

SEQ ID NO: 11786 - DNA, 900 bp, Homo sapiens
  misc_feature (1)...(900): n = a,t,c or g
atttttcttttttttttaataaagccacaaatatagaacttttaaacggatgtctcagactgtaagcgaaggacaaatttgtgagatttggggtctatgaactcttcagagagtatgatgaatggaattttcttcacattgactacgaggctgaagtccaagcacttaaggacgaacacaattccatcccgtaatccattagtcacagcctcatcactgacaagcctccactgtgtagagagccagcggtccttgtcatattgcagggtggggcccgcactgaggtaccgttctaggaaggccttgggggtcatgccgttggtgatgcagaaggccaggtgctgcaggatgctctccatgctgtggtagttctgctgccgggtgatgcgcaggtacttctggagagccctggccatggaggggaaaatggcctgggcggcctccctagggtccatcacctcccctggggctttctgctgctcctcagcctggagacgctgaatgtggatgaaggcctcttccactgcaaccaccagccttgctttccgcttctttactcgccgttcatgttcggcctcttcataatacaactcgttgtggcttgagtccctgcgccgagcagctgcagcaatcatggcccgggactggccagtggcattgttactggggccatctacattgtagactttcagcccggccatatgcttggctgctcggaatttggaggctgttaggaggtttgggttatagatggtgaaatctttgtagtaattttctaggaccaccaatgctgctcgctttgccagctccttttcctgtgagtcctctgggctccgggcgcaaggctgtgggcagacgccgtgcgagggaagccatcccagctgtagncgctggcaggag

SEQ ID NO: 11787 - DNA, 1365 bp, Homo sapiens
  misc_feature (1)...(1365): n = a,t,c or g
ttttttttttttttttcatgaacagttgggtttatttcaacagtaaatctgaaactcttgccttaagcaagagtactacagtaattatatcaggaatagacaatttcctacactgtcaaatatataaaagttccttttgcactttcttcaaacactgatcaacaagcagattcagtccacatttgctttgatctaactactgagttaacccaagctttttcttccagagactctggcatctcaggtgggggagggcgaggaagtctgaagtagaccttcacggagtcatagataaaccactgtagtgcagtcagggtaccaatcatgatgatacgggcaaacagtcccttccatacacctttaaatccaagtctcttggaggaccagagaaggcactggctacctttttctttattcaacacagataccacagaatcagcagggtgagaaacaattgcacaaaagactccagctatgtaacctgctacaaatgttacaaccagctggctctggctttgaacattcactggnggggccttaggaaccacaaacttgtacagtgcttcaacagtacgttcaaagcagggcgaacttcatcatggtgtatggtatctgtctcatccagagaggagcaacccccttgtagaatgcttttaggccttcttccttatacattttgggagctgcatccctcaaagtgttggcataacctggctgggtttgaattcgaaccttagcagcttccataggagccagggcaatgtcagcaaagaattcaggcactggcagaggcagccaatatagtgatgtgcgcagagataagtattctcctctcccaagcatattgctatacaagactttaaagacttcataaaaggccaaaacttgcagagtccctgcatggagtagccaaggaaagtcggagcccatcctttagccaaaccacggaacaccatcctctttaagtgtaactgagaatcccgttaaatatgcccttgtacttttgggggtccaaccttcattctgcatttaaccagatctagaggaaccaatgctgtatgtgttgtgccacagctaataattcctccaagtccacaaaggataaagaatctgccagatccatagtcacagctatactgctcttccacgggcggcggctgccaggttgcgagggcggcggggcctgcccgtgggccctggggagctgctgcggaggtccccgagaccatcgtgcaccagctgcagatgtggcgtgttgaaggggttcgcccgcgccaggtgcgccacggacgagaacatcttttccctaagatggcgatcacacaaccactcccttggaaaggttgcggctcacagaggccggac

SEQ ID NO: 11788 - DNA, 541 bp, Homo sapiens
  misc_feature (1)...(541): n = a,t,c or g
tgttgttgttgttgttagttttttccttgaaccatgtgaaaacaagttacagacatggtgctgcttataaacatttcagtgtgtgtttaagaccaaagatatcatcttatgtgatcagagtataattatcaaaatcaggaaatttaatactgaagaaatgctcttatccgcagtctaaattatttcataccagtaatgttccgtatcgctgttgcttcctgatctttcccttccccagcctccagtccagaattcatcctgcatcacacagtgcatccagttgtcaggcccatcttggcgagacagggtctccctctgtcgccaggctggagttcagaggctctgcttctgtggtccagggtccaactcctggctccagcggtcctcccaactcaggctcctcaaatagctggggccaagggtacgtgactccanacctgggcaaatttttgaatttttttggtagagacaggggcttgctaangttaaanaggctgggaaggcccatcttcttaactgagagaccagtttatgctttcct

SEQ ID NO: 11789 - DNA, 309 bp, Homo sapiens
cactctgcctgattttattacaacaaaacatttatgtttctgtattatgtgtgtgtgtatatgtattttatatatatgcattttccgtcccaccctgccaagtcatgatttcttatgcactgaacgtaggggcattagagtagaaggttgcctcaggttagttttgtgtggggttgaatgccttttatttctgacttcatttctatctgccaatggatcaatgcattttactctatattatcaaaatacaatatagtgtaagaagtggatcctggctaggtgcagtggctcatgcctgtaatcctagca

SEQ ID NO: 11790 - DNA, 452 bp, Homo sapiens
gtagaaatatcaatattcaagtaaacaaatttattaaatccaacagcaggtaaccttccaaataaaaaacattaaaggaaaaaatgtagacatcaaagacaaaaatgtgtgtaacaagtcaataaaaatactcaaggggccatttggagagtgcaacagtgcagaaaatacaaacaaaagtattaacttttgtcaagtttgtacaacctcaacaaacagacacactggtcacaaaccaagagggatccacaaaggtggagggtcacatgagcagtggactcatcacctcagcggcttaaggcagggtatatctgtgggaccaattcatccaagccccatgtgcctattgcttcacattccccctttaaaacctagtcatattcattagtgcaacaggtaagagcaattaagcacagacggagctggggaccagcctcgtgccgaattcttgg

SEQ ID NO: 11791 - DNA, 343 bp, Homo sapiens
ggttgaatattaacatacaatataccttgtatattaatgccatagtttttagaaacactaatttaaacaacaaatttaaggggtgctggcatatcccagtgacaccttcagttttattgctgcttagtattttctagtaaattagttttaattattggtagtctgttgggcaccatttgggaaagaaataaattggtctcagtgtagcagacttgtagccaaaaactttgaataaaaaataagtataataaagaatattatttcatttttaaaggaattgtattattttgaagtgctgtgtggttgatatggtttggtgtgtctctacccaaatctcttattg

SEQ ID NO: 11792 - DNA, 359 bp, Homo sapiens
gtgaatatataccgtggcatagtatcttacttagtattttaataagatccttatttatataacaaatatttttttattcctctgtattgctactttagtctctgagctaattttcatgaagccaatctaaaaatcgtgttacttctaagggatgtgggagcgagtgaggatggaacagttgtgctgtcatattgcccctccccagtgccagatagtgaatgaggacccactgatttaaaggcaacactgcagccccttcttgcctcattgaagtctcaagttttattacagtaaaagcacttaatgttgacatttctgaaagaatgaagaggccaggcacggtggctcacgccggtaat

SEQ ID NO: 11793 - DNA, 140 bp, Homo sapiens
  misc_feature (1)...(140): n = a,t,c or g
gtttttttttttatttttaaaaaatcagctgagttgcactggctcataccagtagtctcggttacttggaaggctgaggcaggcaggcagnnnnnnnnnnnnnnnnnnnnnnnnnnnnnnnnnnnnncattcatatcact

SEQ ID NO: 11794 - DNA, 153 bp, Homo sapiens
  misc_feature (1)...(153): n = a,t,c or g
gcgccgggctatgtctttgttcttaagacatactatctaaagtgctcagaggtggctgggcacgggtggctttatgcctggtaatcccagcactttggggagggccaaggcaggcctttgagggtcaggagttcgaggaccagcctnaccaac

SEQ ID NO: 11795 - DNA, 433 bp, Homo sapiens
  misc_feature (1)...(433): n = a,t,c or g
cttcatcagtgtaagcccaggatttatcttcccttaaaatacatatattgaacctaatccttaatgtgatagcataggaggtggagatgttggaatgtgattaggtcatgagggtggagcccttatgaatgggattagtgcccttgtaagaagctgaagaaaccacagtttnnnnnnnnnnnnnnnnnnnnnnnnnnnnnnnnnnnnnnnnnnnnnnnnnnaagcagaccctcaccagaaaacaaatctgccttgatcttggccttcccagcctacagaaataaatatgttgtttgtaagttacccaactaatggtattttgttatagaagcccacatggactatcagttaatgtacatagaataattgttacctatttattggttttgtggcttctaatatttttttaaatgaattttaaaaaagacagaga

SEQ ID NO: 11796 - DNA, 53 bp, Homo sapiens
gaactggatgaatcagacagttttgagacacccaaagaggcaggaagatacaa

SEQ ID NO: 11797 - DNA, 445 bp, Homo sapiens
attcggaacgaggccagtctgctgtagggaataccctaattagttgaggcatgcttttggaatcctggcatgttggcatatggctggtctatcctttttaagatctctggttgggggtatctggatatggattaggagggacaaggagcctttttcttggctaatgttttccaatacttttttgaatggtgccagcccctccaggcatcccacccccaaatcatcatctttagtactaacagggtgtctggtcttagaagcctcccttcagatcccagctgaccctggtgactgcctggccttgatgttggctgcagccttctgatagaaccacatggattccacccacagctggccaggcttgttacatgggtcagggaatacaaatggcccccccccaggagcaggtgttggcctcagttttcagggacccttggtgttgctc

SEQ ID NO: 11798 - DNA, 183 bp, Homo sapiens
gcaagaactcaaaaagctttgtggcctgagaacaagcagccccacagaacttcagagcccctgaggacaccactgtgcattaaataatgctcacagtgatgatcctgagtaactgtgaaaagagtaaactgtgttcaatgcacttcctgcaatgagaaaaattgccatcacaaaaatgattag

SEQ ID NO: 11799 - DNA, 244 bp, Homo sapiens
gggtaatcataagttcaaaataattaaagttcatttgagataattaaatcaaaacctctagtctgggttggagggtgataaagttatctggcgaaatatatgaacttctgttaccttcctcttctgctaaatgaatggtaaaatgaatcctgatttgtttaggcagtttacttatgaagttgggagaattttttttttttctttaaaggactgagtctggctctgttgcctaggctcaagtact

SEQ ID NO: 11800 - DNA, 1120 bp, Homo sapiens
agctggggatcaggaaaaaaaaagaaaaggaaacaaatgatgacaactatggaccttgacccagtttacgtccaccaaatgttgcttgttggagagatggtggtaaggctgctggctcaccttcgtcatctgatcaagatgaaaagctccctggccaggatgaaagcacagctggaacatcagagcaaaatgatatcctcaaagtggtggaaaagaggatagcttgtggtcctccacaggctaaactgaatggacagcaggctgctctcgcttcccagtatagagctatgatgcctccttatatgttccaacagtatccgaggatgacatatcctcctctacatggtcccatgagattcccaccttctttatctgaaacaaacaaaggccttcgaggaagaggcccacctccttcatgggcctctgagcctgaacgcccatccattcttagtgcatcagaactgaaggagcttgataaatttgataacctagatgctgaagcctgatgaaggttggggcaggtgctcagatggaagtagattatacagagcaactgaatttcagtgatgatgatgaacaaggaagtaacagtcctaaagagaataacagtgaggatcaaggttcaaaagcctctgaaaacaacgaaaacaaaaaagaaacagatgaagtttccaacactaaatcatcttcccaaatacctgcccaaccatcagtagcaaaagttccctatgggaaaggaccttcatttaatcaggaacgtggaacatcttcacatctgccaccacctccaaagttgcttgcacagcagcatccacctccagatcgacaggcagtacctggaagaccaggcccctttccctccaagcagcaagtagctgatgaagatgaaatatggaagcaaagacgaagacaacaatcagaaatttctgcagcagtagaacgtgctcgtaaacggcgtgaagaggaagagcgaagaatgggaggaacaaagggaaggcagcttgtgcggagaaactgaaacgattggatgagaagcttggcatcctggaaaaacaaccatctccagaggaaattagggaaagggagcgagaaaaagaacgggagcgtgagaaagaacttg

SEQ ID NO: 11801 - DNA, 223 bp, Homo sapiens
  misc_feature (1)...(223): n = a,t,c or g
gggtnnnnnnnnnnnnnnnnnnnnnnnnnnnnnnnnnnnnnnnnnnnnnnnnnnnnnnnnnnnnnnnnnnnnnnnnnnnnnnnnnnnnnnnnnnnnggatggagttagcctatcctttcctgccataaatcctgtgcttgcttctcttctttactaatatcttgtggcatttttttnnnnnnnnnnnnnnnnnnnnnnnnnnnnnnnnnacctgttcagtgct

SEQ ID NO: 11802 - DNA, 210 bp, Homo sapiens
tggggccttgctatgttgcccagggtggaccctctgccttttaagcaaagaggtacactctaaaaactatcctgatcaatggctccaaggctggagcaaaggcctcatccctttcattctctacaccaaacttgtccaaacctcagcctgtggaccgcatatggcccaggacgaatttgtgttgggttggattcaaagtcctcgtgccgc

SEQ ID NO: 11803 - DNA, 405 bp, Homo sapiens
gcatcgaccaaaaatgctcattgtcctctacaccctgctttcctcccaggggtacaggctcgggagaagcagcctgcagagcccccagcccctctgcggaggcgggcggccagtgatggacagtatgagaaccagtctccagaagccacatcccctcgtagccctggggttcgctcccctgtccagtgtgtctccccggagctggctcctaccatcgctctcaatcctggagggcggcccaaagaggtgagtccttaagctgtatcttggggctatggagggtagtggtgcccactttaaatctccagaaacctgatggtcaacttggcactgatatcagtatactcagtgatttgtctccccctacgtcctcacccagactccacatgtcagagaagtcgacgc

SEQ ID NO: 11804 - DNA, 845 bp, Homo sapiens
agacaagagtgtctatttgatgtaagtgtagggaatattagtgatagttcggaaatttctccagataatggcaagacactcctttagcagcccccctttcctgagtttcccattgttccacttattaaactctgacatatgtcatgccctgtgtacctggatatccattcatcctgatcacaacctgatctcccacttaccacaccatctcagaacattgtctggcagattaaaatatctccccagctctgctaaccccactcttataacatgactagctcctccttcccccttttatccctttatctataagtactttttaaaacaagggctgacagctttattgttcaggaataattgtcaaaaggcttagtggactgtacttgccagtaaaaggttatttgctggcttggggtgtgtgctcctcagctgtcctgtgtcattccaattatattgtcatatggtgagatttgtgcctgatgtcattgtaggcaaggatatagtagaggcagctcatttgtatgttggtgcttcccagttctccatttgttgagatgcttttatcattcagacctttgagacaatccaacctgcttccttcatcttaaaggtgaggaaatgggcccagaaagggaatgtgatttaccccaaatcatactatgtgttggtgatgggaccaagatgaaatccagctccccagcctctggcagggactcctgaactcatagctttgggcactgacctcatggggtgaaagggaagattatatttctatttgaatgttttctaacacatgaaatttatataggtagttatacctagcaggagccaaagaacaataattt

SEQ ID NO: 11805 - DNA, 483 bp, Homo sapiens
ttttttttttgacattttaagtattagtttattcagaaacgcctttaaaaatcagtgtgtatagaactagctcatttcttaactgtcaaatttagaagtgcaacagtgggtcttcagagagaatatgcccaagaaaaactggataaaaagactgggtaaatacatcaaatgaaacagtgattcacttttgacaagactgaaatataagtatataatcactgatgcatatttattcagtaggcccatgtgattatgtggtttttaactaacagcatttatttttgcaaactgcttggcattcctccaagggaaaggagcttctagactacaaacactgagcacatacattttaaattaacacatggaattgcatatggggttgttggtatgcttttagagtcttgtctctacagaagaaaaacacgttcctggggtccatgcctttttcagaggcacaatctatagcttggaacctaattgctc

SEQ ID NO: 11806 - DNA, 241 bp, Homo sapiens
gaaaaattcatatgtttaggtcatagggaaggaggagttgttggctgttaaaaaaatactgcaaatggcctttgaaagtctagacatcttcatcataaacacaaacattcctcttcacaaagggacttcaagtaaccttaggctggagggcccacttgagtatgtttttcttctcattctttctttaccttccctccaggccacccaacccacattcagtggcccaagtcacgtggggttt

SEQ ID NO: 11807 - DNA, 495 bp, Homo sapiens
gatccataaggctttagttccttttctattttcttggaaggttctctctcggaatcatttttatctttcttttcggtagaaaacaattcaatggttttatctagctcatcttctatgtcagctttcatgttgtaagaaactccgtaagcatccgcctccaggaagtccttttcgtactggccggagtccttcctgctaccgccctccttgtaatcttcgcccttctctttcttctcggccttctctttcttggctcgctctcggtcgtggctcttcttggatgaagatgaggagtgtctgtgcctctccttctctttcagcttctcagggaggcaggcgctctccctcggcttgtcgtctccaggtggctccgtgaaagagacctccaggaaggcagtcagcccggctcctgccctcggtccgtgaagctgtcagaggagacctcgctgaatttatcgttggagtcttctctgtactcatggagaagcctcttct

SEQ ID NO: 11808 - DNA, 361 bp, Homo sapiens
caaatagtgcctgaatggtgggcgtctgttagcgagatggtgaactggcagatggcgcctgtgtgtcaatgcccatggccaccgtcctgctttcagacaccagttctcttccaggtaaccttctggcattttggggtttgagataccatttcctaaaggtgaattatcacaaaatactagaaataaccacataagtgtttaaaattattgttaaatacagtaagaaattcttcttcaaaagtttagcctgcttaagtttccttgtcctttgtttcctgctttcaaggccagacttccttactctctgtgtttcccctaccctggtaaacaaccttccctgccagtccttacccatacagcc

SEQ ID NO: 11809 - DNA, 84 bp, Homo sapiens
ggatacttctaaggtgctttcaagcttagtcatacatagcccattttcgcatgttttcaacttaaaacagaaaactatgtcgtg

SEQ ID NO: 11810 - DNA, 468 bp, Homo sapiens
cagatttgcctgcaatggataacccagtgtttttggaattacttagattggatagaaatctgccattatattgctacttgtgttttccttggtcctgattatcaagtgtatatctgtatagctgtattcaaacatttacagcaagacattctacagcacactcagactcaagatctgcaagttttcctaaaagaagaagcactgcatgggtttcgagtgagtgattattttgaatacatggaaattttggaacaaaactaccgaacagtgctgctgagagacatgcggaacattagactgcagagcacatagatcatgagacacacggtttaaatttaggttttatttatttttaaacacagcaggggggcttgatgtttttctgtgtctgtaacaacatttactttgtgaatatacatattgtaaatactgagaagtataacgatatatttaagtaggtatgagctc

SEQ ID NO: 11811 - DNA, 255 bp, Homo sapiens
tctcaaatatttctattgaattaaatgttccccatctcaccatgcaagagaggacttctcactcctgtaaactcaaatagcagttgctgatttctattttttttttttaccttgagatgggagtctcacctctgtcactcaagctgaatgggagtgccattgcgcgatcttcggctcactgcaacctcccgctcacgggttcaagcattctcctgccctagcctctgcgtactgggaccacaggtgcctgcacac

SEQ ID NO: 11812 - DNA, 447 bp, Homo sapiens
  misc_feature (1)...(447): n = a,t,c or g
gggatgcctggtgtctataataccctcagcctgggtgcagctacctttctggacctagtcgggagcattggaactccctagggtgaaagagctcgtgcccactccccttgcccactcttgtgtccagcagatttaagatctccaaggtcattgtggtggggganctgtcggtggggaagacttgcctcattaataggtaagggggtgctggagctgagctgggcagggtggggccaagcctagccaggtgggctggctccagatcacagcatctggtaccctctcaggttctgcaaagacacctttgataagaattacaaggccaccattgggagtggacttcgagatggaacgatttgaggtgctgggcattccctttcagttttgcagctgtgagttgcttccacaaccctttccagctattccctttttccccagcaaccacaa

SEQ ID NO: 11813 - DNA, 378 bp, Homo sapiens
ggaccaactgaacgtgtccaacattgaccaggtggccagacacctgaggggccttctggaggaggagtgtcacaccttggagagggagatcctcatcctgcagcgctgcctggaagaggagtatttgaggccttgccacccctctgaggcagccctggagcccaccctggcagagctaaaggaacagaagaaggccatggagcaggagctgcaggcatctgtggggccttcttgtgtctctcccaaccacaggcagcggcccttggggtcctccacacagggcctcagacccccgcttcccctctgcggggttgcacctctccagtgctgcctgcctgcacctcctctggagccctaccttcgacctcgaggccagtc

SEQ ID NO: 11814 - DNA, 943 bp, Homo sapiens
  misc_feature (1)...(943): n = a,t,c or g
tgaggcgagtgaagtggactctgagggctaccgctaccgccactgctgcggcaggggcgtggagggcagagggccgcggaggccgcagcntgcaaacatggctcggagcagagacggcggaaacccgttcgccgagcccagcgagcttgacaacccctttcaggacccagctgtgatccagcaccgacccagccggcagtatgccacgcttgacgtctacaacccttttgagacccgggagccaccaccagcctatgagcctccagcccctgccccattgcctccaccctcagctccctccttgcagccctcgagaatgctcagccccacagaacctaagaactatggctcatacagcactcaggcctcagctggcagcagccacagctgagctggttgaagaaacaggaggagctcaaccggaaggcagaggagttggaccgaagggagcgagagctgcagcatgctgccctgggaggcacagctactcgacagaacaattggccccctctaccttctttttgtccagttcagccctgctttttccaggacatctccatggagatcccccaagaatttcagaagactgtatccaccatgtactacctctggatgtgtgagtagtgagaagccttttngaggaagttacaggtagatctcttaactgccctggggtccgctcaccaagaaccaaacacttcacctctatttagaactcaccagcctgctagcaaatgttcttgccctctccccactttttattgtccatatgcaggaatatattttgaaattctttagatgtcctttggggcttgggtgcagttgggtatacggctgttaattcccagcacttttggggaaggctntaggnttgggttggataaacctgaaggtcagaaagtttgnagactaaggcntgatncaacatnggaggaaaccccca

SEQ ID NO: 11815 - DNA, 1714 bp, Homo sapiens
  misc_feature (1)...(1714): n = a,t,c or g
tgtggcctgtgtggtgccaccctgctggggcctcccaagttttgaaaggctttcctcagcatctgggacccaacagagaccagcttctagcagctaaggaggccgttcagctgtgacgaaggcctgaagcacaggattaggactgaagcgatgatgtccccttccctacttccccttgggtctccctgtgtcagggcacagattaggtcttgtggctggtctggcttgcggcgcgaggatggttctctctggtcatagcccgaagtctcacagcagtcccaaaggaggcttacaactcctgcatcacaagaaaaaggaagccactgccagctggggggatctgcagctcccagaagctccgtgagcctcagccacccctcagactgggttcctctccaagctcgccctctggaggggcagcgcancttcccaccaagggccctgcgaccacagcagggattgggatgaattgcctgtcctgggatctgctctagaggcccaagctgcctgcctgaggaaggatgacttgacaagtcaggagacactgttcccaaagccttgaccagagcacctcagcccgctgaaccttggcacaaactccatctgctgccatgagaaaagggaagccgccttttgcaaaacattgctggcctaaagaaactcagcagcctcaggcccaattctgccacttctggtttgggtacagttaaaggcaaccctgagggacttggcagtagaaatccagggcctcccctggggctggcagcttcgtgtgcagctagagctttacctgaaaggaagtctctgggcccagaactctccaccaagagcctccctgccgttcgctgagtcccagcaattctcctaagttgaagggatctgagaaggagaaggaaatgtggggtagatttggtggtggttagagatatgcccccctcattactgccaacagtttcggctgcatttcttcacgcacctcggttcctcttcctgaagttcttgtgccctgctcttcagcaccatgggccttcttatacggaaggctctgggatctcccccttgtggggcaggctcttggggccagcctaagatcatggtttagggtgatcagtgctggcagataaattgaaaaggcacgctggcttgtgatcttaaatgaggacaatccccccagggctgggcactcctcccctcccctcacttctcccacctgcagagccagtgtccttgggtgggctagataggatatactgtatgccggctccttcaagctgctgactcactttatcaatagttccatttaaattgacttcagtggtgagactgtatcctgtttgctattgcttgttgtgctatggggggaggggggaggaatgtgtaagatagttaacatgggcaaagggagatcttggggtgcagcacttaaactgcctcgtaacccttttcatgatttcaaccacatttgctagagggagggagcagccacggagttagaggcccttggggtttctcttttccactgacaggctttcccaggcagctggctagttcattccctccccagccaggtgcaggcgtaggaatatggacatctggttgctttggcctgctgccctctttcaggggtcctaagcccacaatcatgcctccctaagaccttggcatccttccctctaagccgttggcacctctgtgccacctctcacactggctc

SEQ ID NO: 11816 - DNA, 267 bp, Homo sapiens
gggatttgttcacatagtgttatgcatgatcttcgtaaggttaagaagccgtggtggtgcaccatgacatccaacccgtatatataaagataaatatatatatatatgtatgtaaattatagcactgagggccctgctgccctgctggaccaagcaaaactaagccttttggtttgggtattatgtttcgttttgttatttgtttgtttttgtggcttgtcttatgtcgtgatagcacaagtgccagtcggattgctctgtattaca

SEQ ID NO: 11817 - DNA, 283 bp, Homo sapiens
gagctagcaccatgagcttcaataccctgattattctgaactcaaatcagcaggaaatcatttccctttcttggatttgaactgttaagttttgggaatttagggatgagtaaaaacgccatactcccttcaataatctcatattcttccatccctaagacttttaaaaatgttaaggcaaaggagatttctctcccctccagttggagatggagatgagacataacagagaaattgctgttttaaaaagagaaaaaccggccagatgcgtggtgtcacgcct

SEQ ID NO: 11818 - DNA, 763 bp, Homo sapiens
  misc_feature (1)...(763): n = a,t,c or g
ctagtgagaatgaggaagaaaagaaaatgttggacaccagagcccgagaattaaaagaacaacttcaccagaaggaccaaaaaatcctactcttgttggaagagaaggagatgattttccgggacatggctgagtgcagcacccctctcccagaggattgctccccaacacatagccctagagttctcttccgctccaacacagaagaggctctcaaaggaggacctttaatgaaaagtgcaataaatgaggttggagatccttcagggtttgggagtgggaaatcttggaggcacacttggggccgactgtcagcagccccattgagcaagatgtggtcagtcccctttcacctgccccggaggagcagagacctttggaggatttgacagccatcagatgaatgcttcaaaaggaggcgagaaggaagagggagatgatggccaagatcttaggagaacggaatcagatagtggcctaaaaaagggtggaaatgctaacctggtatttatgcttaaaagaaacagtgagcaggttgtccagagcgttgttcatctctacgagctcctcagcgctctgcagggtgtggtgctgcagcaggacagctacattgaggaccagaaactggtgctgagcgagagggcgctcactcgcagcttgtcccgcccgagctccctcattgagcaggagaagcagcgcancttggagaagcagcgccaggacctggccaacctgcagaagcagcaaggcccagtacctcgag

SEQ ID NO: 11819 - DNA, 90 bp, Homo sapiens
cacaacctagatatccctcatatgtgctgtccatgctcctatgagaacctaatgtgcgctgatctgacaggaggtgaagttgaggcggta

SEQ ID NO: 11820 - DNA, 328 bp, Homo sapiens
gcaggtgactggccccctgaggccagcggccagatccatgcatttatcatggtgtggtccaggactggtggtacccttcactctgcaaagcccctgtaagggagacccaccgtcctggactgcagattcttcccacaaataacctttgaaggacaatgggcagcccacagttaaagataacaaggatagaaatggttaggcgaatattcatggagagacttgagtccgtttggcaaatcgggctgatttccagtgaatacctacagtgggcgtaggacaattaaacatgtcaaaaatgtagtctcccctgtaaacattagattctcct

SEQ ID NO: 11821 - DNA, 299 bp, Homo sapiens
gagcctggtctggaccccacccccaaagtgctggagtgaggctccagaggagactttgagttgatgggggccaggacaccagtccaggtagtgttgagacccaggcctgtggccccaccgagctggagcggagaggaagccagctggctttgcacttgacctcatctgccgagcaatggcgcctgcttccctccagaatggaactcaagctggttttaagtggaactgccctactgggagactgggacaccttttaacacagacccttagggattttaaagggacacccttacaacatt

SEQ ID NO: 11822 - DNA, 387 bp, Homo sapiens
gccttagagaaaaatccaaatgtgttgattttagtttagtagtgagctgaatctgctgagggttggaactgcttccactctagtctttagattgtaaaggagttattctttagcagaagggccaaagacatgaccttggaataaccagcctgagtttattagaagtctggtttcccactgggcaaggctgcatgggatgctgaaagcagggcaggctctggagcttcattggctactggcctggggcaaattccatgacatctcatcttaaaatggacaagctgcaataatgcccactcatggtaatgccatttgtaggagattggtaagggtggtgggaaaaattgcagaagatgcaaaccttcttggaaggctggaaggttttac

SEQ ID NO: 11823 - DNA, 900 bp, Homo sapiens
tttttttttatgtctttacagctttaatctagcaggccagagatgtggccagtggggcagccagagaggagggctactgccagctgctgacggaacctcctccctccccccaccccagcccagaggggacaaacagtagggccccagccttcctggctgggatcttgggagcagagggactatttgaaaacaggcactgtgacccaggctgtcatctccctcccttgcccccagtaaaaatagcccataattccaagccctccccccaacccctcatagttctagttcagctcctgttccacttccctggggctctgtccccagtagggcccagggcttggcttggtctggggcctggtggctggaggactcctgccacccccaggaccagatgcaggtacaggatgagggcatctcccaaggttggcatcactgaaggggcagcagagacatggctggttcctcaggctcccgggtaagagggctgtggtggcatatagggaggaggagctgcagggttgtagactgggggcccagctgggtagagtggatattggggagcaggacccactaggtgggtacatgaagccaggctgtgggggtgcagggcccagctttggggtcctgggggtatgggtatactggctgcactgggatgcctgtcattggaatctcctggccttcaaatgggctctggagcctctggcgccggcggtacaggtagcaacaggaacagaggaagcagcagatggtggtggcaaccacagcaacaaagaggatcacagctgagcgatgcctgctatggtcttggggctgaaggcccaggcagtgcttctgctgcctctcggtgataagcaaggtcaggtccctgcagcagtaccgatggtcctcatgccgaat

SEQ ID NO: 11824 - DNA, 369 bp, Homo sapiens
ggaattgtattttagtcatcaataaagtatatctgtattggtagctgtggtaagcaaataatgttattactatttatagatatgcatagagaccatacttacagagtagatcattagtttctacagatgtggtttacaaatttcttgactattactttagtgtttatagacttctacagtgtgtttggtggaggagatatgtatatcattaagttacagcacataatatgccagatgctagtaaaatatttcgcattggagcactttgtatttatttgctgaagtaatttttgtcatttttttcagaaccagaatatttcacaaaaagtttccatgtatttcttttgtatcatacagttactttaaaaa

SEQ ID NO: 11825 - DNA, 375 bp, Homo sapiens
gttacaatcttatgggaccactgtcctatgtgcagcctattgttgattgaaatgtcactactggacacatgactgtgttgtctaatttgtatatttgttcctagcctgtgtctcccctccagagtgtaggtccctgagggcagtcacctgatctgtctcagtcactgcagtgtccccaaacagagcaccgcctcaggcacacagaggtaagcatgcatcgatcacaccaacgatgcaggaatgtcctgacacaccagggcagctgctgtgtgttcttcggggcttgtttacttgaacttgcagggagccttcaggagcctcattggtcaaatgggaataaaagttctacatgattgaatgcatgaaaccctctta

SEQ ID NO: 11826 - DNA, 454 bp, Homo sapiens
ttttcgtggtttcgtctatttattaaaaaatatttgagaacaaaacctctgcctctttgagtcttgctctggcatccccagcatctctgattctccctggtgcccccagctcaggaagaaggtggtagtggggagagagggtcaggggggcttggcagggatgcaggcaccatgacttttgtgaccagttcctagagacgcatgggtgtagcctcaggaggaaagcgagaggagctttaccatgggaacgaaggaaagggacaacattgggaggcaaacgttgggagactagtccagaaacttgcagttgaggatacaacagggtcctagtgtttcctccctgggtcagcgtagaagtagagctttttcactgtcgaaggcgggattgaagttagagattgccctggcagaggttggggagagagggactaggaggtggtacatgaatgtcttc

SEQ ID NO: 11827 - DNA, 96 bp, Homo sapiens
gcggccgctactactactactactactaaattcgcggccgctcgacgaaaataagaatttttaaaatcagtgctttaagctaccagtttaagaagc

SEQ ID NO: 11828 - DNA, 389 bp, Homo sapiens
  misc_feature (1)...(389): n = a,t,c or g
ttggatgttctggagcattttttatgggaaagaggatacaaaaatagatcccaatatttagagnnnnnnnnnnnnnnnnnnnnnnnnnnnnnnnnnntgctttcctcttacaactttttaaagctgtattctttcttttacaattcataattgagtgaaaggaaaaagatttgatttttttttcctcacaaatataaggcatataatattcttagaaaatttcaagccttactattgagataacccttacaaatttaaacatttttagctgctttattggctttaaatgattaagttcataattgcaagtcatctggtttctaaactgctagccttattagttccaaagtattgttgatgcttttgtttcaatatccccccaaaaaaca

SEQ ID NO: 11829 - DNA, 123 bp, Homo sapiens
ggtcgacagagatttactctcaaactgattttaaatccagggcagtcactaaaataagaattcatgtaaagcatagcctcttattttacccttgtctgtcatctccttagaaaatgccatccc

SEQ ID NO: 11830 - DNA, 317 bp, Homo sapiens
tggatgaggagaccctgaacacaccctgctactgccagctggagcccagggcctgtcacatcctgctggaccagctgggcacctacgtgttcacgggcgagtcctattcccgctcagcagtcaagcggctccagctggccgtcttcgcccccgccctctgcacctccctggagtacagcctccgggtctactgcctggaggacacgcctgtagcactgaaggaggtgctggagctggagcggactctgggcggatacttggtggaggagccgaaaccgctaatgttcaaggacagttaccacaaccttgcgggctct

SEQ ID NO: 11831 - DNA, 323 bp, Homo sapiens
ggacaccccactggagctgggtgacgactgtagcctggctctcgtctggcggaacaatgagcgcttgcaggagtttgtgttggtagcctccaaggagctggaatgtgctgaggatccaggctctgccggtgaggctgcccgggccggccacttcaccctggaccagtgcctcaacctcttcacacggcctgaggtgctggcacccgaggaggcctggtactgcccacagtgcaaacagcaccgtgaggcctccaagcagctgttgctatggcgcctgccaaatgttctcatcgtgcagctcaagcgcttctcctttcgtagtt

SEQ ID NO: 11832 - DNA, 512 bp, Homo sapiens
gccggggctctcgcagccagccctcctgcccatggaggacagtttccttgaatcttttgggaggctgagcctccagccccagcagcagcagcagcggcagcggccgccccggccgcccccgcgggggacacctcctcgccgccacagctttaggaaacacctctacctcctgcgaggcctcccgggctccgggaaaactacactggccagggacgactggagtgagcactggcctgggagtctgaagattgtgccttcagacctacttcgtcacttactagctggcgactttggtcagtcatctagtttttccgggccttatgttccttacatgtgactactaaaaggctactagattataggatttattaaagatccttctgactcttaatttccagtggtcagattaaaaatagtttgctaataatggctatgttaaagagctctgaccttggagtcaatttatggctccacatccaagctctaccattcactagttttgcttttcaccc

SEQ ID NO: 11833 - DNA, 96 bp, Homo sapiens
tggcctttgcctcctttccatctggattcagtgtagtttagaattgtgctttcttcactaattagatagacataagactcttgacctgatttttta

SEQ ID NO: 11834 - DNA, 1217 bp, Homo sapiens
  misc_feature (1)...(1217): n = a,t,c or g
ttttttttttttttttttagaaagagaattttatttggaatgaaaatatagagcccaccctcccgcctcctctggggagggagcagagggctgggcagtggtcggggagatggtccctcagaggtcgaggagctcgcctgggctagacatcctccacaggaacagtgaggaaagcctgggcgctggcttcggcctgggcctgggtacgggtgggggtgggaactgacccctgcgctgcctcagaggctctgggcagccagctagcccggtgcgacccgctggcagaagctgagtgggaagcnccccggcggaggagatgaaggtggcgtgtggctgtggccctacgcatccccgttctccatgcggcccagctgctcctccaggcggcagatgcaggtcgccctgctccttgaccagcgccctcaggcgccgcagctcctgcatcacctcctccagcttcccagcctccccggctctggccaggctgccgctgggggtggcatcagcagcagtggtggtggaggcgggggcccctaggtgggaggaagcccggggccatggcgggccggctgtcagacaacacgttgcgccggctgatcttcaggtcccgctgcttgctgggcacgtaggcctcccgcagtgagatgaggatcgggtcggcatcccgcccgctcacccactcctcagcctccagggctgcctcgggcccggctgtgtcggggtacagatcatcctggaagaggtccgactttcttggcacagtcatgacgatgggctcacacttgcgctcatgcagtttgtagaaccgggcgatctcgcacttgctgacctccaggccccgnctttgcatgctgcccataccccgctgcggctccttgctggtgaacgtgttcaggaagtggatgtagggaggctcctctgtgatctcaaagtaccggatgctggagtcacccttgccgcagacgtagaccacactggtgtcggggtcgtagaagggcagcagggccccgttgctcgagtccagttcctgcagggccatgggttcctcgaggttttctgggtcccagagcgccagctgccgctcgctcattcggctgaagcctgtggtgaacaccttgccatctgccaggaagatggcccgcatgggccgggccccctcatgagccttctcccgctctgccaccagggtgccccgacgggggtcgatgatgcgcacc

SEQ ID NO: 11835 - DNA, 321 bp, Homo sapiens
attcggcaacgagggttgatgcagcactgttggtcagtctctgctctgacactggatcctgctaagcttctggaagaatttccacgttggctggaaaaactctctgctcgtcatcaaggcagcatcatcatcgttattgattctatagatcaagttcaggttgtggcctacacttcatcttgatcccttaagtccaaaagatgcaaaatctattataattgcagaatgcactctgtagacattaaattgagtaaagagcaggtgtgtatttttcattttgatgcaatcttttactctctcatctttcctatgaaacatctt

SEQ ID NO: 11836 - DNA, 411 bp, Homo sapiens
ggcacgagccacatctgactactgttcttcacatccaccattattattaccttgggtttaactaccagtttttccttgggttattgtagcttcctaagtggtcctaagggatcttcctgcttccattcttcttctgctccgtataacattgaacacttcatagtacacagaagctatatgtagaatgtatgatccttgtaaaacataaattatgttaatttgtctgtagagtcttctaacgacttccttttacacttacatacatgcagttttttcctgttgcttgcaatttcctaatagatccattctgtttatttctcttttctcattttttaatcactcttcctctcatacatgcaattccagccataccatccttgcttttcctcacatacgccaagcatactcaca

SEQ ID NO: 11837 - DNA, 105 bp, Homo sapiens
caaaagacttgagagaataggccaagtgaagaccaaactgagttggtctagttggggctggagctaagtaactaaaccacagagattggttttgcttgctggggg

SEQ ID NO: 11838 - DNA, 196 bp, Homo sapiens
ctgaatgatctctacataacagactactgtgtgtacattcagaaagtcaaatccaaaaagtaggcagctcttgcagaagccttaaaggaagtctcccttacaaaggcccagctggggttagaactggaagaactagaagcagcagcactgcttgaccaggaggaagaaactgcattaaaagcagcccattcagttt

SEQ ID NO: 11839 - DNA, 225 bp, Homo sapiens
aatcgatggtctggaggttggcaggccagttcttcctcatgaggtcatctagggcctgaggctctttcatctggtggcttgtggatcttctgaggttgttcctcatctgcatagtggcagatggcctaccacaccacgtctgcatttaagccattaggaaagaggggatgagagggaagggcacatttctttccagttgagggcatgacccaaaaattgccacat

SEQ ID NO: 11840 - DNA, 383 bp, Homo sapiens
  misc_feature (1)...(383): n = a,t,c or g
ggatatggtttgctcagatgtcagtacaccctgaggtgtctgcttagatcaaatctgtcatcagagaaacgcctcgttagagcagcaagcatttgctgagttcttgctatatgccaggcactgtactaggcacttttcatgcattagctcgcttagtcctcacaaaccctgaggtagacaccattattcaacagatgaggaaacagtgagtttaagtaatttggcaaagatcaaaaggctagtatgatgaatctgggatctgaggtcaggccttggggcaaggtcaaggcccttaacttgcataaagctgtgctggcctgccctctagtaagtacttatgggcaatgtctctggcttnctttcctggggctgtncattcccct

SEQ ID NO: 11841 - DNA, 326 bp, Homo sapiens
  misc_feature (1)...(326): n = a,t,c or g
gccttagtattttctggatgactattattattttatctttctaattcactagttatcattgaattttttccactgaactatggaaacaggtgcagcaagtgggtcctttgagcctttaccttccttttgagacatttcggaaccagtctctcaaggctgggtctgcgggaacactttgaatctacaagtgcagattgtctgtattgggattagagtggaaggaaggcatttggaagagggaacttagaaaatggaatgaaggaaataagcaataaaacaatttaagaaaatttctcanaaccgaagattctgtaatgaaagggcct

SEQ ID NO: 11842 - DNA, 349 bp, Homo sapiens
  misc_feature (1)...(349): n = a,t,c or g
gcaggaaaggggtagaagtacagaaggacttgtttagacattggtcctttttgaggataccacactcccttgcccttgcttccatcccccatccctaataggctgggctttgcaggaaattggcatgaaatcagctcttctgagtgtacagaagaacctttcgagcattatttctacacccttctcccccactctttcctctttggaggcttccaagttagtgatgaatcccaacagctaatgatgctgggtttccagtttatttccttctgttagtttaatgtgcaagtcagtgaggttttgaatgctgtgcattgaatttgcttgctctcttccgncntttagcagg

SEQ ID NO: 11843 - DNA, 910 bp, Homo sapiens
catgagttgatagtgataagctcctaaggatttttaacttgtacttttgtgaacgaagagaatgcataaataatgttggtgaggataaagtacagatatttcatgtagaattaattgctagttatgatgcttgtggatagttaactgttttttttttagtcaaaatgatcatgctacgaaaagatgcttctgagagaatgtaatgagtaactgatttttcttcctgagtcgcccttgccaaatatgttactgtattaattaatctaatattgagtgattatttgtaaaattatgaatatgggaaatccatctatctacagcctaagttacacataagtttcagaaagtctgattagactaaagagatatttcttctgggacagccttcttcttggtaattttgaagttgtttttacaagttccttcctcagtttcagttctttccagtgttttgtagctcactgtcactcactgaatagagaaacgtgtgccctatacttcctgtgacaatcattttgctgacagaatgatggatgtttaaaatattgcacaaagtactttaaagaaaggtctgttaggaccagaagcagagacaccacttttcaaaggacttcttgggttttcagcataacctaagacagggaattgggagccatcatatgtcacagtgttcagaattcaagcatatttaagggcattttctttgattctcaaagttcagcattcattttgaattgagaagcctatacatttagctgacaaagtgcttatagaatttcttaacaactgaaccattcaaaaggatttttttatgtttaaaactgggatttcaatgtaagcaaatgaagaaaaaaatatagatttcatttccatagcttcttatccctgtattgagggaataaattgtttt

SEQ ID NO: 11844 - DNA, 1448 bp, Homo sapiens
  misc_feature (1)...(1448): n = a,t,c or g
ggcacgagggcggatggaggtcagcggtggtgctcgctgcggtttggaatcacttgctaggagtcttgtctctctgccacccaggacatcatggcagctcacctggtaaagcgatgcacgtgcctcctgagagaagctgctcgtcaggcccctgccatggctccagttggccgactgagacttgcctgggtagcccataagactctgacttcctcagccacctcacccatttcccacctcccaggttccttgatggagccggtggagaaggaacgagcatctactccctacatagagaagcaggtggaccacctcatcaagaaggccacaaggcacgaggagctcctggagctacttggtggcagtcacgacttggacagcaatcaagcagcaatggtacttatccggctctctcacttggctgtctgagaagccagaagataaaggcttgctcatacaggatgcccactttcatcaacttctctgtctgctcaacagtcagattgcctcggtctggcatggtaccctctcgaagctgctgggaagcctgtatgctctgggcatccccaaggcctccaaggagctgcagtcggtggagcaggaggtccgctggcgcatgcggaagctcaagtacaagcacctggccttcctggcagagtcctgtgccaccctctcacaggagcagcactcgcaggagctgctggctgagctgctcacacactggaaaggcgttggacagaaattgaagattcccacacattagtgaccgtcatgatgaaggtgggacacctctcggagccactaatgaaccgcctggaagacaagtgcctggagttggtggagcactttggccccaatgagctgcggaaggtgctggtgatgctggcagctcagagccggcggtccgtgcccttgctgcgggccatctcctaccacctggtgcagaagcccttctctctgacgaaagatgtgctcttggacgtggcctatgcctatggcaaactcagctttcaccagacccaggtgtcccagcgcctgggccaccgacctgctatccctcatgcccagcctgacttctggtgaggtggcccactgtgccaagtccttcgccttactcaagtgggntcagcctgcccctgtttgaggcctttgcccagcacgtcctgaacagagcgcaggacatcaccctgccccacctgtgcagcgtacttctggcttttgcgcgtctgaacttccatccagaccaagaggatcagttcttcagcctggtacatgagaagctggggtcagagctgccaggcctggagccagccctgcaggtggacctgggtgtgggccctgtgtgtgctgcagcaggcacgggaagcagagctgcaagccgtcctccaccctgaatttcacatccaatttctagggggcaagtctcagaaggatcagaacaccttcca

SEQ ID NO: 11845 - DNA, 333 bp, Homo sapiens
ggttctaaatctcctgttttgctatcatcagtccttaagatactaggtaatgttggcttttcaacctacagcttttgttttcatgtcctaaaattttttgataaaagtctgtattttatgtcttaggagccgtccttccatggagcttgttctctggaaacccctccctgaactcctttctgataagccaaagccatcctctaatactaagaactatacaggagagagccaagctaagcatgtagctgctggcactgccttccctcagagaactgaactgttttcggaacctcggccaacagggatgtctctttataatagtttggagacagg

SEQ ID NO: 11846 - DNA, 1867 bp, Homo sapiens
gacgccgctcaccttcactcgcgtgtacagccgggacgcagacatcgtcatccagtttggtgtcgcggagcacggagacgggtatcccttcgacgggaaggacgggctcctggcacacgcctttcctcctggccccggcattcagggagacgcccatttcgacgatgacgagttgtggtccctgggcaagggcgtcgtggttccaactcggtttggaaacgcagatggcgcggcctgccacttccccttcatcttcgagggccgctcctactctgcctgcaccaccgacggtcgctccgacggcttgccctggtgcagtaccacggccaactacgacaccgacgaccggtttggcttctgccccagcgagagactctacacccgggacggcaatgcttgatggggaaaccctgccagtttccattcatcttccaaggccaatcctactccgcctgcaccacggacggtcgctccgacggctaccgctggtgcgccaccaccgccaactacgaccgggacaagctcttcggcttctgcccgacccgagctgactcgacggtgatggggggcaactcggcgggggagctgtgcgtcttccccttcactttcctgggtaaggagtactcgacctgtaccagcgagggccgcggagatgggcgcctctggtgcgctaccacctcgaactttgacagcgacaagaagtggggcttctgcccggaccaaggatacagtttgttcctcgtggcggcgcatgagttcggccacgcgctgggcttagatcattcctcagtgccggaggcgctcatgtaccctatgtaccgcttcactgaggggccccccttgcataaggacgacgtgaatggcatccggcacctctatggtcctcgccctgaacctgagccacggcctccaaccaccaccacaccgcagcccacggctcccccgacggtctgccccaccggaccccccactgtccacccctcagagcgccccacagctggccccacaggtcccccctcagctggccccacaggtccccccactgctggcccttctacggccactactgtgcctttgagtccggtggacgatgcctgcaacgtgaacatcttcgacgccatcgcggagattgggaaccagctgtatttgttcaaggatgggaagtactggcgattctctgagggcagggggagccggccgcagggccccttccttatcgccgacaagtggcccgcgctgccccgcaagctggactcggtctttgaggagccgctctccaagaagcttttcttcttctctgggcgccaggtgtgggtgtacacaggcgcgtcggtgctgggcccgaggcgtctggacaagctgggcctgggagccgacgtggcccaggtgaccggggccctccggagtggcagggggaagatgctgctgttcagcgggcggcgcctctggaggttcgacgtgaaggcgcagatggtggatccccggagcgcccagcgaggtggaccggatgttccccggggtgcctttggacacgcacgacgtcttccagtaccgagagaaagcctatttctgccaggaccgcttctactggcgcgtgagttcccggagtgagttgaaccaggtggaccaagtgggctacgtgacctatgacatcctgcagtgccctgaggactagggctcccgtcctgctttggcagtgccatgtaaatccccactgggaccaaccctggggaaggagccagtttgccggatacaaactggtattctgttctggaggaaagggaggagtggaggtgggctgggccctctcttctcacctttgttttttgttggagtgtttctaataaacttggattctctaaccttt

SEQ ID NO: 11847 - DNA, 81 bp, Homo sapiens
ccttgcccaaacttttgttacatggctacctctgagtgcaagaaggctgggaaaatgggttggttttaaaccaggaagatt

SEQ ID NO: 11848 - DNA, 413 bp, Homo sapiens
  misc_feature (1)...(413): n = a,t,c or g
gatctttttttttgcatgaaatgacactttcactgtcagtctttctaggagtctggcagaatccaggaccgggattacccttatttatgaagcgaccttagactaacagtggctctctgggtctccagacaattggccagggactctaaaaaccagaaacaaagttgagagaactccatgctggtggagaaaaacagctggcctttatcaccagaatgtgccccatagaagcagcaaagcagcaagcgacgttcttaaacaagggcctgtggcntccgtcaagatctggaggaatcatctacgactcactgctgagtgagagggctaggcagtgtctttaaggtcctgccagctttaacattgtatgctttttcttttgttcaatctctcaccacaactggaagtgttgcctc

SEQ ID NO: 11849 - DNA, 415 bp, Homo sapiens
  misc_feature (1)...(415): n = a,t,c or g
tttttttaacaaacatttccaggaggaactcctcagccaggcagctcgaatcctgggatcagtggattttcttggaaatcctatggggctnttgaatgatgtttctgaaggggttactggactgataaaatatggaaatgtcgggggcctcatcagaaatgttacacacggagtatcaaactctgctgccaagtttgctggaacattatcagatggcttagggaagacgatggacaatcggcatcagtcagagcgggagtacatcaggtaccatgcagccacaagtggtgaacaccttgtagccggcatccatgggcctgggctcatggtatcattggtggactgaccagtgttataacttcgacagtggaaggtgtgaaaacagaaagggggtgtcagcgggttttccatatct

SEQ ID NO: 11850 - DNA, 195 bp, Homo sapiens
tgggcacaagccatttgagtgaaatttagaatgcttccttccctttacatcactttattcttctccatttataattgtcttaaatatttatttgtatttgagaaccatatcagttttttttgttcttcaaccatcaaacataatttagaaaacccaaaaggaaaaggagaatattatattgactcattttgcatt

SEQ ID NO: 11851 - DNA, 556 bp, Homo sapiens
gcaataaaaccaactctaaaatcacagctgtcgtcctagccagtgggggcgaccggacttggggggtggagccctctgggacttccgtagaacaagggctgcggccaccgcgaacacttacacagacctcggggattgcactaaaccctcgttcctagctccgcactcagcttcgcctgtcctgcccgcccactttgccttaactacccgcccgtcctgggggccacagcctctgcatgggcccagagccgggacccccccagcccagccccgccctccccagactccgcgcaatcacatactgtatatagacgtgaatcgattttatttttattctttaaattaaggtcgtgataaagtgttgccaaagatacctgctgaattctcgcgtttcaggaaacaaacaaacaaaaaaaaatgatatttgaggagggtcgtgttgactccatatgaaaggacacagctcaaagcttttttgtttggttgtttggggttttttgtgttttctttttttggggtgttttttttttaactgcctggtacaaaaaaaaaagag

SEQ ID NO: 11852 - DNA, 345 bp, Homo sapiens
  misc_feature (1)...(345): n = a,t,c or g
tcaacccaaccacccttctgctttctcttcactctaacatttcttgaaaaaaaagnnnnnnnnnnnnnnnnnnnnnnnnnnnnnnnnnnnnnnnnnnnnnnnnnnnnnnnnnnnnnnnnnnnnnnnnnnnnnnnnnnnnnnnnnnnnnnnnnnnnnnnnnnnnnnnnnnnnnnnnnnnnnnnnnnnnnnnnnnnnnnnnnnnnnnnnnnnnnnnnacacaaaacaaacaaacaaaatttaannnnnnnnnnnnnnnnnnnnnnnnnnnnnnnnnnnnnnnnnnnnnnnnnnnnnnnnnnnnnnnnnnnnnnnnnnnnnnnnnnnnnnnnnnatggcgtgaacctg

SEQ ID NO: 11853 - DNA, 356 bp, Homo sapiens
gcagtttttaaaattaaactgtggtgacacatcagtggatattcagctaagtattttaaacacctgtaagagaagaatgtaacctattttggtgcaaaaaaaatattggaccatctcttacttgttggaaaagcctaagccgattcgtgaaggtcctgttggtgcaggtgacagtcttgccctgaggcctagactgttttgctgcagggtgccacccccgacgccaggcagttagactggcgctcctgggccagtggtgacacctggtggtcagggcacttgtctacggggcttccttcctacctcaattatgtttatttggcttacttcccacaagtcacttattctttcgttgg

SEQ ID NO: 11854 - DNA, 356 bp, Homo sapiens
  misc_feature (1)...(356): n = a,t,c or g
gcccagttaccagagaaacctacggctcaggcacacagtaccacatgcagctggccaaacaactggctggaatattgcaggtgcctttagaggaacgagggggaataatgtcactcacggaggtgtactgcttagtaaaccgagctcgaggaatggaattgctctcaccagaagatttagtgaatgcgtgcaagatgctggaagcactgaaattacctctcaggctccgtgtgtttgacagtggcgtcatggtaattgagcttcagtctcacaaggaagaggaaatggtggcctcggccctggagacngtttcagaaaagggatccctaacattataagagtttgntnagcttgat

SEQ ID NO: 11855 - DNA, 1160 bp, Homo sapiens
gtgggagtggaatatcttctaggctcttacccgcggtagggaagggcatcaacactgtcttccttccattctcctttcccccatcccatttagtgctgccacagggcagaagcacacaaaccaaccacacagtctctgacttctcctaagcactttgagttgttgaatggggctcaggggcaagagtttttgctgccctccccagcgtggtcacagggttattgaactgcctgcacttgtttccatgcaactcagcattttccccagaagttgaactatggatagcagcttggtatggatttcctaaatcttaacatttgaagcagcttcttggaggctggcaactatcctggttttctgtcttgggagggggtggtttgtttgctggggcccaacgtctgtcccaagtggttgggggtgagagtaagttaactttgggtgcccaggtgagaggtgggggctctttgcttagactccctatcatggaaagattggagttttctatgcagggcactggggaaaaggattgctgattctgactgaccctgatcagagagattaggattgtattttgacataggatttggaacccatctaaatgttgaagttccctgagacagctctccagctgctgagcctgcgcccaggggctaagcagcccctaatgagaggctctgctccctttcccacctcgccaatgttgttgttgctgcctttttgatttgtatcctctgttatagacattttttaaaaacgatttcctctttcattgtgcacaagtgctgagagtctgaggccccatttctgctgtgtatatatatcctgactcggggcttttattcagcaaactgttcattcttctgtcagacaatgtcatattcaactctgttcatattaaaccactgtgaagcaagcctctgttttcctgcttaagttgtaaatttagtattctttagtgtctaggatatgctgggtattatgcagaaatcatacagtgtggccagtgtcctgaggtaatgttttgcatttaaatttttttagaaagcagaatcttaacttatcttaatgatatttacctaatcctttttgcaactcacaactgacctttgtcacagaggtaatgcatctgccttgcagggaagtagctggtaggctcagta

SEQ ID NO: 11856 - DNA, 759 bp, Homo sapiens
caaacatccagagaatggtttcactgttgagggtgcatgtggcagaatctgtctctctctgcacctgtcttctgttaccatccctggacagtgacagattttaagccagccaccagaattcttttcgagttaaccatttcttagtttctgtaaattcatgacttgtcttactgaactacagcctggtttgtagacttccaacatctacactgctgctcttcaccattggaattcactgtggtatttatagtattggcttcagtccgagccacaggcaataaaaggatatcagctgtagttctcagctacatcatggtgtatagatgctgttattcaggcgaacttgctcatgggtggactaacacctggtttggtacagagactgagaagtttttcattctggtgtcaaagttttgttacattatgggtgtgaagggcatttgatatatttttcttaactatggggtttatttttctaaatgtgggttgattgactgttaattgattcagggtacccttaaaagaaaagaagttttcccattgtgaaccttaaatgatcagagaagtaagttcattgattaaattctctgttgggagaacaaaacttttctcccttgacactttattatctttgatttttcaaagggccttgattggtggttgtgtctcggttaaaatttatgggactttgctatgtagttggcatttataaaatctgaagtatcataaataaagttatttatttaattataaaaaaaa

SEQ ID NO: 11857 - DNA, 556 bp, Homo sapiens
actatatcatattactaggacttaatatagtggcatacccaggaaatgcttagtaagtgttcccttcacattttaaaatttgagtatacaatcatgtttgacaatatagaaatttaatttttagtgaaacaattctaaaccccttttccatagacacaagaaagatggcaaatttatgctattcctggaaaaatacattgtggcttagcaaataagcaagttcccacgttacttttgttttgcttcaagtaatacttctgccagttgtgttttatgaattaaacagggaacggcatgctgaacttgaaactagatttgttcctgcttttttcacaatgtgagtagttttgaaaagtcagatctggccatttgtctttcctagaatagcataactttgttcattgttttttttgtttgtctttctgacacagaaagactgatgatggtgtccactatgtattcttcaaaacatttggcacatgctgcactaacctagtctatcttttctatcttggaatttgctcatacaaaccctatagcctagactagatccctt

SEQ ID NO: 11858 - DNA, 896 bp, Homo sapiens
tttttttttttattttttgacaagtttattgaacagtattcaagacttcatctttataaacaaaaacctctgctgagtgatgccaaggcagtatttgctggcaatgttgtggccatattggcaacaagccattttgttgtgtttggtttctaaagtctggactactatagaactgccagtaaaacaatttaaatgtggcaattttgcaagggtggaaaataatttttaaagtgaccacttccagaaattctttccaaaagatttgactagcagcaattttacattttctttactcatttcccgagtgttcttaaaattgatgagattttacacttggcccatacctgtacacaaacacagactccagtaaaagggagctggaatttaaggctttcacgcatccttgtttttatgcaaggctgactatttccacctaaaaatgtaatgtttgcttacttccatacagtcctagattttcatccagtgggttaagactggccttaactacactgaatattactacctgaaattttaaataaagtttcctaatcgaattttcattgttgatgctttgacaacttggagtacaaagctaggaactacatttcacttaacactgtttcattttttaaaaagccactaataataattgtacatccaaactactgtgtaaacacagaacacacctccaaattatgcttgtgaactaaatgtttcactaaagttcagaaaagtttacaaatttgcttatttatgacatacatttgtagatttctctaatcctttaaatcaaaagaaaaatgaacaccaaaaaaaaaaatcagaagggagaggaaaaaaaattaaatctaatggaaaatattctcttccattaatgtcagagtcaccaaaaaaaa

SEQ ID NO: 11859 - DNA, 132 bp, Homo sapiens
cccacgcgtccgcacaaacctgctgagtttgaatcactgggcaacttgcctaggaaaagttcagatgatggggtccttgaactgtgtatctatttcataggggtaagtttgttgtctatggtttgttttttt

SEQ ID NO: 11860 - DNA, 3519 bp, Homo sapiens
  misc_feature (1)...(3519): n = a,t,c or g
gaattcccgcggagcagcgtgcgcggggccccgggagacggcggcggtagcggcgcgggcagagcaaggacgcggcggatcccactcgcacagcagcgcactcggtgccccgcgcagggtcgcgatgctgcccggtttggcactgctcctgctggccgcctggacggctcgggcgctggaggtacccactgatggtaatgctggcctgctggctgaaccccagattgccatgttctgtggcagactgaacatgcacatgaatgtccagaatgggaagtgggattcagatccatcagggaccaaaacctgcattgataccaaggaaggcatcctgcagtattgccaagaagtctaccctgaactgcagatcaccaatgtggtagaagccaaccaaccagtgaccatccagaactggtgcaagcggggccgcaagcagtgcaagacccatccccactttgtgattccctaccgctgcttagttggtgagtttgtaagtgatgcccttctcgttcctgacaagtgcaaattcttacaccaggagaggatggatgtttgcgaaactcatcttcactggcacaccgtcgccaaagagacatgcagtgagaagagtaccaacttgcatgactacggcatgttgctgccctgcggaattgacaagttccgaggggtagagtttgtgtgttgcccactggctgaagaaagtgacaatgtggattctgctgatgcggaggaggatgactcggatgtctggtgggggcggagcagacacagactatgcagatgggagtgaagacaaagtagtagaagtagcagaggaggaagaagtggctgaggtggaagaagaagaagccgatgatgacgaggacgatgaggatggtgatgaggtagaggaagaggctgaggaaccctacgaagaagccacagagagaaccaccagcattgccaccaccaccaccaccaccacagagtctgtggaagaggtggttcgagaggtgtgctctgaacaagccgagacggggccgtgccgagcaatgatctcccgctggtactttgatgtgactgaagggaagtgtgccccattcttttacggcggatgtggcggcaaccggaacaactttgacacagaagagtactgcatggccgtgtgtggcagcgccattcctacaacagcagccagtacccctgatgccgttgacaagtatctcgagacacctggggatgagaatgaacatgcccatttccagaaagccaaagagaggcttgaggccaagcaccgagagagaatgtcccaggtcatgagagaatgggaagaggcagaacgtcaagcaaagaacttgcctaaagctgataagaaggcagttatccagcatttccaggagaaagtggaatctttggaacaggaagcagccaacgagagaccagcagctggtggagacacacatggccagagtggaagccatgctcaatgaccgccgccgcctggccctggagaactacatcaccgctctgcaggctgttcctcctcggcctcgtcacgtgttcaatatgctaaagaagtatgtccgcgcagaacagaaggacagacagcacaccctaaagcatttcgagcatgtgcgcatggtggatcccaagaaagccgctcagatccggtcccaggttatgacacacctccgtgtgatttatgagcgcatgaatcagtctctctccctgctctacaacgtgcctgcagtggccgaggagattcaggatgaagttgatgagctgcttcagaaagagcaaaactattcagatgacgtcttggccaacatgattagtgaaccaaggatcagttacggaaacgatgctctcatgccatctttgaccgaaacgaaaaccaccgtggagctccttcccgtgaatggagagttcagcctggacgatctccagccgtggcattcttttggggctgactctgtgccagccaacacagaaaacgaagttgagcctgttgatgcccgccctgctgccgaccgaggactgaccactcgaccaggttctgggttgacaaatatcaagacggaggagatctctgaagtgaagatggatgcagaattccgacatgactcaggatatgaagttcatcatcaaaaattggtgttctttgcagaagatgtgggttcaaacaaaggtgcaatcattggactcatggtgggcggtgttgtcatagcgacagtgatcgtgcatcaccttggtgatgctgaagaagaaacagtacacatccattcatcatggtgtggtggaggttgacgccgctgtcaccccagaggagcgccacctgtccaagatgcagcagaacggctacgaaaatccaacctacaagttctttgagcagatgcagaactagacccccgccacagcagcctctgaagttggacagcaaaaccattgcttcactacccatcggtngtccatttatagaataatgtgggaagaaacaaacccgttttatgatttactcattatcgccttttgacagctgtgctgtaacacaagtagatgcctgaacttgaattaatccacacatcagtaatgtattctatctctctttacattttggtctctatactacattattaatgggttttgtgtactgtaaagaatttagctgtatcaaactagtgcatgaatagattctctcctgattatttatcacatagccccttagccagttgtatattattcttgtggtttgtgacccaattaagtcctactttacatatgctttaagaatcgatgggcgatgcttcatgtgaaacgtggggagttcagctgcttctcttgcctaagtattcctttccgtgatcactatgccattttaaaagttaaacatttttaagtatttcagatgcttttaggagagattttttttccatgactgcattttactgtacagattgctgcttctgctatatttgtgatattaggaatttaagaggatacacacgtttgtttcttcgtgcctgttttatgtgcacacattaggcattgagacttcaagcttttctttttttgtccacgtatctttgggtctttgataaagaaaagaatccctgttcattgtaagcacttttacggggcgggtggggaggggtgctctgctggtcttcaattaccaagaattctccaaaacaattttctgcaggatgattgtacagaatcattgcttatgacatgatcgctttctacactgtattacataaataaattaaataaaataaccccgggcaagacttttctttgaaggatgactacagacattaaataatcgaagtaattttgggtggggagaagaggcagattcaattttctttaaccagtctgaagtttcatttatgatacaaaagaagatgaaaatggaagtggcaatataaggggatgaggaaggcatgcctggacaaacccttcttttaagatgtgtcttcaatttgtataaaatggtgttttcatgtaaataaatacattcttggaggagcaaaaaaa

SEQ ID NO: 11861 - DNA, 610 bp, Homo sapiens
ttctaggtgatgctatttcttctatatctcctgtcttctttatcccaaatcccactcagcatatcttcagacctaggttgtaagaccaactttggattggatctagccagtgaattattatttccatggttggttccctttctgttaactctggtaatcaacagattgaaaacggtggaagaacttcttctgaaaattgcagtgggagcaaattcttgttggttttgtgctgcttgcctttctagatctgctcatcagcacttaaccttccctcctctaaaggttactaaagaagcctgaagtaggtaaagagtgctcctcagcttcttatccttccactctttacccagcagatttcattcaatgccttagccaaggagtccagcacctgtctcccctgctaataattgtccttagagatgctagtactttaatccaggtatagcagtttcccgttattttcttgcttgtcgttcccctacatttcctcctgatttcccaagactctctttgtggcttttgagggtcagccaaggagcaggcaagtgagtgaacaatcctcagcaaaagaaggaccattttagcttaacacttcctttttttttttttt

SEQ ID NO: 11862 - DNA, 410 bp, Homo sapiens
ggactcttacttttccactttagtcgttaggtttatacctatatatatattttcttgcttttactgggactaatttcaacctccagcacaccacccaatgaatagcagtaataccagcataattgtctgcagttctgctgagatacgtgctctattttattggcttggctgtaggtttttattttattttttgaagaggctaatctcttacaggaaaggtttctttttatatccagtttttacatgatgaatgatttcccagtatttcataattcatgaggctgaattcctcttgaatttattaaatgcttcctgtgcatcctctgtgatgatcatgtttatttactgctagaactcaagtacctagaactgttcctggccaatgatggtatgtaataaatacttcaatg

SEQ ID NO: 11863 - DNA, 273 bp, Homo sapiens
aacttagaatgttttaaggacccagaaaccccatatgtctcattccatgaactatagttgagaggattctttcctaagagggtttgataccaataggggaaaatgtaaaatgttcagtctttatgacaacctggcataaaggagtcaattcttatgaaagagacacaagggccttatggccagggtttcttgggacaagactctcaccagcacatcacacacgttctccttggaagagagaagcagtacatcccggttgagaggtcacaaagc

SEQ ID NO: 11864 - DNA, 355 bp, Homo sapiens
cccacgcgtccgtatcaacctgttgtgtctttatttaattttacatctttttgaagcactgccacaggttattagccaaggtggccttccttcacagtcatgctgcttttttgaaaggtgaatttcaacacatttagtgcctctttcatttctcagtatatatttcaagagcttgtgatgaaatctataggatggtaatgatggacttgtcacctgtatggggaatacttttactactcagaaatgaatttatgtgctgccatttgctataaagttgaactttgtatggcttgaaaaagaaatgacaatatgggaacatcccaaggctgtcccatagggttggaagttgtgtagc

SEQ ID NO: 11865 - DNA, 1591 bp, Homo sapiens
atcagcctggcagagcacgaggcaaagatgagctcgctaagtcagagcatgagaaaggtccaggatagtaatgctgaaatcttggccaactacagaaaaggccaagaagagattgtgacactgcatgccgaaattaaagcccagaagaaggagctcgacacaatacaagaatgcattaaggtaaaatatgccccaattgtcagctttgaggagtgcgagagaaaatttaaagcaacagagaaagaacctaaaagaccagttatcagagcagacacaaaagtatagtgtcagtgaagaagaagtcaagaaaaacaagcaagagaatgacaagttaaagaaggagatttttacccttcagaaagatttgagagataagacagttctcattgagaagtctcatgaaatggaaagagcattaagcagaaaaacagacgagctaaacaaacagttaaaagacttgtcacagaaatacacggaagtaaagaatgtgaaagagaagctagtagaagaaaatgccaaacagacttctgagatacttgcagtgcaaaatcttttgcaaaaacaacatgttccattggaacgaggttgaggctctgaaaaaatctcttaatggcacaattgaaaatctaaaggaagaactgaagagtatgcaaaggtgttacgagaaagagcagcagacagtgaccaaactgcatcaattgttggagaatcaaaagaactcttctgtacccctgggcagagcatttgccagattaaagaagcatttgagaaagaagttggaatcataaaagccagcttgagagaaaaggaagaagaaagccaaaacaaaatggaagaagtctccaaacttcagtcggaggttcagaatactaaacaagcattaaaaaaattagagactagagaggtagttgacttgtctaaatataaagcaacaaaaagtgatttggagacacagatttctagcttaaatgaaaaattggccaatctgaatagaaagtatgaggaagtatgtgaggaagttttgcatgccaaaaagaaggaaatatctgcaaaagatgagaaggaattactgcatttcagcattgagcaagaaattaaggatcagaaggaacgatgtgataagtccttaacaacaatcacagagttacaaagaagaatacaagaatctgctaaacaaatagaagcaaaagataataagataactgaactgcttaatgatgtggaaagattaaaacaggcactcaatggcctttcccaactcacctacacaagtgggaaccccaccaagaggcagagccagctgattgacactctgcagcaccaagtgaaatctctgggagcaacagctgggccgatgctggacagacagcaccaaggaagttaatttgccatttattcgggacacaccttcttagtgctgcacagggttcacatgggatggaagatgtttcagggaggctctgctccagatcatacaaatgcggcaggggcttgtgtgctagccgttagcactgactgccagtatctgttttatcttgctggtgctgaacattctttgtgcaactccatggtctttctgggccttactgtg

SEQ ID NO: 11866 - DNA, 1416 bp, Homo sapiens
atgtattcaataacttaatattctcactgaatcatgagagaatgtgtatttgtaggtagtactctaaatagatctcattgatatgttattaaaagaaacagtaataaaaattttatcacgatccttacgttgatttgcctcttaggtccgatgaccaataggtattctgtatatggtaggggtttctttctaaacatttttctttggttttaaaaaaagttatgcaaatttgtcttatctttagtaaactatgactacatttatctgcaatttttaaaattttccatatctttgtcattcattgtgtgtttgtaaataaggccgataggaatgtttcctataaatggtttgtactagtacattagtgttaaaccagaactgaaatttaaacatatatatatatgaggatgtatatatggcatcatcagcttatttagaactgatggccataccttacaatcttgttttacccaaaattaagctattggggttgaaagctaaaaggagcacttttgtagaatagcaacttttcttttcctctttcttgattgtatggtggggtggtgacctatttttacaaattatacctaatgagtaaaattagtgtaaagtgataacatgcttctacctgtatttctagtgaccctttagcggcaggtatttatacctggtatttatgatgcagtatataagtggtgaacaataactgacagtattgtgcttgctgtacatgtctggtcttttgaaacagattttagtaagcattttccagaggtaaaactgtgtccttattctaattttattcctagggcaaagtagacagggattatttccttgaatctatttccaaattaatatttttttctttggtatttctacactttaaggccatttggtgcaatttagaaagtgttggcctcccttccgctagccacattcaaaattaacttccaaaacctcaggaacagtacaaagaattgaaaccctcaatatggcagcacagccggctgtagtgtatatttagggtacaccaaatcaggtattcctggtggtcttgtgcactttaatttctgttacaatgagttaagaggatgaggaagaaatctacttattaacacttactgcagaaatgtctgcattattccgtttgttttcttattattttacctctccaaacatcttcctgtgcagatcactacttcatagttgccaaattttaaaacacttaactgctgaaattcagtgtcagcaaagtgatattacgttgttctgtttctaattaaccttagcaaatgtacataatgtcaaaacccaatagtatttgacagtacttatgtatacaatgtttgataagcatttttaataagatttgtatttttaaatttagtatataataaaaagatgtgtttcagtgtg

SEQ ID NO: 11867 - DNA, 228 bp, Homo sapiens
  misc_feature (1)...(228): n = a,t,c or g
caagagcgaaactttgtctaaaaaaaaaaaaaaatcactgggcttcttcatgctctgatcacatctntcgtaaaagcttaagctctctccggggtccgggttggccgtgccgtggaattctgggtggcctggctggggtctctggaaatgtggctgcagcagagaacagagaccctgacatgcagttttccgtgctgaggggccctaggggagtcacaccaagggtcc

SEQ ID NO: 11868 - DNA, 794 bp, Homo sapiens
cggggggcagtgtcgcctcggtctagggacggcggcggagtcggtggtccctgcgcgatggccacctcggtgttgtgctgccgcggtgctgcagagacggggggactggccacatccctctgaaggagatgccggccgtgcagctggacacgcagcacatgggaatctggggtattggtgttgcaactcagaaggttaacttgaatcagattcctcttggccgagatatgcacagtctggtgatgagaaatgatggagccctttaccacaacaatgaagagaaaaataggctgccagcaaacagtcttccgcaggaaggagatgtggtgggtattacttatgaccatgtcgaattaaatgtatacttgaatggaaaaaacatgcattgtccagcatcaggtatacgagggacagtgtatccagttgtttatgttgatgacagtgcaattttggattgccagttcagtgagttttatcatacgcctccacctggttttgaaaaaatattatttgaacagcaaatcttctgaatgtatttgtttttaaaacttgtatttctgcactgttaaaaaatgttcatcatttaataaaactttacctggcctatagatgaaaatatattcttaaaaatatgcttgttgatgctgtctaaggaaccaatgtattcagtataccaccctgaagttgtgatttaaaatactttatgttttgtgaaatgaaaataagcatttgggcagtttatttaattcttatttaaataaatagaattatgggtttaattaacagtaaaaaaa

SEQ ID NO: 11869 - DNA, 535 bp, Homo sapiens
ggtacggctgatcaacaagttcaatagttccagctccagtttggaagagaagattgctgcgctctttgatcttgaatattatgtccatcagatggacaatgcgcaggacctgctttcctttggtggtcttcaagtggtgatcaatgggctgaacagcacagagcccctcgtgaaggagtatgctgcgtttgtgctgggcgctgccttttccagcaaccccaaggtccaggtggaggccatcgaagggggagccctgcagaagctgctggtcatcctggccacggagcagccgctcactgcaaagaagaaggtcctgtttgcactgtgctccctgctgcgccacttcccctatgcccagcggcagttcctgaagctcggggggctgcaggtcctgaggaccctggtgcaggagaagggcacggaggtgctcgccgtgcgcgtggtcacactgctctacgacctggtcacggagaagatgttcgccgaggaggaggctgacctgacccagggagatgccccagagaagctgcagcag

SEQ ID NO: 11870 - DNA, 356 bp, Homo sapiens
gtggtattaagcatatagattgccatacgacgtctatctcagatttggaattttcatcagattttaccctgaaaatcacaaggacatccatgtgcacggcaattgctggctactttgatatatattttgagaagaattgccacaacagggtcgtgttctctacgggccctcagagcaccaaaacacactggaaacaaacagtatttctactggaaaaaccattttcagttaaagcaggtgaagccttgaaaggaaaggtcacagttcacaagaataagaaagatccacgttctctcaccgtgaccctcacgttgaaataattcaactcaaacttatggtctccagtgaaacagcca

SEQ ID NO: 11871 - DNA, 652 bp, Homo sapiens
tcagtgagtttaggctatattaagagttaggtaagttaggtaagggtgaaactgctttgggggcccagactgcgctggaatgtactgtttaaattcaaaggtaattgatggccagtgttcagttgctctatttgtaacgtttgcatgttggtctggctgaagtatcaggaaaacacaaaattcatgaaaatagcaccttttataattttatacttttataaagcacttgttaaagaagtatagcaaatttctatgtattttaacatacaagtcgctgcattttaatgttcatttttggtatagctatgggtaacttataatagtcatttttatattcataacttgttttctgaaagatatagtcattattaaaataaacattcatgtaaatggagtaaatcataggggaatcaatcgtaataaataccttataaattataaacttgtttagatactagatttctataaccataaattttatactgtaaagtctgtttaaaatagggtttaatgaagttattttaatttttagagactcccctctaaataatttactcctacattgtaaatacattgatgccaacaaaattccaactgctactaacaaagggtttgggttggtgataagctaataacagctactttgtggtag

SEQ ID NO: 11872 - DNA, 620 bp, Homo sapiens
ggacactcctgtaatggtccatatggatcatgtatctgcagtgcttgatgtggattactctcccactgggaaggagtttgtgtctgctagtttcgataaatctattcgaatctttcctgtagacaaaagtcgaagcagggaggtatatcatacaaagagaatgcaacatgttatctgtgtaaaatggacttctgacagcaagtatattatgtgtggatctgatgaaatgaacattcgcctgtggaaagctaatgcttctgaaaaattgggtgtgcttacatcacgagaaaaagcagccaaggattataaccagaaattgaaggagaaatttcagcattatcctcatataaaacgtatagctcgtcatcgacatctaccaaaatctatctatagccagattcaggaacagcgcatcatgaaagaagctcgtcgacgaaaggaagtgaatcgtattaaacacagcaagcctggatctgtgccacttgtgtcagagaagaagaaacacgtagtggcagttgtaaaataattggtattcctaacaatcctgatgtataattatttgttacttttgatttgagaactctacaaataaaagtgctgggactagattaattgcaaac

SEQ ID NO: 11873 - DNA, 45 bp, Homo sapiens
aaaacgattctaaaattgataagaaaatgcaaagtagttagaatg

SEQ ID NO: 11874 - DNA, 348 bp, Homo sapiens
  misc_feature (1)...(348): n = a,t,c or g
cttgaccctgtattttgggagtcgaacggagaatggaaactgaaagtggaaatcaggaaaaggtaatggaagaagaaagcactgaaaagaaaaaagaagttgaaaaaaagaaacggtcacgagttaaacaggtgcttgcagatattgctaagcaagtggacttctggtttggggatgcaaatcttcacaaggatagatttcttcgagaacagatagaaaaatctagagatggatatgttgatatatcactacttgtgtcttttagcaaaatgaaaaaattgactactgatgggaaggtaattgccacannattganaancnctntgntgtanagcttgtnnaaaggct

SEQ ID NO: 11875 - DNA, 1528 bp, Homo sapiens
ggaacataaaattgaaacatggagggagctttatttacaagaaacatttaagcctttagtgaatatatctccagatgcaagcctcttcgatgctgtatactccttgatcaaaaataaaatccacagattgcccgttattgaccctatcagtgggaatgcactttatatacttacccacaaaagaatcctcaagttcctccagctttttatgtctgatatgccaaagcctgccttcatgaagcagaacctggatgagcttggaataggaacgtaccacaacattgccttcatacatccagacactcccatcatcaaagccttgaacatatttgtgggaaagaccgaatatcagctctgcctggttgtgggatgagtcaggaaaagttgtagatatttattccaaatttgatgtaattaatcttgctgctgagaaaacatacaataacctagatatcacggtgacccaggcccttcagcaccgttcacagtattttgaaggtgttgtgaagtgcaataagctggaaatactggagaccatcgtggacagaatagtaagagctgaggtccatcggctggtggtggtaaatgaagcagatagtattgtgggtattatttccctgtcggacattctgcaagccctgatcctcacaccagcaggtgccaaacaaaaggagacagaaacggagtgaccgccgtgaatgtagacgccctaggaggagaacttgaacaaagtctctgggtcacgttttgcctcatgaacactggctgcaagtggttaagaatgtatatcagggtttaacgataggtatttcttccagtgatgttgaaattaagcttaaaaaagaaagattttatgtgcttgaagattcaggcttgcattaaaagactgttttcagacctttgtctgaaggattttaaatgctgtatgtcattaaagtgcactgtgtcctgaagttttcattatttttcatttcaaagaattcactggtatggaacaggtgatgtggcataaggtgagtgcacggtatgttcagatcacagtgccttatgtccgaatacagcaatatgtcaccgccgcagccggggcgcacgcgtgtgaaacaacaccgagcttgaatgtggaagtctttgaaccttttaccaaatcagtttgttttctttagatttgtcaaaaagttgtaatttgaatattaaataattactttaaaaattttaatgacacttttacacgtaaggttttttgttctgggctaccgtgtcaacgagggctgctttacaacagctttatttatttttactttcatgcaatttttttacacatcttttggtggagtaaacttcaccacatccatgaataaactctcagttattttgaaatggcaaatttctcattatttaagtttggatctggaaaggacatgacttctgaaatagccgctgctgggttttaaaagctgaggtctctcaaagtgtggaggagacgttgccgtcaggcgggagccaagtgccgggaagatgtctatttttt

SEQ ID NO: 11876 - DNA, 374 bp, Homo sapiens
gcgtcgacgaaaatgaaaatacagaaaaaagagaaacagttgtcaaatttaaaagttttgaatcactccccaatgtctgatgcctctgtcaattttgactacaaatctccatccccatttgactgcagcactgatcaagaagagaaaattgaagatgttgctagtcactgtctgcctcagaaggacctgtatactgctgaagaggaagctgctaccctttttcctaggaaaatgacatcccataatgggatggaggacagtggaggaggaggtactggagtgaagaagaaacggaagaaaaaggagccaggagaccaagagggtgcagcaaagggaagcaaggacagagagcccaagccaaagaggaaacgaga

SEQ ID NO: 11877 - DNA, 124 bp, Homo sapiens
caaatgcctcctggggggcagtgtttctcaagcacttttaagcaaaggtgagtattcatacaagaaatttagggggaaaaaacattgtttaaataaaagctatgtgttcctattcaacaatatt

SEQ ID NO: 11878 - DNA, 148 bp, Homo sapiens
ttcggcagcagtgggagcagaacagccgttacttcaggatgtctgacatctgcagctccaaacaggcagaatggagctctaaaacctcctaccagcggagcatgcatgcctatcagcgggagaagatgaaggaggagaagaggaggag

SEQ ID NO: 11879 - DNA, 543 bp, Homo sapiens
tgagacactgctccatacaggactcatgtgtggtcattgcccacccaatcttatgactccatcatcttgggacctggaacaacatgacttttttgatcgatattttgtcctcggtgttttcaaggtctgatgttggagccctgtggcccaccctcccttctccaccagcatgttggtttgaaaaggatagggaatttagaaacagttctgtactttggtttggtttggttttctgtttgtgattgttttcatggactgttttattttttcccaggaagagtctttatcaatatcatgtgcagctcactcatggaaatggttgcaaaccaatcagtgtaggaagcttaaatggggctgtttccctctctgtgtcgttgtgaaaggaagagtcacacagtacctgtgggattttcagggactctgtttttctccggtgccttagcaacggcagcagccatttgtattattttcaaataattagaaaaacagttttcaactcctcctttccattcattgctcttcagaagttgtgggtcactgact

SEQ ID NO: 11880 - DNA, 78 bp, Homo sapiens
agatttttcctttccttttctttccaaagaaacaaaacaaacaaacacgaaaaacctttgccattttagaaccatctt

SEQ ID NO: 11881 - DNA, 951 bp, Homo sapiens
cgatggctctgggcctggctttgttgatgatggctttcctacagccctgctcttgtgccgaggctgtcgggctgtctctagggtgggagcagctaatcagatcgcccagcctttggcctcagaaaaagtgctgaaacgtgcccttgcaccggacgtcacagccctgcgagcatctgctggactcaggcgtgctctttgctggttcctgggaggcttggccacatccctcatggccccattttatccccgaaatcctggggtgtgtcaccagtgtagagggtggggaaggggtgtctcacctgagctgactttgttcttccttcacaaccttctgagccttctttgggattctggaaggaactcggcgtgagaaacatgtgacttcccctttcccttcccactcgctgcttcccacagggtgacaggctgggctggagaaacagaaatcctcaccctgcgtcttcccaagttagcaggtgtctctggtgttcagtgaggaggacatgtgagtcctggcagaagccatggcccatgtctgcacatccagggaggaggacagaaggcccagctcacatgtgagtcctggcagaagccatggcccatgtctgcacatccagggaggaggacagaaggcccagctcacatgtgagtcctggcagaagccatggcccatgtctgcacatccagggaggaggacagaaggcccagctcacatgtgagtcctggcagaagccatggcccatgtctgcacatccagggaggaggacagaaggcccagctcagtggcccccgccccccaccccccacgcccgaacagcaggggcagagcagccctccttcgaagtgtgtccaagtccgcatttgagccttgttcctggggcccagcccaacacctggcttgggctcactgtcctgagttgcagtaaagctataaccttgaatcacaaaaaa

SEQ ID NO: 11882 - DNA, 1072 bp, Homo sapiens
ttttttttatttattattttttctgctgcttaaaacacaactttattgatgaaacacaagtcttagaataacaaatataaactaatataaaagtgtagcttatgcatgatgtataaccaattcattgtcagtttaggtagaggaaagattaaaaaatctcaatctaggtaataagatcaaatcaataaattctttctgtgtacaaatactaatatttcatttggcatccttaaaatggttcatcctaaacccaaccattacaaccaacatcagtcactgttatgatatatgatagtcattattccaaaatagcagctgaaaagatctctttaccatatacgcacaatgaaaaacaaagaatttacaaatcacatcgtaccaactgcaaatatctcaatattgtttgggacagactccaaattagagtttggttaatactttcaggacttttactttcaccaccagatcattgtgatttgctagtgctttgattttcttaacacaaactccagactctttgaataagaaaaaaagtgaacttctgctgaattctttcctggatgatgcgagcccttcattttttatgttgtcatttatattctcaaatagggtaaggatattaagaagaatctctctatcccattctttattaaagagggaaatcaattctgatggtactttacaactgaccagctcctcttgtcatggctggatttttcagtaaagtttataattaggtttcataatctggtatctttggtgaagtgatttcccaggaataacaaagcaaaaaagtcttggaaaagaataggaaagcaaatgttggtaatgattagtcacagtcatgttggttaacagtcttagcccagccatctgcacagctgagtccaagcgacagaccatggtgtcatcacacttgactgatgtacgtcttaatcttgccctgattttctgcgttcacactcaagttattaagggcattgtaagtcttttccctaattatggggtcttttgtttttatcagttttgcaataattgggacaccacccaattcacgtatggcattctggtt

SEQ ID NO: 11883 - DNA, 393 bp, Homo sapiens
attcggaacgaggctggcgagggcgctggccgagaggtgctcggcttgtagcaggtcccgcactccagcctctcgctgccagggtttgctctctgcttgtcctgggctgaggtgtccatgacggagtcatccaaggaggaaaaaatctgttccgggtgagcccaggccgccccggatatgcgatggctgaggagcagacaccagggaccacactgaggttgggtttcagaccaagacactggattctcctagttaagataaagagctttgggtgcctgacagtgaaaatggtgtaatctgcgttaacagttcacagcttgaaggcatgacaattaaagaacacacatggacttgtggcacatggaaatgtgcgcacagaaaaaggaaatctat

SEQ ID NO: 11884 - DNA, 368 bp, Homo sapiens
cccatgttggcaatcatgtatgaactgtgttatacttctcagtgctttcttttttctttttgataagatggatatcaaaaatagttgctgtgcaaaagttagtagtcttcttcaagaagaaaaccaattctttttctaataatatcctgtgaaattgcttcattcattcatttatttttaagccaaatgtcagcagagtgctgctgcttttatctagtaattttgatatgtaagtattaatgcatttttaaaagatgtctacattgaaacatgttcttcccagtgtcctgcttatgatgctttgttcagattttttgtaagagaccagttagtacactgggggtgtatattgtgtacatgtgtcattt

SEQ ID NO: 11885 - DNA, 498 bp, Homo sapiens
ctgtgaccttgtacatgagtttggtgtgccctattgtgatttaaaacaggtgggttatcaagaggaacttgagatctctttattacatggacatttacttcagggggaccactgtaagaaaagccaaactccaagaccaagtaagttagaggagtcttgattttttagacttcactgcggagttctgtacaccctttgccctgatgaatttgaatgggtttgatttgcaaatttggatttacacccattgttttggaagcacatcagctgaataaagttgaggtttattttatttagaaaatcacattttgtaaaagaattcgatattcatttttataactaatggccccctttttttatgtttctaggccagagattctcaaacactgctccatggccaggggctgggctggctgcttcagaagcagtgggggaagctttttaaaattacatattcctgggggcctaccccaggatctggaattaggaacctttttt

SEQ ID NO: 11886 - DNA, 1596 bp, Homo sapiens
tgagttacaatacctcacttataattccaaattcatgttgtgttagctcaatatttttcaaataatttttgcatgcaattttcaccttctttctgagtagtttcaggtattttgtatggttccagcagtcagttaggttgccattgtttggaagcacacatccacgtatctgcaccatgatgatatgacacgcccataccccccatttcacattttgtcagaagtgcatagttatcactaactttgccagtagaaatgtactcccaatttcccacggacttatcttgaataatctctccactgaagcataacaggttttgaattctgttagaatagttgtttttactatcttttaattttatacaaatttcaaagttacgtaatacttttatttaaaaagtgaaacaaagcttttcctctcccttacccacatgttagtccagcagagggggaaagcattggacccaggccaaaatcataaacgctttcaattaactaataataattgctggcatgttgccattaaatatccttgtctcattatctctggttgctttatcaaacccatagggtcactgaaggcccacttttgaggacaaaggactatttctcccccaaaagtcaagggaaatataaaaaatgaaattagtgattaagaatagaagtcaattaatacaatcattttgtcttaattatttaaagtccagttttttccctccagcaaacctgaaaatacactatcctccagctatcagaattatattgagatctactcacatttatgatgatgttcagagattctcattgggaaggaaaaggcacacgctgcggtggtcttgcatgactctgttgttgtggaaattcaatttgttcattgtgttttgggctccctgggtggtcagggctgggctctgggtccttggcaattcctcaggttcccagcactccaaagccaagctcacctcctcatcacacgccctgcaggagaagcattagggtgtccgactacgtgggtttcatagctgtggaaaagccaaaggggagactcctgaagaaaggcggtgaagactgtgaagagcgggtcaggaagatgagcacagcactgctactcctgtgggcacagggacagcatgtctccagccagtgccaccttgtttaatacatgggaactcactgaaattcattctgtattttgcccgcaaagttttaaagatttcatccacagtcaggaattaaacttataccaatgagagcctcacacattcaaggatgtactaagcactacaggcctcacagaaacagagatcccatcttggagttttcagtcccacatgggagataaagggttttgaacatgaaatgacaaaaacaacagcaagaagaaaattctcgtcctttttcattactatcagactcaaataaatgtcttggctcttacattacattcattcttcaaccattgtggtctggcttccacttccttcacttcaccaacatggctctgccaaaggaagcccgtgatctctaggccatcactttaattgatctttctacaacatttatcctggtgataagccctcctaacaacatcttctc

SEQ ID NO: 11887 - DNA, 368 bp, Homo sapiens
ggatgacacagagcctgaaaatggatctgatatttccagtgcagaaaatgaacagactgaagctgatcaggcaactgcagctgaaacattatctaaaaatgaagtgttatatgacggagaaaaccatgattgtgaggaaaagccacaagacattgtacagaacattgtagaagaaatggtgaacattgttgttggagatatgggagaagggactactataaatgcaagtgcagatggcaacattggaactatagaggatggtagtgacagtgaaaatattcaagcaaatggaattccaggaacaccaatttctgttgcatatacaccatccttacctgatgatagattgtcagtctcttccaatgata

SEQ ID NO: 11888 - DNA, 445 bp, Homo sapiens
  misc_feature (1)...(445): n = a,t,c or g
aatcatacacataaactttattcatcattgtctttatgttatagtaggaaaattaaggcatttcataaaatatgaaatcaattgtacaatgcatgatacagtcaaagatctggacatggaattggtgtcttaactatcatttctcacctttaatcaataaacattattcctcttgaaagatgatgaaaaattactcatattaaatacagtaaaaataaacatcattaatcaaacactacatttctaacctctttacattcattaacagtgtggaatacaaacaatgatggtttttgttatggctttgtgtttctttaaaatgctaactaggccaggcgtggtgggctcaagcctngtaatctcagcactttgtgaggccaaggtggggcagatcacctcaggtcagaagttcgagaccggactgggccaacatggtgaaaccccg

SEQ ID NO: 11889 - DNA, 609 bp, Homo sapiens
  misc_feature (1)...(609): n = a,t,c or g
tataggggccaaaggttaactttgcactattccctgtcagttaaaggccactgatatttttctaagttagcaaggctcacttgcttgctttcttgcctcccttgcctccatccctctcccttcctaccttctctatttacctatttctctccctccctctcttctcctctctttttttttccccgcatatgcagctttttgattgtacttgattttatagagactgcacagttccagcaagattgggagtcaggcatggagcaggcatctcaggctaccagaaagaattggtcacctagactttcagtcaggcatcctcgtttgcattgtcctgtaagtcaattagttgataaatagttcccccttcatcccttaagttttgtttttgtttttgtttttaatataggtaagtgggactctacctaaaattttgcatcatacttatgggtaatatctttttcatatattatttatcaaagtatgaagttgagtattttgcttgtaccatttcaattctgcattatagtagttcattgtataactgaaaggaaatgatttcttcataaggtgacattaaatatggaacattncatcccaattggatttaca

SEQ ID NO: 11890 - DNA, 1299 bp, Homo sapiens
gacaagtgagaaagctttattaaagcacacatacatgtcaggggggtgggaaacaaaagagcaagttacagcccgggatcccaagttatgccttccattacaattgcaatccacaccaaatcaatctttgaaaacattcctccattcggttcatacatacagtagaaaccactgtggctgcccttaatccagtgtgcttataggaaatcagttagcagctgactctgttgaaagggatttcctctctgctatacactccttccacacacaactttgggtagaaacgcttatgagaatagaaaggtcagttttgatcaatgagtaccagaagatgaaacttagctcactagacccttctttgaaaagcctcaacacactacaccccatgtaatatgtaggtcaaatttaggaaacaatagcaaaaacaggaactgaaagctcatcaagcaggaagtcaagaataacagggagactctgtctacattcccttagagcccttaacagtccccagccctggagaaacactgggccaattgagataacacttggctcttctggttgacacagtgggatgtagaccatgctctgtttgataacacaccccagacgcaaacactaagacagatgtggtacatgaggatgaatatatctcatctttcattcgagaaattgaggagctctctctccaatgactgcagtatcagtttaaaatgcagaaaattcagcatgggctgtgagacactttaccctcagtcactctggtcctctgagatcagctagaagctctcactgggcatcctcgtgatttagtcaaaatacattatctaattaaagtgcttttcaaaagcagctccattataagagtcccccaaaggtctagtaaagatatctagaactggaaaaagcttgggaattctgttagcatttcaaagaaaagcattagaccaaagcaaggtggaaactgcttaaaaactagaaaagttaaatttaaaagccaagttccagaagtttatccaggtagaaaataagttaaaagcataaattggagaggagaaagaggaaggaactactcacctctccccaacattcctgtctttactaaccaaccctgcttcccagagccttaaaacccagactggtcctaatgcgaaaggtagccagggcttcctagggaagtaggaacaatgatagcaagacagaagataaaaagttgttttaaaagctgtttttaagttaagtgaaccttataaagacataagaaaaaatggactctgaaaataaactagattatacacaaaa

SEQ ID NO: 11891 - DNA, 1012 bp, Homo sapiens
ccattcgtttctaccatttaagggatcagtgcctgtaagccaggcagcagagtattcccactggcttaaaacttaggcgctgatgctcctacagtacagctagttataattccagaaccaaaggcaccaacattatttggtgaccttaactactactttgatagaacagactgggtaattcactgataatgagtcattacctttttaatatgtgattatctagttcagcattttgaatgtgtagtttaaggtctgatttagtaaaattttaaagctaaataatctgatgactcttgaaagtttaattggtagtatgacatttatgtttttttcccccagactcacagccaatacaaagttttgagactcctaaatgttaatatttttgctgtttttctgagctgtttttttatttacttaccacctaagctgcggatcaaaaagggaattcttccattagaaatttgtagtgttgtgtggccagcacagtatttttcagatttgaatttcagtacctctgtgtagcctcagtactctcaacaccagtcactctttattgtcttaaaatattccatactttttgttgacccaaaattgttgaaaatattttgctcagttttcacaatgaactaattgaaaagtgtagttactgtgttgtaaacatttgtgtagttctgttaatacactgatttgaattttatttatctcaacttcctttagcgtctgcctccaaattttgtctttgctgtatacccactgagatcaattccctagacccctctggctcttagtgtactataatttgggctttataaaatatattgtcttaatttaaatagaatgtgagccctctttttttttttttaagccaaataactacacaaagtaaattataaaagatttaaatagtttgtctacagtgactagactgaaatataaaaattgattgagggtagtttacttcaggtggttagctacaaatggcctaaatgtccttaaataatgcagatat

SEQ ID NO: 11892 - DNA, 327 bp, Homo sapiens
aaaaaactgggttctggggacacaggtcaaatgggtcacagctgacaggaaggaatccgacacacaggccacaccaggccacacaagtctctgggtgggagtggtcttacagagccctggttaaaccgagttctttggtgagaggggtcactggatcagagccaggccttctagagaacaatacgtcaaacagaatccatcacggcagcccacaggccggccagtctcagtcaacagacctgaatgaaccccttccaggggagcccaattcgacttcagtttccaagcaggaagcaagatcagagccagtgggacgcctcagacgcc

SEQ ID NO: 11893 - DNA, 626 bp, Homo sapiens
tatcttcaaatttaaatttattaagacattcagctatgtctgtcagtctacatccaaatttgctactaaaaataaaataaagtcacatcccacattaggaataccgaggtctgaaaaacactttttgagccaagcctattgtataaataaatgactagtttcttttcatatcaaaattcccataaaaaattacattcccccctccccagttctacctgtagccatgatgaatgtaaaaatttaaatatgacacatccttgtcaaagaaaaggtgcaaagtctattaacagctttaaaagtggcatttgcagagtgtgatcatacagttatgtactcattcccaaagtgcaaatattgccataatttaacactgttttgattcagttgcaagaattaaacattacacaggattgaaaagtacacccagggcctctatcagtgccctaaagcccttcccactttggtctccttcactaaagcagactccaaagtgttcatcagagttttagtttacttcacacagccagcgaagtatacaacatatttaacaaaagtttcatatacatcaaaatattgaagactccgtcataaagttcaagagtctcagattacatgaatgcacccgc

SEQ ID NO: 11894 - DNA, 411 bp, Homo sapiens
aaattgtgtaactagcttattattttcatactaaaaagtaatcactgatagtttttctataggtatgagatcaagggaatcatttttagaaatcattttcattgtaaaaagtatattagatgtcttttgccaaattttatctagttagtaattataaacagtatcagtcttattttcctattgtttatgaacaatataaagacctcttaatagtgatctaaaagttttctattgtcactgggttaccttcagaatttctaggcctgttagatttatttttgtcgttagcatttaaagttttgctctgtattagaaaatagaaaacttagaaaaacaggtagtggcagttcatcacttcccccacttttatttccaagtcattatctagtttctcaatgtgggcattgcaac

SEQ ID NO: 11895 - DNA, 175 bp, Homo sapiens
ctcccacttaccttataagtaaaaaggttaatatcaagtaacttattagctcttaaagtaaaattgaacttattaaaagctatctatgatttaatagatttaataaaattccttcacgacctggtacccttgtgaaactgtaaaatatatcatatggggggagttttttaactct

SEQ ID NO: 11896 - DNA, 659 bp, Homo sapiens
gcaattttagcatagaaaggagtctttgagtatgtacagttttgaaaattctctttgagataattgatttcatattctgtggctttcaacctccatttacctcttgtcattccaacatctttatagagaaataaaaacccaatttctctttcaccatttagtttgattatcatctggattttcactcaagatgcagctcctaagattattgttatgttaaattcataaactccttcacctttaataattaaggaaacaataccagtgttgataaagatattacaaggggtaatttcatgcaataaacatgtaccgtaagttttcttccacatattttgggaaaaaactaaaaaaagaaaaaggacttcctttttgtggacatctacagatgttagggttgccagaagcaaatcccaggaatgagatcagtattttcattgcatcttaaatgtataaccttcctgtgggagttcagtttgtctgtggttaagtgggtgtgcttaatcattctcgaaattgtgatcagatgaaataaaaaaaaaatcttgatgcaataacagtggttttgccacttctggttgtttgcgatggatctgtcccatgtcagtctgggggttttattcagcttgtgttgctaccagcagttcacaggtaaagca

SEQ ID NO: 11897 - DNA, 1629 bp, Homo sapiens
gctcagatgctgatgggctgtgtggttaactacctggtcttctgctggatgcagcatgaccagtgtcactctcactttcagaacatcttctggtcctcactcatgtacctcagctaccttgtgctcttctgccatttcttctttgaggcctacatcggcaaaatgaggaaaacaacgaaagctgaatagtgttggaactgaggaggaagccatagctcagggtcatcaagaaaaataatagacaaaagaaaatggcacaaggaatcacacgtggtgcagctaaaacaaaacaaaacatgagcaaacacaaaacccaaggcagcttagggataattaggttgatttaacccagtaagtttatgatccttttagggtgaggactcactgagtgcacctccatctccaagcactgctgctggaagaccccattccctctttatctatcaactctaggacaagggagaacaaaagcaagccagaagcagaggagactaatcaaaggcaaacaaaggctattaacacataggaaaaaatgtatttactaagtgtcacatttctctaagatgaaagatttttactctagaaactgtgcgagcacaacacacacaatcctttctaactttatggacactaaactggagccaatagaaaagacaaaaatgaaagagacacagggtgtatatctagaacgataatgcttttgcagaaactaaagcctttttaagaaatgcccagctgctgtaggccccatgagaaaagatgtcttaatcatccttatgaaaacagatgtaaacaactatatttcaactaacttcatcttcactgcatagcctcaggctagtgagtttgccaaaaccaaagggggtgaatacttccccaagattcttcctgggaggatggaaacagtgcagcccaggtcccatgggggcagctccatcccagagcatttctgatagttgaactgtaatttctactcttaagtgagatatgaagcattatccttttgttcagttgccccgggcttttgaacagaagagtaaatacagaattgaaaaagataaacactcaaccaaacaatgtgaaaacgggttctgtagtatttgtaaaaagggcccggcccaggaccactgtgagctggaaaagggagaaaggcagtgggaaaagaggtgagccgaagatcaattcgacagacagatggtgtgtatgcccctccctgtttgacttcacacacactcataactttccaaatgaaaccccacagtatagcgcatattttcgatatttttgtgaattccaaaaggaaatcacagggctgttcgaaatattgggggaacactgtgtttctgcatcatctgcatttgctccccaagcaatgtagaggtgtttaaagggccctctgctggctgagtggcaatactacaacaaacttcaaggcaagtttggctgaaaacagttgacaacaaagggcccccatacacttatccctcaaattttaagtgatatgaaatacttgtcatgtctttggccaaatcagaagatattcatcctgcttcaagtcagcttcagaaatgttttaaaagggactttagctctggaactcaaaatcaatttattaagagccatattctt

SEQ ID NO: 11898 - DNA, 118 bp, Homo sapiens
tttaactgtgtgaacgccaaactaaagtttacagtctttctttctgaattttgagtatcttctgttgtagaataataataaaaagactattaagagcaataaattatttttaagaaat

SEQ ID NO: 11899 - DNA, 376 bp, Homo sapiens
cccacgcgtccgctggttctggcctgaagaagagacctctcttcaagtttataagcccctacctaagatccaggaaaagcccaagcccacacacaaacccacacttactataaaacaaaaggtaatagcatggtcaagggccaggtatattgtcctagttccagttgaaggaggggagcaatccttgcctccagaaggaaactggaccctggttgagaccttgattgaaactcctctggggattcgacctttgaccaagatcccaccttatcatgggccttattaccagaccttagctgagatcaaaaaacagattaggcaaagggaaaagtatgggcctaatccgaagcctgccactgcaaatcacgtggcttta

SEQ ID NO: 11900 - DNA, 1276 bp, Homo sapiens
  misc_feature (1)...(1276): n = a,t,c or g
tttttttttttcagaatatttatagatttatttataatgaaattatggtctaaatatttacaacatataggaaaccagaggataagtttatacaaagcccnccctgcaaagtattcaaatgtgcaaaaatgacagttcaatatctcaaactattcctggttcagcagactagctccttcactttcacacatcaatatttgatacaaaaagtttattttggcaaaatctgtaatgcccaagaaaaaggacaatttgcaatttcagtcattaagtccaaaatcctatagccagcagtcagatctctctgttttagctgcaaccagttctgggagagagagaccactgtatttcatttctgtgatgagttctgacccagttttagtcaagaagttttctctgacccagctgaagacaggatcttagaagggcaataaaaacagtaatggctatgagaccaatgtgcctgaaggtgccagctttggatcaccccaattaaaaaacacaatgaaaaaataatttcattttcctatccaggatccagctatatccaacagttttaaatgagacagcattttccaaaacagaaataatccaaaacaaaacagggatgcagatctgtcagaattaaatactgaaaaggacggtcttaaaatcatttccccactaataaatagtaaggctctgtttgtaaccagttatatatcaaaattgaccaaacagtagtaaaatacaaataaaactttctttatgtcagaactggggctattcacctggaaaaggctgaccaggtcaaatgtgtatgggaacgaccctgttaggatgctttgttggacaagcacatttcaccaactgttaaaaagcttctgagataaatttgtgattctaattaaattttaacagattctatgccactgcagaaataaggatttttgtggttgttaagggaacccctttaagaaaggggggcactgaatctctaacttctgcaaaggtccagatggttcccagcacaggccccagagtcttgttaaatcaaatgcatgcattattgctaagaagagtcactgagggtcaaaactctgttccactgtttcctagggagccatccagaatggcatctgttgtttagctcgtggttgtgatgaaggatattggtatcccaaactccagccctgtggaaaactacttgcatttttatgacctccatgttcctcctcttcatcagatgaatctgcagcataagccaccaagccaaatcccttctctgtagttttca

SEQ ID NO: 11901 - DNA, 649 bp, Homo sapiens
cctcacgcgtccgccaggcctggctgcaccctccttgcccaagaagctgaagcctgaacaaatacgggtggagatcaagcgggagatgctgccgggggcccttcatggggaactgcacccatctgagggtccctggggggcaccacgggaagacatgacacccctgaacctgtcgtcccgggcagagccggtgcgcgacatccgctgtgagttctgcggcgagttcttcgagaaccgcaaggcgctgtcgagtcacgcgcgctcacacctgcggcagatgggtgtgaccgagtggtgcgtcaatggctcgcccatcgagacactgcgggagatcctgaagagacggacccagtctcggcctggtggacctcccaacccaccagggccaagcctaaaagccctggccaagatgatgggcggcgaggtcctggcagctcactggaagcccgcagcccctcggaccttcacatctcacccttggccaagaagttgccaccaccaccgggcagccccctggggcactcaccaactgcctctcctcctcctacggcccgaaagatgttcccaggcctggctgcaccctccttgcccaagaagctgaagcctgaacaaatacgggtggagatcaagcgggagatgctgccggggg

SEQ ID NO: 11902 - DNA, 725 bp, Homo sapiens
  misc_feature (1)...(725): n = a,t,c or g
agctggagcacttaatgtaattaattccaggttatgactcttaaaaaacattggccattagagaaatagttctatttgcccatccaaatcacctgaatgactttttgaaagaataggggtccacatccccagatcccatcccagctgtgcacagtctgaagcaagcagagtgaaacaagttggcaacttgttccaagcgtgggcctttgcagtctgtgatccagtgttactccaggtcccagtctgtcccatacttgtcttttgctacagttagttagttactttgttatcatccccttgtaaactgccttcaatatctgggataaggaagacaaagcttaatgacaactaaggttctagctgacatctttctttcatatttaatttttgtgagttttcatctgttttctgtttgtttatgtgtcctaggttcttgacctaaccacatgggttttgttttttgtttttatattagaacttagaaaagtttgttttacagcagtattatggaacagaagagaccattttaaataatttttttaaacagcccaaaacacacaaaagatacttgttttctannnnnnnnnnnnnnnnnnnnnnnnnnnnntnnnnnnnnnnnnnnnnnnnnnnnnnnnnnnnnnnnnnnnnnnnnnnnnnnnnnnnnnnnnnnnnnnnnnnnnnnnnnnnnnnnnnnnnnnnnnnnnnnnnnnnnnnnnnnnnnttgc

SEQ ID NO: 11903 - DNA, 623 bp, Homo sapiens
  misc_feature (1)...(623): n = a,t,c or g
gggtctcttgattgttcttcaggggcatgaggaagaggcgcttcctcccttcccttgggtgagggggcccagggtgattgggtggctgtttacccggcagccagtcgggccttcccaggtcaaacagttcccatctgggtttggaggaaggacccaggggcccttgtggctcactcccccacatcctgtctttgcaattgtcagaaagtgagaaacgaaaggatggctgtgagctgtgacctcagctgggcctgggctgcagaggtggcttccgctggagtaaagcaagagggcccagggttcatgctcttccctggaaggtagaaaaggacagaccaccagggagcctccaccgcaaactgacctgtgctgcctacacactaactttcctgggcctggggctgncacaggctgaatggtccttgagccttcactctgcatctgagcggtcttgggcccgctgagtggcagtggcaggaagtcggtggaagcagatccctgtgcagaagttgaattaccaggggcggccacacacgggctgcacaactttttncagttcgttgcacggcaagttgggatgttggccttncgcccntgatttgggcacntgggtcaaggttggg

SEQ ID NO: 11904 - DNA, 138 bp, Homo sapiens
gttgacattgcctgaaaaggcaccacctttaagggccagttgtggggttggtaagcacagttatgaaaatttctatctagcctccgtttttgaatggtttttaaggaatttttgtatatggaggattggaaatggctt

SEQ ID NO: 11905 - DNA, 366 bp, Homo sapiens
  misc_feature (1)...(366): n = a,t,c or g
aattattactcctgttgcagtgttactgttatgtattagaagtggcttttccccctaagatccttagtcttttaaaagacaatttaaggtattggccatttggcagtagaaaatgtgcatgttttaacttggttttataaaatctgtaatggnttcacttcttgaaccatgtaccaaatttgccaattttctgtccaagtgtttcagatgaataacaaaacgctgttcattgaagctttcgccacctttcttaaagcagcgtatgttccaagggaaaaaggcattgaaaagcaatcgtttgtttttatgaagaataggtgttcagattccttcagtttttttgaaattagaaatttcttaccttat

SEQ ID NO: 11906 - DNA, 123 bp, Homo sapiens
cccacgcgtccgcccacgcgtccgagcttttggatgtgtgcctttaaaaactgattatgtataaatactgatatttcacatacggagatatttgaagacccaagtctgcctttcaaagagccc

SEQ ID NO: 11907 - DNA, 733 bp, Homo sapiens
taacagtattatgtatgtactggaaagcaaagaaatcttagagtcttggacattgtttatttgtgcaacaactagaaaggagcaatgaagtttatttcagttgtatttttccctaagcacaatctgcaatagtttatgtatgacagagataattcaaaaaggaaaactatatataaaagttgtatataaagtttgtctctgaaatatttctttgaagtttttaaaaaattgactcatgtttaaaaacaaaaacacatattcagagcattggacttttttaacttgttttcatctgtttatcatgacttttttatttctggtgtagagtccacattatttagtttgttgtacttttaaatttcaaagttcaaatctgaagaattagcgtttgtgatttcgggataccatgcagtggttttaatcccaggaaaaaaactatcaacaaaagttcgtttgattctcattatgtaactttgtagaaccatcctttctagatgggtccaccacagtgaatttgtaactttgaagtcaggatagaatatcattagattatctgtgagatagcattactatgttaggaccagcagagtttgggttggtaaaaataatgtttgctctattactgggttacagacatttcagcatttttaggttggttttaaatcactaaaaatatttattcggatttgaaggatttaagtgctaaaaatcaatccatttcttgcccttcaat

SEQ ID NO: 11908 - DNA, 490 bp, Homo sapiens
gtgagttttgcccatggaaatgagttgaaagggtttatggacccattctatatttatatgagactgaagtaattttttccacaaattgacagaacaatgacccacacaaaattgcttcctgctttgctgccaaaacaccaggcaaaaacgggccacatgttcatcatgcctaagggcagctctgactgcactggtactatgtcatatgttagtttcaaaccaagttaatgtcataaactggcaggcactgcatcttgtcaattattagccagttcattattaacattactgagtgaatatcatatatggtataattcattacagtgtaaatagccatttatatcctggggaattcctcaccaagactatatggaatatttttgatcagaggaggagacacattaagtagctttatcccattgcccttaactcttatattgttcattttattaaaggtatcatgcaatgagagttagcaatataatcactg

SEQ ID NO: 11909 - DNA, 363 bp, Homo sapiens
tttttttcatactaaactttttattaaaacagtccttacaacatatttaaaatggcatgttccacagtcaaatatttaagaaaaaaaatctatatgcaattattggcacacaaatttaagaacataattaaaaccaagccagatatctctctgtatttatatatctatatacatatagatatatatccatacagatagatatatcttcaaattcatgtcagtgacctggaatacctgagatttcaagttgttggttttccagatgggtacaaaacatttttcatccactttataaggacacggcagatccagaaagaataactttggttaataaatgctgtctcccaaagatcaaacagaagt

SEQ ID NO: 11910 - DNA, 970 bp, Homo sapiens
tttttttcaggttttgaggtttattaaagtaaagaattagcaaacaatatgcaaaaacaaagttcttaagagttatggctttcaaaagcacaatatagtaaaacctaatacattttcataagtatcaaaataacagaattgaagcatgttgctagaatttcagcttctacaacataaacagaagcacaacaaatacaaataagcagcagacctacagtgcagccactagcttggtcttcattatctgtatatgaaatatctttttaagaaaatgtgggcaggtagatacaaacattctatttccatgattacaatcctcttcgattttaaaataagtgaatttcaaaatacaacttacgccaaccatatttaaaaaaaaaatcacttgcctaaccattatcttctagagttcctatagttaaaatactttatgaataaatcaatgcaacatcatcttcaatgatattagaagggaaaatctgaccctaaaagattttttttttttttccacaaagaacttgggattctttggccttactggagttttgttatagctaacaccagtctgtattaattaagaaggcactattaatgagggacggaaaaatctacctgtacacaaaattctgtactttaacagcatcttcaaataaacctttaaaggataatggtttacgatcattttaagaattttaagaactgagttatttggacaagaaccatacaaacctttttcactctgccatgaatgatcgaagaatcctgctctaggactggatcttttcagagaaaataacttatcacctgttttactgcagttgctactagcaattattatatagcatgtgctcttcaaaacagaaataaaaattgatgtgtgaaatccctttcattggttttggtaaaccatccaattttgggctgtcatttcaattataatacagttgtattttaagagagaagataatcc

SEQ ID NO: 11911 - DNA, 604 bp, Homo sapiens
atgttacaaaatttacaagaacggttagaaaggaaaaagagaatagaagaaattatgaagcggacaagaaagacagatgtgaatgcctcaaaggtcacagaaacatccagccatgacatatatgaagaggctgaggctgacaacgaagaaagcgacaaggactcattgaatgaaatgtttccatcagccattctaaatggcacaggctcacctaccaaatttaaaatgccgttcaacaatgccaagaaaatgacacacaagctggtatttctagaagatggtaccagccaggtccgtaaagagccaaaaacatattttaatggcgatttgaaaaacttcagacaaaaaagcatgaaaagaccacttcaaatacaggaaagtagtttcaaagacccatcttcccaaaaagaaatgaccagtcacacaacgaaaaaccagaaaaggcggatgaaaccaacaccacccagcagatccctctgcacaaaacaaaaatctgaaggatttccatgacattcttgccaaagtcctcagacacctttagacaataagagaagaagcaaacctgtttctcctcatttggatatgtaaaccttactcagcctgg

SEQ ID NO: 11912 - DNA, 1660 bp, Homo sapiens
acctccgggatacttgattactttccagctattgaaattaggggagggggaaatgaggatgcaaacctaagaaggttctgggcgggatgatttggggcagggctttttgaaagcaggcgcctgctttgctgtttttactgccttctttctagacacaatcgacttttacactggggagaccagagctcacttttctgcattaagtaacaaaaaataaactttgaaagaaaactgacaatcaaagaaaaaacacaagagaagttgtaagaagaattgagctatgaaaaagctaaggtgtagaaaaagaaaccatcatttggagacgcgtacctaagctttttctctaggaaatgctgtcatgaattcttcctttgtagtgatcattagttcatttctaaagaaaacaaacattccccaagatgtaaagtaataatatttcattaatgaaacataacaagtataaacaccttgtttactcctgtttcttatacaaaatgggcaaaaatgtcttcaaggatttatacccattttgtaaatattaatgtggcttctgctaggggtggacaacttcccggcttctatgggaggggccacttagaaaacgccttcagataaggttcaattcttttgtatttcagcagtcagcccacgcatctctatttggtttgacaaataatgcaactcctactacatccccgatgacacgaagtgaaattcctattgtgtggaaataatttaacttctaatcttctggtggaacaacaatcgtttctatttggatgtttgtatttcactaagtaatgatggctcaaaataatatttagtttccttgttcctttgtgctgtttttaaaatggcatgttagatttgggggtgggaggggatatccttttgctaaatttcactttatctgagcaggtttaaaatatatatgttgtagaagtgtatcaacagaataaatgacttcaatcgaaggcacattttacccactttcaaggcttaacattgttttctatgaaatttgcatccataggcagaattcctaattgtcttgtaagaaattattttttaagctattagagaaatcaaaggagagctcactgccttgcagggattacaaccacctttcttaactggctaaatattaactagctgaattgtcaggctgcttagattcagcccgattttccctcatctcctcttcctaccataaataataataaaaatacataatgtgtcatggctccaggcgttttccagcacagtgtgttaccgcaggagtatctgctgagtctgcgggtgtctgcaaagccccaagtgtcatttgcggcttagggtttcatggattagactttaaacggtgtctagcccggctgacattagcttcctctcacactcaggctccaaggaagtgtgggatcaggggctccctctccaggcagccacagctttccccgacgccctcctctcgagtggggtgagggcttggaccaaatctgccaccttctgtcatctctggaggttcccgagacttctaatagctcggatctgttcctgccattggcgtgagactcatctgaggggcgtgggtgggggtgggcggcgagccgtgggaggcgcgtttccgcgcggctgccagcccaggagaaagttggggccc

SEQ ID NO: 11913 - DNA, 343 bp, Homo sapiens
gtgacctaagaacaggatatggtgaggatgtcatggaagagaagagctctttccgtggtattctttggcaagagccatgtctactaagaggttaggtgacttcagtatacttataaaattcagtgagagtgccttcttctcttctaccacactctggcatagatacaggcttgctggtcacctctcattacatagatttattttaaaaacattttgattatgttaatttgagctttcccttttttttttttaactactttttaaaacacttgattactagtggcttagaggtgtgtacatctcctgaacatcacaaacttggtttctacctaccacacgagta

SEQ ID NO: 11914 - DNA, 373 bp, Homo sapiens
cggacgcgtgggcttgaatgtcaccacgtcgggatattaaagatggatattcgtgcattattcacatcattgtttctatgacaaaaagcacagagttcatacatagtcaagacgtcttttttctgacgccctcacgttgagaagctgaaaaggtattttaccgaagttcgggtaaattacagaatcaggttcatccagaggacaaattttctatttgattagctgtatttcagccgggaggactgacctctaaacccctaaccttttggactctaactacccttctcttcttttttcctctctaacatggagagcagtctttggatgtaccatttgaaaggagccgctatccttaggcaagttggaaagttgg

SEQ ID NO: 11915 - DNA, 723 bp, Homo sapiens
  misc_feature (1)...(723): n = a,t,c or g
tttttttttttttttttttgacataagaaaaataatcagtttaataattacaacagtgtagcatcaacattgtagtagtcaacactaggacattgtctgtgacatttaaattaggagtttctccacacttgtcaacaggcgccctgataatatataaaatgatattttttaatataaaaaagannnnnnnnnnnnnnnnnnnnnnnnnnnnnnnnnnnnnnnnnnnnnnnnnnnnnnnnnnnnnnnncttgtggcagcattgaaggcttcactcttcccaagggatccaatctcccctcagtcaagaagctccaggtatctgaactggatgccaggtcataaatttccactatggtgactccaacaggtctctgtcctcagaactagagcttttctaattattacataagttgacttcttagtagatttcccatccattacatcccagacacctcacaatgattagtaaccaccacatgtccctgcctctcaaggaaatccctcccgccttgtctctagacagccaagtcccacggcctgtcctctactcttccagaaccctgttgttctgacagcagggaggacaaatccatgcagcatctcccgccatgacctccagcctgcagaggagaggtgccaacaggacctttacacgcacgccgctgttcccctcacccatgcatttcttaatgccttggtgaggagaatgcctctgggtcttcc

SEQ ID NO: 11916 - DNA, 505 bp, Homo sapiens
cccattcataagtttggcttcagtactttgcccctggttgaaaagtactcatctcctggtctgacatccaaagagtcactctttgttcgaataaatgctgctcatggattctcccttattcaggtggacaacacaaaggttaccatgaaggaaatcttactgaaggcagtgaagcgaagaaaaggatcccagaaagtttcaggtgcttgtgactaaattcactaatttcactggctgtcaaggctgtgttaaggaaaatgggtttgaactgctgtgggttttgagtactggactggatgtcagaaacctttgccatcacgggaaattctgtcactctggatttactgtctgttccccacagctaaattcctctgcagtgtgatttagcaccctggatccccatcaaccagttttggcatttatttgaatgcattaccccactggtttccataaactattttacaattgtttaaaataaatgactgtttatttccacaaaaaaaaa

SEQ ID NO: 11917 - DNA, 376 bp, Homo sapiens
attagcacccctagtggggccaacgctttggcgactccaagatgcccctccagggacccccgccatagcgtggggagaggtcccaaggcaccagcttcgaggccacctcacccactacaccttgtgtgcacagagtggaaccagcccctccgtctgcatgaatgtgagtggcaacacacagagtgtcaccctgcctgaccttccttggggtccctgtgagctgtgggtgacagcatctaccatcgctggacagggccctcctggtcccatcctccggcttcatctaccagataacaccctgaggtggaaagttctgccgggcatcctattcttgtggggcttgttcctgttggggtgtggcctgagcctggccacc

SEQ ID NO: 11918 - DNA, 1707 bp, Homo sapiens
aatgacctccgggagaagaactggaaggccatggaggcactggccacggcgagcaggctgacaaggagaagctgcactccctgacccaggccaaggaggaatcggagaagcagctctgtctgattgaggcgcagaccatggaggccctgctggctctgctcccagaactctctgtcttggcacaacagaattacaccgagtggctgcaggatctcaaagagaaaggccccacgctgctgaagcacccgccagctcccgcggagccctcctcggacctggcctccaagttgagggaggccgaggagacgcagagcacactgcaggccgagtgtgaccagtaccgcagcatcctggcggagacggagggcatgctcagagacctgcagaagagcgtggaggaggaggagcaggtgtggagggccaaggtgggcgccgcagaggaggagctccagaagtcccgggtcacagtgaagcatctcgaagagattgtagagaagctaaaaggagaacttgaaagttcggaccaggtgagggagcacacgtcgcatttggaggcagagctggaaaagcacatggcggccgccagcgccgagtgccagaactacgccaaggaggtggcagggctgaggcaacttctcctagaatctcaatctcagctcgatgccgccaagagcgaagcccagaaacagagcgatgagcttgccctggtcaggcagcagttgagtgaaatgaagagccacgtagaggatggtgacatagctggggccccagctttcctccccagaggcgcccccagccgagcaggaccccgttcagctgaagacgcagctggagtggacagaagccatcctggaggatgagcagacacagcggcagaagctcacggccgagtttgaggaggctcagacctcgggcatgtcggttacaagaagaattggagaagcttccgcacagccggccccctagagtctttcagaaacagaggaggccttcacagcttgaaggagagacttagaaaaagagaagaagttaacaagtgacctggggcgcgccgccacgagactgcaggagcttctgaagacgacccaggagcagctggcaagggagaaggacacggtgaagaagctgcaggaacagctggaaaaggcagaggacggcagcagctcaaaggagggcacctctgtctgagtttcctctttggaaaaagaagttactgttcaacttaccaaaatgccttacacattccttacaaataaaccaaccaacctacacagcgttatccaggcccaacttccggtagctccgagagaagccatgagagacaagtctcttagagccacagaagtagaccttccagagccccagtttgtaaatgaacctgtgtcacatttgataaacactatcctgggcgcagccccgggccaccgccgagtgacgccaaagccctggttgactctgacagccccgtgggtgtgtgggaggccgggcgctctggggtctgtctgtcagtgcaatcgtttagtgttttttcagtggggcggggcgggaagcgggtgggaccgggcagccagttctcaaaggctgtggggccgactggaggccacagcccctcacccctagacgttgccaaccagaactgacgtgtgacctcctgggtgttgatgccattaaaaccaacgttggtgcccggtaaaaaaaaaaaaaaaa

SEQ ID NO: 11919 - DNA, 1046 bp, Homo sapiens
tttttttttgtttaaagttaaagtttatttgtattctttgtaggaatatcaataaaagacctcaaacgtatctatatctgtacatgtacaagaactgtcaaaaattattcacagaacaaaaataaatcttctttagaacaaacccaggtaatgaaatgctgatacggatctcacatacggaataatctaaatgctactagcacaaaaatatggctttaaaaataaaataaaatcttgggttttgtttttctaaggtgtatttctctttcttgaaataaaaaataaattatttagagctatcattgtaaaatagtcgtgtggttaacacacctcttattaaggccctggagatgaaaaacaaaatcaaatttagaaggtcatttcctcacaggtgtaactcaggttaatgtgctcgctcgtctgcttaagttaatataactaggaaatgtctaagcaccagtcaaaatttaacctaatttactatttaactttcctgaaggtggtcattgagtcaattagtatttaaccttttgttgaactgggaattgaaatgtttccctcgaaaatttggaaatcacataaaatgatatttacacataaatatctgtacccccacaaagatgatggaggtccctaaaacacaacttctgtggaaatctctctacaacaacaaataaatctggttttaagtctcaaactaaaaaaaaaaacaaaaaacttcctagggtcaaatgagggtatttaagtggaagatagcaactgagtaggaaaggaaaatgcatgctgaaatgcaggcaaagactaccactttcctttcctcgggtgctcactgcatttcccaagtcttgctgtgttggttactcaaacacttgaggcttaactgatcaggaactgaaactacttatttctggatcctactctcagatcaatgatattcaactttatttctatgattccccatggtatcaataatgatatctagggttcttgagacaatgccaaaccaagtcaatttcaagttgctttaacttatatatacatataac

SEQ ID NO: 11920 - DNA, 842 bp, Homo sapiens
  misc_feature (1)...(842): n = a,t,c or g
ttttttttttgtcaaaataattaacctttttaattttttaaaggaaaaatactctccataggaaggcatttctattttttgtccatcagtagccaaatggaacttgatataaacacttccagtatgccaactttggtttaatgcacaactttgaaaataactcattaaaacacacatcaagatgctactaacaaattcattaatatccaagattcattactgtatgtcaaaggtcatccaggattaacattttcattacaatgaactgtgaaattccaatgaaaaatgtttgcctgaattaaattatttaatctctcaaattggaagtctagcactcttgaaaatcnnnnnnnnnnnnnnnnnnnnnnnnnnnnnnnnnnntacaaactgcacattaggacatgagggcaatttaatggaaaaagaaaatagaaactgaaagggcatttgtaaaatgtaggatatcatttggacaactggatagagtaggcagaaaatcctaaaggtgtacataaaaaaatagccagtaaatgataggctacagaaaaccacactgaaacatttgatgaatttcactgcagtaaacagacttggcaaactgaaacactagaaccatgactacaagcctcacttcattccacacaaataaaatctctaaccattataagcacagatgagaatcctcatgcaacagaggaaatataaattatttttaattttaaaaaataaaaaatataaattcttgttaaacacttgatttaaaaatatgcagcttatttttaaatgtagttatgctcaaagatggcagtttacttatatgtaaaaatgttcggacgcgtggg

SEQ ID NO: 11921 - DNA, 710 bp, Homo sapiens
ttgagctttactgaaatctattaatccagtatttagcacatatttagcattaagcctcaaacgatacagcaatatgttacattctcttgtgaaaacagttgttgtagactgttaattttttttaaatgtaactccgacttgtgcctaataggatttgacctttaagaggtttcttttgctgtggatggggtggctttgcttgaacttccattctgtgccttgtagctggtgaggctgggagtatggatggtcctggtgcccttggacattgaattcagtgagacggaggaggcaggagaaggaggggaggaggaaaatgacaaaggagggggtgctcggccattttgactctgcggtgagaatgaaagatggtgacctttacctgtatgagtgaggctctgaaacttcaaagagccattagagacagaagggatgagggaggcagagtgaagcaggtggtcctgtttgggggctgagagggttagaagcaatcgatggtttagtagcaggtggattagggaggttagagctgtcaccactagaagagggcagagaactgcttttcccagagctgggagaaagggctggaatcttagaagcaggtaaggagggggaagtaggcttaaagtccccaccagatttcttagcacttccattagcctgacgatattggcggggatcctgcagtttggactgcttgccgggtttgt

SEQ ID NO: 11922 - DNA, 457 bp, Homo sapiens
ttacaggtgtgagccaccatgcccagccatgtcatttcatttaaagtcacaatttccatgaatctcaacaagtgaggacctgctatattttgttgcatgcagtttttctttacggacactaaaaggccccatacttaagattccatctactttaagtttaaaggattttcagaatcaccttaagtgtcaaatttgttagcaggattaattgatatgaattcacttattaaatagtaaactcaaataacatagacatcaaataacagacatctgctctagttaatgataaaatgtttatagattttatcaggtggttagtttgaaactaaatggtttacatctaaattaagggcaggagctgtctttcagacattcaaaacgcatttgtgtaaaatgacaggtgtttggtattaccaggaactcataatgacattttaataattattgtctaaatttc

SEQ ID NO: 11923 - DNA, 437 bp, Homo sapiens
tggagtcaattcagggagtttcaactgtgacagtgaaataagctcccacatgttcaaggcccattctggttcctggctgcctgcctcttgcacagaagttcgttgtcatagtgctcaccttgggaaaaggattaggtgggcacataagattccgatcagaccccaaccatgctgcatgtgtaaagaaggattgaaaataaaattgcactttttaggtacaaaatcataaaagctgtttcactaggaaaaggcagaaagcagtgtattaaggtgttgaattacgccagaagacctgaaatgccttgtacctacaacaatgcttaggcttttctaagcctcttgccacttttaaaattatccttcaggcataaatatttttgacagcagaatagaagaatgattcatggagaacctgaaccagatgaacagctactagt

SEQ ID NO: 11924 - DNA, 1131 bp, Homo sapiens
gaaaatttaaatcactcactgcaacatgcatttaaaatcttccaagaaggtagaggtatcattttctgttttgctttgttttaaaacagttgcctcaagcttctgtcttaagagtagtgacttagaatccagatatcttttgttttagaaaaacaagcaaaactatgttgcaagactgacagttgtaatgtttatttgccacagatcaaaggttcacaaagtatatcaaatttacatctacttggggtaccttgatagattattattgtttttcttttatctttcccttcaggaatttggaaactcgttgtcactttttttaattttaaaaatactaaattgtaatagttttcttttgccaaatgtgtgcgtacatattcaaagcaatgaaactatttcaagccatacaaccacaggggtgggaacccttttcacaaattttaatgtgtttgtatgtaaatagatgtttgtatgaaatattttcatgatagaatgaatatatttaaatgaagttgaattattccagtgctacttaaacacattacaaaaattttggtgagaattatctgagtctattgagatgtaatgcagatcaattttgatttttaaaaatcaaaagcctacaataactctgactctcagcaacttcctcggcgttgttgcacctgacgtggagagagctcgtaggcttccccagtgcctcagccgcttcctggtggaagttaggtgctaatggaggtgtgttcaccttttagtgatatcactgcaggcctttgaggggcctgagagtgaatcagaggcattagagacaccggtgcagttatctggagcacaatttctttgcagggcagcagaatcagaagccagacttggccatgtgaacctcgaaactcggtttcccggccgccatcaaccgccacccttactgcctagtcacacacgtcagggaggctgccctcagtggagttgggggttgagaccccagggtgggacttcacagttttgccagcaatctctaccttctgacttctgcctcgcagagagggaaggagaggggagcatctggcaaggggcccaatttctcagcacagtacatttcctgtctcagctctggaagactatgcacccaag

SEQ ID NO: 11925 - DNA, 435 bp, Homo sapiens
gtttgaatggagggattatatttcaggtgttttagcttgaaatttattttttaaaaaaagaaaaatttaaaaaatatataaataaaatagaacaaagccggtgatgcaagttgatattataaacaggcagttttagcacagaaagaaaatactgacctgtctgcattctggtacggtgggtgcaggtcccagctgggtatgacatgatacatttttaattattctcaccagcaagtaaaaggaaaatgaacagtcttttggaattgtctttgaaaaggatcaaagagtaggaaattcacatttgacctaacattacttgcctatagaagtatggcatttccaagcttttgtctgaggagcatctcagagaagtgagagtaaatctgagttagcttaaaaattggtagggaggaagaaaatctctgcaaataatgg

SEQ ID NO: 11926 - DNA, 677 bp, Homo sapiens
tttgatagtaagtgagcttttattttattcaccataaaatatttgcatctcttactcctcaggttcttacataagacaacatttaattaattaagttaccattatagccatcgagggcctgagaaaccacatcctttgcaactgtctcataaaccaagtcctgggaggcatcgtgaagaactccatccaacttaaacgaccagtctgtctgttggttattgacaactcctctccgaatgtctttttttaagtgaatatcaatgcttcttttgtcatctccgtatctgatcatttcatgagcaaagtcatcggtgggtttgacacggacaaatgcatgaacttttttcctagtacccattctagcgttcaccaggcagcgacgctcccgggacgcgactgccgcaaccgaaaccacctgcactccccacgcggggctgcctggctgtgtacatagtcgccatggcaacgggtcgcttccggggattccggaagtgtcggggtggcggaaatgaagtccgaggtcctacgtcgaggatacgggtgaggtcatggccgaatcgggaagacgagagatggggccgattgatctagaaagacttcggcggatgcacatgcgaagtcaaggtcgagatagcgaggtgaacgaaggccgcacatgaatcaggaagtggagtgtc

SEQ ID NO: 11927 - DNA, 747 bp, Homo sapiens
tttttttttaaacacagtaatcatttattaattcctgagaaccattatgaatcatataatagtttaaaagagattcaggattaccactttcaaatatatccactgacgcttccaaagtagtttaatgaatgaataaacctatttgtttgtatataaatggtatacttggaagagctcaaaacttttgtattacttatatgtgcacatacattagacacttccctatcatcatttttactcccttttttcttagcaagccctttctttccaagtaaacttcagtcagactccctctggctgcccacaaatcctcaatcactgttggtccatgaaggtttactgcgttcatttaggtgctcactcctccctgaggctcattccctcctaaaacttctgagcaccccggaattactggccccatgtctctctctctcctttaccaagacagctgctgaggctgctgctatgcaggtctacctgcccctctctggcctctgtcttgctttaacacataatgtgcctaccccaggtagtcagtatctggccccctcccatctctttgccaagcagagaagctatgaagaaagacaatcaacaaaatggtcctgtactctaggagcttaagcctcattgagatgataacctcaactcaagacataagggccatgctatgtaataaacaggaggcagcactaggtccaagtgaacctttcactcaatgacaacttaatttacgtacttgagatg

SEQ ID NO: 11928 - DNA, 1444 bp, Homo sapiens
  misc_feature (1)...(1444): n = a,t,c or g
ctgcaggtggggaatgttccccttaaaaaagcaaaggagtctaaaaagcatgaaaagnttgagaaaccagagaaggagaagaaaaaaaagatgaagaatgagaacgcagacaagttacttaagagtgaaaagcaaatgaagaagtctgagaaaaagagcaagcaagagaaagagaagagcaagaagaaaaaaggaggtaaaacagaacaggatggctatcagaaacccaccaacaaacacttcacgcagagtcccaagaagtcagtggccgacctgctggggtcctttgaaggcaaacgaagactccttctgatcactgctcccaaggctgagaacaatatgtatgtgcaacaacgtgatgaatatctggaaagtttctgcaagatggctaccaggaaaatctctgtgatcaccatcttcggccctgtcaacaacagcaccatgaaaatcgaccactttcagctagataatgagaagcccatgcgagtggtggatgatgaagacttggtagaccagcgtctcatcagcgagctgaggaaagagtacggaatgacctacaatgacttcttcatggtgctaacagatgtggatctgagagtcaagcaatactatgaggtaccaataacaatgaagtctgtgtttgatctgatcgatactttccagtcccgaatcaaagatatggagaagcagaagaaggagggcattgtttgcaaagaggacaaaaagcagtccctggagaacttcctatccaggttccggtggaggaggaggttgctggtgatctctgctcctaacgatgaagactgggcctattcacagcagctctctgccctcagtggtcaggcgtgcaattttggtctgcgccacataaccattctgaagcttttaggcgttggagaggaagttgggggagtgttagaactgttcccaattaatgggagctctgttgttgagcgagaagacgtaccagcccatttggtgaaagacattcgtaactattttcaagtgagcccggagtacttctccatgcttctagtcggaaaagacggaaatgtcaaatcctggtatccttccccaatgtggtccatggtgattgtgtacgatttaattgattcgatgcaacttcggagacaggaaatggcgattcagcagtcactggggatgcgctgcccagaagatgagtatgcaggctatggttaccatagttaccaccaaggataccaggatggttaccaggatgactaccgtcatcatgagagttatcaccatggatacccttactgagcagaaatatgtaaccttagactcagccagtttcctctgcagctgctaaaactacatgtggccagctccattcttccacactgcgtactacatttcctgcctttttctttcagtgtttttctaagactaaataaatagcaaactttcacctattcatgag

SEQ ID NO: 11929 - DNA, 627 bp, Homo sapiens
  misc_feature (1)...(627): n = a,t,c or g
cccacgcgtccggggctctggagaacctggttcttgcttactgttctccctttgggccctccttcccaaacgcaaacaatccaggatccactcagcgtcaggcccaatggaaatagtgaagcagtgattttccctcccctgcctctccatagcctggtcttttgccctctcctttgctcttctcttcccccatagccacctcaaatacctgcagcctgatatcttcatcccttcatccagaccttttctctcctagtggtattgcaaactgaaagtggacaaagacttaaggtaaacctgctcctcatggtggaatgcttccaaatgctggaaggaggactttagggcagagtttcactaaggaggcttgtgcttatagatcagtgggcctgaaaggaagtttctctaggttctggttgtgtgctgtacgaagtgtaggtagtaataatactcttgtcagccacagtgaagccccaagctaggccgggataggggactgaccttgtacaggcagcatggagaaactaagacagagtgtcctgcccaagtgatgggcactggggagcagtcactcaggtttattttccaccagggcccaagaaaaaaaggaantgagggcaacctaaa

SEQ ID NO: 11930 - DNA, 473 bp, Homo sapiens
caggattacatattttagtattagaaaagtttttcatttgaaataagggaaaacagccatgctgaattgagtttttggattctagccaaattaactgccttcctcttaacaaaacaattttctttttgggaagctgggcacaaataagtgtaagggcattctgcatcatattcttaaattatgatgtgtttctaatgggctgggctctctatctgactcagcacagaccacttttataagtatgctgctacattataataaatcacaaggaatcagattaaaacctagcaaagtctgaacaatgggttcaaaaatgatactgaaaggttttatagcaccaatgactttttcctaagacacttgaggggcctgtatcattttaaagtatgatttatcttgtaaacaagaccaaaaatattcagttgatctgtattttgagcataaatatttataaactgtcgacgcggccgcga

SEQ ID NO: 11931 - DNA, 923 bp, Homo sapiens
gacagcggcttccgtgttggcctctcagaaaacatccagtacagacctttctgatatccctgctctccctgcaaatcctattcctgttatcaagaattcaataaaactgagattgaatcggtaaaaacaacctcaggggtccataaacaatatctgccaactcaacctgttgtcttcaaatgctaaaaaaggagaatggagggtacaagactagacatgactgaaatggatttgggttttttggtgacctcccttactgggctaatcagcacttgatcggaagtccaggttagtatgtgaagccaggagtactattattattgtgttagcaacagttgcattaactatttcaaaaattactgcctttaaaaaaaacaacctcaagctatatttgtattcataattgacatctggattgggtttatgtttgatgcattgtttggaaaatttgcaatacaaactggcataagaattacttattctgatgatgcacttttatgtatttttcattagaaagtagaactaattttagattttcagcttgatggattttcagtttttcctgaagaattttctttaccattagtcttcaaattggatactgttgtgcagtggtgtactgttatacttcagagaaagggtaagagtacatctagttcagttcctatgaggtagctgtaacccttaaaaatgaaacgtcaactctagggtacatttgacattgaaagaatagttaggaaataacttggttttgatagggtcatgattaagaaatgatatattggttttatttatggaattgttttatagtgcatacaaatcagcgatcagccagcaaatatttttctttgagcttgtgaaagctctgtgttcttttgccttcaatctgttgtcttcaaaacaaacaaacaaaaaaagcttct

SEQ ID NO: 11932 - DNA, 1199 bp, Homo sapiens
tttatttcttgaagtacttttttaatccaattaagctgataataatcacttcgaattttaatacaatacaatcatgttcccaaatttcctaggctcataacaatacagtctcaatacaaaagacgtaataatctatttttattcattttaaatcaaagagaccattccatttcctaacaaacaggtaagttacaaaagtagtccattttacttttcatcagtctttccctgttttgaacaagtttttttgagaattcttagttttagtttttgtttagcttacacactgaaaattttgagaagcatctaaaaaaatccacaattagtgcaaaaagaggggacaatactttaagtcattccttctataaaaagaattaaggttactaaatgcccaatttttaagccaaatatatagtttccctatttgccttctgaaagacagcagatataaaaatagttcaatattaggtttaacaaggtttgaacaacacatgtactatcagctttattttacctgcaaaaatattttagctacacttggaaaaaaataaacttgagaatataacttcacatttctaaggccagatgcaagaatacttattcttttccttttaaatagaagacatgccataaaatttatgaaagttaatttgtaggaatgaatacatttaaaaaatactggttaatctgtgaggaattccacatttgcctatttaacaaaatttcatccatttcataaggctttggtataagtgattcccagcacttcatcatttatctttcttctttgcctcctttacttccttcgtctgctcatccttctcccctctcacgttgacatttgctgctccttcttgattttccctctgagaattatcaactatctgatagtcctcaaggagagtgtgtcctgtttgtgttgcagttttcttcaccattgctttgataccaatgttgttaatattgtaggcagttacgccaacattgaccgcagaatccaccgcatggtgggtagcttctcctgcattatatccgtatctggtttttatttaaattccatgaatttgtatctgacagtttgtacagtttctgctgaaacattgttaacgatgcatttagctgcacattccaatccttgccagacagttgaaaatccttgaacactacttgctgctacaaccatagcaccatccagagta

SEQ ID NO: 11933 - DNA, 375 bp, Homo sapiens
gaagaaccccacccccatgccactattagaggcagccacggaggacggaaagtgcctttggtttctccggacagcagtaggccaagctcggtttctgaggcacactgggaggtctcgcggaattgagagatccactctggaggaaccaaaccttcagcctctccagagaaggaggagtgtgcccgtgttgagactagctcgcccaacagagccgccagcccgctcggacatcaatggggccgccgtgagacctgagcaaagaccagcagccagggggtctccgcgtgagatgatcagagatgaggggtcctcagctcggtcaagaatgttgcgtttcccttcggggtccagctctcccaacatccttgccagctt

SEQ ID NO: 11934 - DNA, 612 bp, Homo sapiens
tttttttttttttgcaggaaaagagctgggaaagcacttgtctcctttattgaacatctgcagggggcacctctgcactgaccaggcagccagagaagcaagcaggcaggtggtggggggcaggggagcatggggcaggaagacgcccaccctcatttccagtccttgaaaaattgcttgaagatgggactctcacggccctgaggcagaatctccacctgagtgttcggggcgtactgcatgcgcgagatgaagccctcggccacctgcagggctgcctgccgctccttctcattcgcttttcgccccttccagatatagatcttgccacagagcccgttgtccagcacaaagcagtcatcagatatcagcagttcaagggcaaatgggctggagtcagccaccttggtcaggttcatctgtccagtggcatcagagaccttatacagagctgcggcctgggcatttgccttgtcagctgtgaggtcttcctcagggttgccctccttcagagcaggcttggggcccaggacctggatcatctcagcagggctcctccccatcagtgccaatcacagctgagacctagcttgtgcgtttactgttctgtat

SEQ ID NO: 11935 - DNA, 364 bp, Homo sapiens
ctggggtgcctgttgtgggtgtgagtgtgtacaagagcgattgaagccaaatctgttgtcatgttagtaaatgatttgaaaactgaatgtaatacttgagtagatttttttttctagtttgaaatttagtctgtctttttgaccttactaatatttcatttaacaagttgtaaaactctgattgtacttagagatgtgactaccaatcagtttgatactcaaggaaagggggttattcaagaaattgaaaatttcatcttggacctcagtgcatcggtcaaatggatttcagaggtttaaacttccctgtgaattccccctgaatacccccaaaatgaggaaacaaaattttttttcttactcc

SEQ ID NO: 11936 - DNA, 3568 bp, Homo sapiens
  misc_feature (1)...(3568): n = a,t,c or g
gtttgccgcgcgagcagccggcctctcgcaggagccgagggacccgcgcggctgcggcccaggagcggcggccgcggagcccggagacccgcagccgcggcggcggcggcggcggcggcagcagctagagcagcgcctcccgccgccgcccgggaggagctcgccgcgcccgctcgccgcctcgtctcccagcggcggcgggaggcgcgtctccccggcccagtccgcgcccggccccgcgggaccgctccggcccgctccgaggaaaaactgcatagaaaatctaatggatgaagatgagaaagacagagccaagagagcttctcgaaacaagtctgagaagaagcgtcgggaccagttcaatgttctcatcaaagagctcagttccatgctccctggcaacacgcggaaaatggacaaaaccaccgtgttggaaaaggtcatcggatttttgcagaaacacaatgaagtctcagcgcaaacggaaatctgtgacattcagcaagactggaagccttcattcctcagtaatgaagaattcacccagctgatgttggaggcattagatggcttcattatcgcagtgacaacagacggcagcatcatctatgtctctgacagtatcacgcctctccttgggcatttaccgtcggatgtcatggatcagaatttgttaaatttcctcccagaacaagaacattcagaagtttataaaatcctttcttcccatatgcttgtgacggattccccctccccagaatacttaaaatctgacagcgatttagagttttattgccatcttctcagaggcagcttgaacccaaaggaatttccaacttatgaatacataaaatttgtaggaaattttcgctcttacaacaatgtgcctagcccctcctgtaatggttttgacaacaccctttcaagaccttgccgggtaccactaggaaaggaggtttgcttcattgccaccgttcgtctggcaacaccacaattcttaaaggaaatgtgcatagttgacgaacctttagaggaattcacttcaaggcatagcttggaatggaaatttttatttctggatcacagagcacctccaatcataggatacctgccttttgaagtgctgggaacctcaggctatgactactaccacattgatgacctggagctcctggccaggtgtcaccagcacctgatgcagtttggcacagggaagtcgtgttgctaccggtttctgaccaaaggtcagcagtggatctggctgcagactcactactacatcacctaccatcagtggaactccaagcccgagttcatcgtgtgcacacactcggtggtcagttacgcagatgtccgggtggaaaggaggcaggagctggctctggaagacccgccatccgaggccctccactcctcagcactaaaggacaagggctcaagcctggaacctcggcagcactttaacgcactcgacgtgggtgcctcgggccttaataccagtcattcgccatcggcgtcctcaagaagttcccacaaatcctcgcacacagccatgtcagaacccacctccactcccaccaagctgatggcagaggccagcaccccggctttgccaagatcagccaccctgccccaagagttacctgtccccgggctcagccagggcagccaccatgccggcccctctgccttccccattgtcctgcgacctcacacagcagctcctgcctcagaccgttctgcagagcacggcccggctcccatgggcacagttttcggcacagttcagcatgttccagaccatcaaagaccagctagagcagcggacgcggatcctgcaggccaatatccggtggcaacaggaagagctccacaagatccaggagcagctctgccctggtccaggactccaacgtccagatgttcctgcagcagccagctgtatccctgagcttcagcagcacccagcgacctgaggctcagcagcagctacagcaaaggtcagctgcagtgactcagccccagctcggggcgggcccccaacttccagggcagatctcctctgcccaggtcacaagccagcacctgctcagagaatcaagtgtgatatcaacccaaggtccaaagccaatgagaagctcacagctaatgcagagcagcggccgctctggaagcagcctagtgtccccgttcagcagcgccacagctgcgctacccgccaagtctgaatctgaccacacctgcttccacctcccaggatgccagccagtgccagcccagcccagacttcagccatgatcggcagctcaggctgttgctgagccagcccatccagcccatgatgcccgggtcctgtgacgcaaggcagccctcggaagtcagcaggacgggacggcaagtcaagtacgcccagagccagaccgtgtttcaaaatccagacgcacaccccgccaacagcagcagcgccccgatgcccgtcctgctgatggggcaggcggtgctccaccccagcttccctgcctcccaaccatcgcccctgcagcctgcacaggcccggcagcagccaccgcagcactacctgcaggttcttgggcacactctatagccatactggacaggaaccaggtgccccgtgtaggcatcgtcggtcggtttgccgtcagagatggcgcatctcgctgcatcccccgagagtacaccggttgctctagccacctgcggcccgcccatctgcgctagctggccttcacgctcttgatcgtctttcctttgtattggagaaggactgggtcagagatctgttggagagagagaataaagagattatttttcattatttttaaatggttgtttttgttttaatttgcacagctacacagaggaaataacttaggcactttctgttttttttaaaaaaataataaggtctcatggcttcatttagagaccacagtaacaacagcagcccaccaatcagagaagctggttgttattaaccaagctacagattcacactttctggcctaaaccctaatgggatgaggcttttcaccccaggccatgctggttggtgattttttagcccctaaataaaacactggactatttcctgtttacttccattgattgcaactaccaaaggtggactcaaagcaaagcacaatcatgccagccaacattccagaattctgctgagaactcccaagtctgtgaggggagaggttttacaagccagacaggccgtggggaccgncagtcccccaaggagaccctgccacatgctggccctttgagtgagaatgctgcatctttctacatatcttcatgagaatactgagaattggattttccttttcaaaatgcactttgctttttttgtatgttttgttatgttgagatgtttctaaagaaaagattttatgtaattataagatgaagcgtagtgaattgtacagctgttgtaataatgacctatttctatataaaataaaattgtatggcttatgtgtaaattattttgtatctgagataccagttccttttcccaaatataaaagtataaaagtta

SEQ ID NO: 11937 - DNA, 542 bp, Homo sapiens
gcgttgggtttcgcggcgctcgccgcactggttgttcagcaccttcggtccggttgaggttgtcaagtcggaccaaacaggttgtttctctgcagtttccaacatggcagggaggtttaatagacatggataagaagtccactcacagaaatcctgaagatgccagggctggcaaatatgaaggtaaacacaaacgaaagaaaagaagaaagcaaaaccaaaaccagcaccgatcccgacatagatcagtgacgtctttttcttcagatgatcctatgtttccttcttcctcatcatcgtcttcaggaagccagacagattcaagtattgaaggtatgtttatcatcctgttaaggtttcatatttataagttaggtgatttagaaaaaaaatactaaacatgttataatttttgtttattcaactaatatttattgagcatactcactatgtaccagacataatggtaaacatgccatggtcccttcagacaaggaacttttattatattaagcaatattaggaatgatagaggagttaaa

SEQ ID NO: 11938 - DNA, 598 bp, Homo sapiens
tccattcaagagcaatctttgctaaggagtaagtgaatgtgaagagtaccaactacaacaattctacagataattagtggattgtgttgtttgttgagagtgaaggtttcttggcatctggtgcctgattaaggcttgagtattaagttctcagcatatctctctattgtcttgacttgagtttgctgcattttctatgtgcctgttcgtgacttggagaacttaaagtaatcgagctatgccaacttggggtggtaacagagtacttcccaccacagtgttgaaagggagagcaaagtcttatggataaaccctcctttcttttggggacacatggctctcacttgagaagctcacctgtgctgaatgtccacatggtcactaaacatgttatccttaaaccccccgtatgcctgagttgaaagggctctctcttattaggttttcatgggaacatgaggcagcaaatctattgctaagactttaccaggctcaaatcatctgaggctgatagatatttgacttggtaagacttaagtaaggctctggctcccaggggcataagcaacagtttcttgaatgtgccatctgagaaggg

SEQ ID NO: 11939 - DNA, 1127 bp, Homo sapiens
ctttgtaacaacattcagatgtttaatttttttcaaaacttaactatactaatgaaaataaattatatgtagaccaccttcaatatttttacatcatctttatacgactgtaacagtgctttcaaaagacattttgtgaaggacattaatttcacatttaaaacgtgtttcaaaaataagggaacattaaagaacatcaaattagtctgaaatatatctcacaatgctgagaggcatactcttctttatcaaattaactgtatgtgtactcaagataacatggcttttaactaatgacatttcttgtccatttcagtaatttcttggatccaaaacaaaatctgtgtatttatttctttgaaaacatcatttgtcgaccgtcctttcactgccatggaatgatttgccttctcaatccagtggattttatggggagcttgcattttctgtgccactttctccaacaagttctttttcacacatttcatctgctgagcctgacacaaacagtacaggctcttttaaacgaaagaggtcttcatctctgagtttatgctgctgctttggatggtgcagtgggtaagaaatacaaatgagaccccgaacaaaatcatcaccatcatctggctcaatgtgacacattacagaagcagctgctcttgagcccattgaacgacctccaagaaaaacacctgcaagtttgtattctcctgatgtcttcaggtaattcaaaactgatttatacgccttaattctatgtacaatattaaggcctttacaggtaaatctcaggcagaaaaacccatgagatgcaagatgggatgccagtgacatcaaatgaggaagattcatatctcctgatgctccatgtgtaagaattattccatatgttaagctcttgttaggtaccaaacaaacagcatctagtaatttatttccaaaaggtatttttaatttaacctctgtatgactcattttcactgttgaataacaaacttaaagtgcatttacatctgagaagcaaaggacatctccccgggaaggcaaaagtggccgcgggcacccaaccgccgtcactcccttcagggagctgactagcgcgctcgaagcgaccgcctcgcctgccc

SEQ ID NO: 11940 - DNA, 799 bp, Homo sapiens
tttttttttttttttttttcacatacatagatcaatagtttatttatccacattatcttttaatccttaattcatacacataaatactgtggtactgtggatgtaatatcagtgcagattattaattacctggctttttaaagttattatataacattttcagattttattaatctcacttttaatgactaaatgagtgaacaaacaatatcaagtgaatgggaaatcttttttccaaatgatgttaataactcctcactcattttcttatttattcattatgtgctgggcagtctcctcagttgtcctttggttttgggaatgtcctcactcaatacttccctttcacattcagtcctgattcacaagcaggcctgtgcatgttatattgcagggtcaagctgaaaaggcaaggtttcttcaactggcttgagagctatgaggtaggctgtttcttctttcgctttgtcctattgtgggttctctggtgcccaataaggtgtgagctctgggtgaaggcctttccacatttgttgcatgcatatgggcgctccccggtgtgagtcctctgatgtctgatgaggtgggagctctggcggaaggcttttccacagtcctgacacttgtagggcttagcgccagtgtgagtcctcaggtgctgggagatggctgagcgatcattgaaggtcctcccacactcctgacattcaaatggtctctctccagaatgaactctctgatgctgtgtgagggaagagctctgaacaaatcctttcccacagtcttgacacacataggg

SEQ ID NO: 11941 - DNA, 339 bp, Homo sapiens
  misc_feature (1)...(339): n = a,t,c or g
catgcttccattttttttagttttaaaccaccaaaccaatattttncctttaaattttaatcttataatatagaaatcttatgtaaatgaaattttgtcatgtttcaaataaagagaactgaagtagaaaatagaaatgccagtaaacaacataatgtttaatttacaacttacattaggggtttgggggaatgctaattatatattgagaatatacattagaactcttcaaaatgggctcttctaatgaggtcactactgaacataattgttccctcttctgttaaatagaataggtttaaatgactagtccaaatggaattattgccttctngttaa

SEQ ID NO: 11942 - DNA, 684 bp, Homo sapiens
tttttttttttttaaaatatacatcatccaatttattttctttatccagaagaaatctgttaacattttcccaaaataacaattcaagtaaaaaattcctaccaacgagatgatgttgccaccatttttacacaagcacactcacggcttgagacatcctcatctagcattaaacctgtaagttacagctactaaataatgttaagctattatgatgcatacagaatagagtaccccaacccagctcttaatgaatgctgggtttacctgcaggtagggggttggctgagattaaaaggagaaacatagtaaaggagatactaaattgattcaaatacttcatttctaaactctacaaaaaaggcctgagaatagcttgagacacatcagacttatcaaaagtcttccagcaatgatgcttttagagaaacatggcataaatgatcctttcagtctcaatccctggagtacaggcctagggattatggaactggtttaagcatggagaatgcttaaagaatgagcctggtcaacaggaaatgtacatcagtgtgcaaaagtgacaatattaatacgacagctaacatttgagcagtaattctgtgccaggcactatgctgagggccttacatgcattattttattatccaaccctttaagatgagtgccactgttgccccagtc

SEQ ID NO: 11943 - DNA, 1207 bp, Homo sapiens
ctcgctgtctccatctctctcatttttgtgtcacctaatatgttggtacagataagagttagtcacatttttctgactgcatcaaacttttatttgaaatggtactggatcttagtttctgtgcagaatattctgtgattttgggaaatgtaagtgagtccacttgcttctggaccaattctgtttcatgtatgttagcatcctagaaacacctagcaatggacctagttcacagtaataggtgcaaagaaagaccaaatggactttgcagtattaaccctttgcagtcgtcatacttagctgctgcctgtaatgctaaaatgattttaatggttgtctggaggcaaagggctgttttttagtatattgccactaaaggacatttatttatatcaaacttttatttttagatattataagcatacagtacataattgatgaaattgatatttactagagatttatggtagagaatggacgacattcaataactggagcccgagattgtcactttatttaaaaagacaaataatcatctgacaagacagcactgttgccattataaggagaaatagattacaatccttatcatgtacacgttagctatgttccgtatggccacaggactttcctgaaaccgtatctgtctgcttgaagtagacttatgtttgttgagaatgaacaggcttatttgagcctccagggtggcagttcataaagacagctaagttctgaaggaaaaaaaaaatatatctttttaagtggctagagtcattattacaatcttatactgtgaaagtccaagaaatcaggcaacattgtttcctgggtcttttcagagatcttatagatttatgaagtgtttttaatccatgaagaaacactaaagtgcctttctttcttcaaagcaatattatttccaagtatattaatttgttagaaaactttcccataggaaatgttgtcaagttacctgtactgtaaagagttatttatgttcagtagtcaagattttctacatggacataaatcactctcacgtgctctcagcagaaggcattagataagcatatacaagaattgggtacttttatacaaatatgggataagaaatacttgcctgacacttttccatggctgagtctgaccattacagtaagaacaagaattgaagaggcattttgcacacagaaacattctcacttta

SEQ ID NO: 11944 - DNA, 745 bp, Homo sapiens
tttttttttttctggcattaaactcttatttatttagtatttgaaacatggtgtacatgtatgtatttgtataaacatttgttacatctaaaatccacaacaggtaaacaatctgtgctttcttttgtgtacaagtttggggtttacatctggatattttggtgttgtggagactcagtctgtgaagctaatcagattgcctcatattaccataataactgtgacagaagtgatttgctccttaaaggggctgttccttgcccagaaaaggtgtcacacttttgaactaataaaccgggtgtcacggaatcaagagaaacacagctgacacgatggagaaggtatgtgcaggggactcctggagggggacgaggttttcagcacagccttcatgttctcgtgctcagccgcgtcctccgcatagctcagaccctgcggctggcttgggggcgccggagaactgccggagaacttgccagaatcggtgatcatcttccctctggtcttatttctctctctgtggttggcccgtttctgtttctgctgcaaaaccctttccctggttgtgcgatactctagtgcaaattcactaataatcctgcagaatttgtttatgttcacttcccgaattgcataaggtggatggcccataaagagtaaaaaggagtggaatctgttgattatccttctatggacaatctttaaaattataattcgctctgcacagtctttcaggaactctgac

SEQ ID NO: 11945 - DNA, 693 bp, Homo sapiens
  misc_feature (1)...(693): n = a,t,c or g
gcgaccgcgggcatctaaaggatcccatcttgcacgtgctgcggcagtaccttgatccggcccagcgtgngtccgcgtcctcgaggtggcctcgggtccggccagcacgcagcgcacttcgcngngccttccccctggccgagtggagccgtcggacgtggaccagcgctgcctggacagcatcgcgnccaccacgcaagcccagggcctgaccaacgtgaaggccccgctacacctggacgtgacgtggggctgggagcactggggcgggatcctgccacagtcgctggacctgttgctctgcatcaacatggcccatgtcagccccctgcgctgcacggaggggctcttcagagcagcaggacacctgctcaaacccagggccctgctcatcacctacggggaacccagaatgggggcttcgggacacagccctcctggaggacctgggaaaggccagtggcctgctcctggagaggatggtggacatgccagccaacaacaaatgcctgatcttccggaaaaactaagcccctccttcacccccgcacacctgcatccctgccggaggctctgtgaggcacgaaccctgcctccctaggccggaccttgtggacgacagccccacccagtctgtgctcntcancgctgccgaaggcccagcctgctcagaataaagcatgtcctgctgcc

SEQ ID NO: 11946 - DNA, 600 bp, Homo sapiens
ctcctccttccctcccatcgtcctcctccacctgcgcctcccttgtctgaacttcccaacgccttcctattcctttccaactccttttcccccaaatttcactttccttctcaggtctcacctcagccccccccttctccctgatttctcggcctctctctctgtgtgaaggggcctctccctaatgtctcctccttcccccctcttctctctcctgcggcccagcctccctctccctcctccattcctctctccctgcccttttcctgcctgaagagcagaggtgaggacctggggacccctgaggggcaggccaggaggagctcgggcgcaggccaggcccccttggtgaagcagaggctgaaggaaaggggtctgggtcttgtccctaggaattctcctccctcaggagattgggggttgggggaggcagcgggtgatggctctgaagctgaacccagggcctggctgtggtcttcttggtcttgctgccccctgtgacccaaaggcatgggatggacagagatgcctgcccccgtgaagctggttggggagggcagttcaccagcatccatagagtaataaagtcactgtgtgtag

SEQ ID NO: 11947 - DNA, 1068 bp, Homo sapiens
tcttttactatttcaaaaaatggccgattagctttgttaaatgtagcaactcagggagttcatttatgggacttgcaagacagagttttagtaagaaagtatcaaggtgttacacaagggttttatacaattcattcatgttttggaggccataatgaagacttcatcgctagtggcagtgaagatcacaaggtttacatctggcacaaacgtagtgtactgccaattgcggacgtgacagggcacacacgtacagtaaactgtgtgagctggaacccacagattccatccatgatggccagcgcctcagatgatggcactgttagaatatggggaccagcaccttttatagaccaccagaatattgaagaggaatgcagtagcatggatagttgatggtgaatttgggagcagacgacttctgtttaacttaaaattagtcgtattttaatggcttgggatttggtgcaaacaaacatgattgatagctggacagacatgctcgtcatgaaaaaagaaccatttctgaagcccgattggggccaaacatttacaccttgcttcatagtaaccagttgagatgaagcacgtcgttagaacgttgttggacaccatgttgaattattcccccatcggttgtgaagaactgtgctacattcaggcttacccattgaactcagtatatatatttttttccttcctgtcttttgtctggcaggataccattcttgttgctcttctgtgtaatgaagtttaaatgcttgtttggaaaactttatttaacagtttagaaggcttgatagaaagagtgcattagtctgaagagtatacattggataggaaagaatttccttcttttgtttctccaaatctttccgccttatttagcttgagatctttgcagcttggttcatggattctagccttgcccgttgcgcagtatatactggatccagatgataaacccagtgaactatgtcaaaagcactctcaaatattacattttggacaaaaagttttgtacttttcacatagcttgttgccccgtaaaaaggggtaacagcacaa

SEQ ID NO: 11948 - DNA, 347 bp, Homo sapiens
gtttcaggaaagccatgttgactttaaaatatcaaaaaagaaagttcagttatgattgcagggggtaatgatagtttgatccacaaactatttgcagtgtaaaagtgaaataccttagctgacttagttcatttttgaaagttttgaatagctaaaacaaagttggcaaataggctcatagagtatttacagagtaagactaaattcatatttgatgcagattcctctttacctcccattctgggaggatttagttttactgtttggtgtttaggataatgattgttctgtttttctcaccctactatgtgaatatatattctgctagagatgggctgttatctgca

SEQ ID NO: 11949 - DNA, 279 bp, Homo sapiens
cgtcgacccgggccatcatggtcctgcagtgccgcgaatcaccacagacggttacaggcagggaggacgggagccggtggacagcaggagccgctgcagccgaaacggtgcggtgtgtgtgtaatcactgatcgcagggtgaagctcaaggtctggattctgttatggaaatgaaacaaaattgttttcttcctgagtttttataaaaatcactgctttgaaaattatcccgtcagaaagagaataaacggcatttaatcataccaaaaaaaaaaaaaa

SEQ ID NO: 11950 - DNA, 585 bp, Homo sapiens
tgtagtgtggcgatcgtggctgtagctggagcagcaaatggcacgtaactggccccgtagatcccggcagtaggaattctctgaacgtttggagccaccgtgtatactggagttattgggcggccctggaaaggtggtggcgtcgacacagtgggaatgacagcggctgcggcggctgctttcctttcccttcatgatatcggctatatataccacggccagcagaatatcccccgaggtaggaacccctaggccctggggctctgttgccagctgcacctcgccctcggcctcttatgctgcctgctttcacaaagtagtccctgttgggcccaatgagcgcgttgtaggggtagccgtagtaggccagtgtgtaggggtcgcaggagtacacgtagctgggctgctgcgctgcctcagccgcgccgccgcccctggctgccttctggtagcgcgagtactgctccttgtccacgggcttggccagcgtgacctccaggcacgagccctccagctcagtgccgttgaggttgttcatggcatgcacggcatcctcgcggctggtgaagtgcacgaaggcgtagt

SEQ ID NO: 11951 - DNA, 261 bp, Homo sapiens
aggcccatgggaagagttacggattgtacatgggaagaatccataaggagtattgccttgctcaagaatttaatccgctgacagtatgcttcttccagtttgccttacttcctctgcaagtttctttgctccttagggcagaggttttattgaatagattaaatgaggtcagtaagattagttaaaaatagtcattccttgtgggtgttggacacagcttgaaaggagtgtttaaaaaaaaaaagctagggaggaaaagac

SEQ ID NO: 11952 - DNA, 187 bp, Homo sapiens
gcaaaaataaaatagagtaaaaaaacaaaagtaacaaattgggatgtcataaaaaaatgacagagcagggaactccaaaggtccattctgccactaaagtgaggaaaaaactggtaaaaatgtcagaatcaacctttttggaactctggaaactaaccaaagtttgcaacaacagagaatgctaatt

SEQ ID NO: 11953 - DNA, 108 bp, Homo sapiens
gttatagaaactgtcagattttattagtcagtacacaactgagtggtataatatattctttaaattttttaaaatttatttttatttagagatggggtcttgccctga

SEQ ID NO: 11954 - DNA, 178 bp, Homo sapiens
ccagcctgggcaatgagtgaaactctgtctcaaataaaaaaataaaaataaaaactatttgttgactttttttttcatttagttttggaaaagactatttgcaaaagtacagagttatcttcagcaattacttcacaacttagattggtaccaagagtgacaggagatcttgtcttgg

SEQ ID NO: 11955 - DNA, 468 bp, Homo sapiens
ttttttttttgggttttgtgctttattaaatatggtacagttgatcctcattattcaaggttatgtatttgtgaatttaccaacttgctaaaatttataaccctcaaattgatatccgtggcacttttgcagtcatttgtggatatgtgtaaatgggtgaaaaatttgagtcacccagtacacatgttcccagctgaggctgaacaagatgatgctctgccttcctgcttcagtctcatagagaaatgactggagggtggaaatggcaggggcaattctgtgtagtacaagaagctctggctccggggccagctggatggggtttgaatttcagctctgacacctgttaggggggtgcctcaggatagtcacttaacacttctgatacctcactttcacttctgtaaaataaggtagaatttgctaggatgaattaagaattcaagctcataatgtgtgtgagataaa

SEQ ID NO: 11956 - DNA, 364 bp, Homo sapiens
gggacatagttaatgtgaagatcacagaagcaccatctttggtgttttctaaccattgggtcttcacattatggataatgatcaaacactccagcctcttgttgtatcagagcctacacagaaggaactcaaagtctgagacctcctgctcttgcttatctttttccctacttaggcataggactgcaatactcttctttgatgtgggaagggataaacagatgcttggagaccaatgcaatccttcgtaaatgtctatgatgctataaactggcgacaggatccaaacctttgttgtttttatggtagtggagggagatgtgtttacaactcttattgcatttctcttacccggtattgtgca

SEQ ID NO: 11957 - DNA, 1041 bp, Homo sapiens
ggcacgagtttatgctgggccccgtctgtctgcctcggcctccagcaaggagctcctcatgaagctgcggcggaaaacaggctactcctttgtaaattgcaagaaagctctggagacttgtggcggggacctcaaacaggcagagatctggctccacaaggaggcccagaaggagggctggagcaaagctgccaagctccaagggaggaagaccaaagaaggcctgattgggctgttgcaggaaggaaacacaactgtattagtagaggtaaactgtgagacagattttgtttctagaaatttaaaatttcaactgttggtccagcaagtagcccttggaaccatgatgcattgtcagaccctaaaggatcaaccctctgcatacagtaaaggtttcttgaattcctctgagctttctggacttccagctgggcctgacagagaaggctcactcaaggatcagttggctttagcaattggaaaactgggagaaaacatgattcttaaacgagctgcatgggtgaaggtgccatctgggttctacgttggctcttatgtccacggagcaatgcagagtccctcacttcacaagctggtgctggggaagtatggggccctggtcatctgtgagaccgtctgaacagaaaacaaaccttgaagacgttggccgccgccttgggcagcatgtggtgggcatggcccccctctctgttggctccctggacgatgagcctgggggagaggcagagactaagatgctgtcccagccgtatttgctggatccctccattaccttggggcagtatgtgcagcctcagggggtgtcggtagtagactttgtgcggtttgaatgtggagaaggtgaagaggcagcagaaactgaataggttccagagacttttggcccaggaggaatatttacttttagctctggacatcattacaaaaaggaatatttcccaaacctcttcagaccgagaatgcatgggtaaaattattaaatagttgtataataaaaataattttttccttgtttgcgta

SEQ ID NO: 11958 - DNA, 241 bp, Homo sapiens
tcctgtttgtttgcaaatatgatataagccaaagctcatgctatttagagaagttatttgatctttacataaagaaaacgttctttaaatgggataaattaattttatgtcctttcacacattttaacaatgataaccttcttataaataaaagatttgagaattataatacatctaaatttgttttcattttagcagtctccatggaaggttttcagctggggtactacatcaatacata

SEQ ID NO: 11959 - DNA, 476 bp, Homo sapiens
  misc_feature (1)...(476): n = a,t,c or g
gcattattataaactcttactgctgcgttattatatttggaatatcttgcatttttaaatctatagtctatatcgagggactacaggatccatgtataatattgttagacgaactatcctccatctatgacctttgttctaatggtatgttttcagagaagagttttttaggatgtccagctacttggctgtttcacaaggtccccacagttaagaaatctcaagtatgtaattgtgatgggtctacgtgtgatctgtggcaaaaccatctagaccacctgaaccacatgccgtgtaggtttgtgctaaccagtagctcttgagggcaagcgatagggacagaagaagctctgcctcaggcgagtttaaggaaagggagaatggcactcctaactaaagtttctttgtatgcttgtggcgtatttttgcaggtttaggaatctttaaaacccngctttcttggatacaaacagggg

SEQ ID NO: 11960 - DNA, 987 bp, Homo sapiens
  misc_feature (1)...(987): n = a,t,c or g
ggggaagatgacactcagcctggaccttgtgctaattcgccactctgtggccacaccacgatattgagatgacttttgtggggcctggggtgtttcattcagcctggtggatatggaggcaaataaggtcaccttgtgagagtcactaggcccgagattgacggccaatgggtctaggctttgaatggagttaggaggacagaaganagtcataatttctgaagataacaattgcagcacagaagtggaatagggccatgaatacctgaaaacactaacgttcttttttcctgtggatttatgcatggagggcttcgtataatgacttggtactaccactgctattaggaaccattggaattctgtgataattttggattgctttttaattcaccaagactactgtggatgatgtcagccacattatggtgtgagccctaaatttaaggtcaatatcatgtgctaccttcatatctggtgatactagtattacctcaaatggtctgagtacaaatcccccttcccactctgctcttttgtataatgtgtcctagcctaactacccttttaatcaagaggactaagcagagttcctgtttattatttatttgtagcaagtttgaatttcatttctacacacagagttaattcaaacaagccagttacagctgggtgtgggtgtcgcacacctatggtccccagcccnnnnnnnnnnnnnnnnnnnnnnnnnnnnnnnnnnnnnnnnnnnnnnnnnnnnnnnnnnnnnnnnnnnnnnnnnnnnnnnnnnnnnnnnnnnnnnnnnnnnnnnnnnnnnnnnnnnnnnnnnnncaagccagttgcatcctttcaagggaatcaggggctatcacaccttcttgattcagaaaagcttacataccacagtccctggttgctctctcttatgcatagtgcaacccccatgtggctatctgtggtgagtggtgtcctctntttnacgagttgtga

SEQ ID NO: 11961 - DNA, 461 bp, Homo sapiens
  misc_feature (1)...(461): n = a,t,c or g
ggatagatttagcatgcagaacaggctatgttttgtgtttttcttaaccttcaaagtgtttgttattttgattagtgtttatacattcagacagattagtgaggcaataaataggagtaaatgctaaaggacagctaatcaagtgagtgagaagcaaatagccacttactatagactacggttataattcaaaagcatgtgaagcattatcattttgatgtagtgtttttagaccaaacgttgtaactagaacaaacaaatagttacacactagcacactgggaggatatgggtcattaaggaccaaaggttttctaattagggacggtaatctttcttcagagggccacaggcagttttttagtgcccctttattggaaaatgtagtgccacctttttaaaaagtccaggcnccaaaccttttntttgtaccggggtcntagggtccgaggancccgaag

SEQ ID NO: 11962 - DNA, 414 bp, Homo sapiens
gctcacacccagacatggatggagacggggtgagggtcctgtggtgtcagtgctgttgggcagcagggattgctcaggggccgcatctggatgcactgtcagcgctgtgtaaaccatgataacagaagctgcccatgaagtcaggtgcacacgtacctgctcactggcatagaaaagaacactaaggggaaagctttcctgcctcattggtaactgcatttgaagccgaacaagtgagtcattgggtttccgactccaaactcgtaaagactgggaacagaatggaaagtttagacactgacattggagatagatgattctttcattccatcatccattttaatgtatgacgtcaacataaatgtgtaacaagattcattaaactagtctcagaagctctaaaaaaaaaaaaaa

SEQ ID NO: 11963 - DNA, 464 bp, Homo sapiens
tttaaattaaagttttatacgtatagttttatttaaattgaagactacaaggtttttatttaacttctatcttatttgtattgccttctgtcaccaccaagaatcttgttactctggaataccagggatgataatttgagaatatcacattcacataagtattcatttggtttgttccacattatccacaaggtattcttacaatcttaataccaaaaagtaacactgttactgaaaataattttttaaaaagggtttgcagttcttttgtctttagagcatcccattactgattgtacagttttgagtatatcatagttagaataggaattggtaactttgttcacacgtaccaaagatggcatgtaggctgattttgagcagcatccaatcagtatagttatgcattttattttcctgtgtttgaggcgcactgtcacctcactgtttctgggttagcttgc

SEQ ID NO: 11964 - DNA, 396 bp, Homo sapiens
gctggaagaaaaacagcgactcgaaaaaatcaagttggagggtggaattaagggtataggaaagacttctacaaattcttcaaaaaatctctctgaatcaccagtaataacgaaagcaaaagaagggtgtcagagtgactcgatgagacaagaacagagcccaaatgcaaataatgatcaacctgaggacttgattcagggatgttcagaaagtgattcctcagttcttagaatgagtgatcctagtcataccacaaacaaactttatccaaaagatcgagtgttagatgatgtctccattcggagcccagaaacaaaatgtccgaaacaaaattccattgaaaatgacatagaagaaaaagtctctgaccttgccagtagaggccaggaacccag

SEQ ID NO: 11965 - DNA, 895 bp, Homo sapiens
tgggggtgggggtgaaatttttttctcactctaatgacttcctattggaaaggcattgacagccagggacaggagccagggtgggggtagttttgtgggaaagcagaactgaagttagcttaagcataaaaacaaagaaaaatcttcgcttttcatgtatgtggaatccaagaataaccataggctctaccagaccagaagggtaaggatggacactaaaatgaaacaaataccaaggtattccttctgctgcagcctggagaccaccgagagttgagctgggccacacacacacctgggccgggacccggcagggacaaggcgggccgtggcctcctccaccaagtctctctagacaattcagggcctgctttccccagctccatgcatggctggactggtgattccagggtgcagaagggattcatattcccagaacgctttaagtgttacacctgcaggataaagagataccggttacattatttaaatgattcttaaggattcactggggggatatttttgtttgcttttactttcatggtttaggagctacaaagaacagtgattttttttttttctccctttcccctttcagaaacattatacattgggccatttttctttctcccaaagaagattcatggatagtcagactgaactgtgtgcaacaggaaaagtcaaaagggaaaaggtagctgatgaggttacatggttacatgttctacatcatgcatagtagcttgaaatctagtctggagaaaactggatcaagattctagcccactggagttgcaaggaatgagaggcaaaaattctaaagatttgggttatattttcaacttgggggacagagagaaatggagagcaggaattacagttccaacaaacatcc

SEQ ID NO: 11966 - DNA, 119 bp, Homo sapiens
ctgtgcttttggagagtggatgtgctaaaattagtaagagtctcagtgcatagatttgacaagagttttagccaaaactagaagatagttgagaaagataattaaattgtcatgtcatt

SEQ ID NO: 11967 - DNA, 603 bp, Homo sapiens
ccttctaatacactggcatcacagaaatgtgtgaggcacagaattcggaacatgcttagaactcacatttactgagctggtaaaattctaccttgaactgtagatcaaacctcaaagcagctttcacttggaatttaaaaataaacagttcaaagatactctagattatcaccctataaacttctactccagttatggtttctgacatatgattagactgtttcaaatgctggcaaaatggttaatgaagtaagagaaacagatcaacaacatatgttcaccttaaaccatctgttcatgatttcacccgtgactaactggttatgagataggacttaattaggttatttctgtgggttcaacaagggccataaactcagatcctacagggggccaggccagatgacttacctaaatgaagtggaacaggtggggaccctagtgcactgagcacagcttgcccttccaaaggagccagctgctcctcagtggctgctgctggtgttagggaggacccaatcttgctaaatgtgctgatatttcaagagaagtcagaaagctgggactttgtaacataagctcatattttaatatgttggcaac

SEQ ID NO: 11968 - DNA, 424 bp, Homo sapiens
gaaaagttgaaaggctagcacaatgaatactcagatacatactctccacttggattgaatagttgttaacattttgccagatttactattctctccaccccatgcatgtgtacatagaatgacatttcgacccctgagtattaccacatagatttcctgagcacaaagacaccgttctacatgattacattaagatgatcatgcctaaaaatataaacagtaacttctttatagcctctaatacagagcccttaatcagtattcaacaattgtctccagaatgtttgtctttaaaaacaacgacaacaaccaggtcccatcaaggttcatacattcttttggtttcaactctagtcactttcagtctacaacaaccccgacatattttcccatgatactttttgaagcatccaggccagctgct

SEQ ID NO: 11969 - DNA, 950 bp, Homo sapiens
caggaaccgggagcggggtcccgggactgggaagaaacggcggccgggagggggctccggggaccatggggctcctgaccattctgaagaagatgaagcagaaagagcgggagctggcgactgctcatgcttggcctggacaatgctggaaagacaaccatcctgaagaagttcaatggggaggacatcgacaccatctccccaacgctgggcttcaacatcaagaccctggagcaccgaggattcaagctgaacatctgggatgtgggtggccagaagtccctgcggtcctactggcggaactactttgagagcaccgatggcctcatctgggtagtggacagcgcagaccgccagcgcatgcaggactgccagcgggagttccagagcctgctggtggaggagcgcctggccggagcaaccctcctcatctttgctaataagcaggacctgcctggagcactgtcctctaacgccatccgcgaggccctggagctggactccatccgcagccaccactggtgcatccagggctgcagcgccgtcaccggggagaacctgctgccgggcatcgactggctcctggatgacatttccagccgcattttcacagctgactgaaccactccagatgccccccacctagcagtccaggtccctcaaccttcaccaaacactacccatggggggttgggagtcagccggccaaactaacactccccctcctccaccccagcctgctgctgctactgctgcccgctgctgctctgtggccacccggctcccatggcgggagggctgtgccctggctgtctctctggctcctgacctgcgctttggctaccataccaagaagagagggctgggcggggaggagctgctactgctgctaccgaggctgtgggcctcatccttcactcagttgtgaaataaaccgctccttgccccga

SEQ ID NO: 11970 - DNA, 223 bp, Homo sapiens
ggcacgagtggaaggccaggcgggagtgtaggcatcaggattcctggttgtaaccactgtgtcaagaggagggcctggagcagcgctactgtgcaggagagaggagtcccagtgctgggaggcggaggggtgtgcaggcatcccaaacagacttcacaaatggccatgagtttaggacaaagacacaggttttgggggctggggacctctgtttcctggggac

SEQ ID NO: 11971 - DNA, 390 bp, Homo sapiens
gggcatgtgagatgagtgactgccggtgaatgtgtccacagttgagaggttggagcaggatgagggaatcctgtcaccatcaataatcacttgtggagcgccagctctgcccaagacgccacctgggcggacagcaggagctctccatggccaggctgcctgtgtgcatgttccctgtctggtgcccctttgcccgcctcctgcaaacctcacagggtccccacacaacagtgccctccagaagcagcccctcggaggcagaggaaggaaaatggggatggctggggctctctccatcctccttttctccttgccttcgcatgggctgggccttcccctccaaaacctccattcccctggttgccagcccctttgccatagcctgatttt

SEQ ID NO: 11972 - DNA, 340 bp, Homo sapiens
agctgtacagttggaaatgttttttagaatttttttttgtaaaatgtttttaacttccttcttattatgatttcttttttattgtattcttgtttattttcatctttctctttttaatcctctctttgaatttgagatgataaccagaattatgttaatcagtatctttgaactttgccaaaagtcgatggcaaagtattttcaaaatcatttgaatatttgtaatattttcatattttttaaaatcagcaatcctgttcagtatatgtgatgagtttttgaacattcaataagttgggctttcacaaggataaaaatctcttgctgaacagctgctgga

SEQ ID NO: 11973 - DNA, 669 bp, Homo sapiens
aaatgtgtttatatttatttgaaatgaaacaaatggtgaggaaacatccagtatttgttctctattttaattgctatgtatcttatttagaataacaaaaaaaaaagtgaaaaaaaaaacacttgaccctgggctagccaaaagcccaagggccaaacctagcatttccactgctaaggtttccagatgaccctcaggttcttccgcgttggttagagagggctacgcatcttctactgctcagccacagtctgtagcccagcttagagcttagaagacattgcagtctggatgcccttctgcgagatgaaaactcagatgtgtagtggatcatatacacaaaggcagcacaaagaaatatctagaaattaccctaagtacactgaaaagctcacatagtctcagtaacctgatgagaaatgatggcagtgtgtgggcacatgtgccaaaaggagaaataaaaatcaccagctcaagtgctattttctacttgaggaagagacagaaaagaaatgtgtcgaattagagcagtactctctgacgttttataatgagttccatttccaccctggaaattgctattttatagtgtatgtgagatatttcaaaaataatgttctatcatatctggatcaaagacagataactgtattatatttttcatctagc

SEQ ID NO: 11974 - DNA, 209 bp, Homo sapiens
ggtctgtttcccatgagccagtacctgtggggtctcgtgcggccaggtttctgccctatccgtccaagacacaggatgaagctcatgcctcactcggggtctccttctctctccctgcagtgcacccactctggacgggcccggtctccgtgccagggggcacccggcagtctcctatcaacatccagtggagggacagcgtctatgac

SEQ ID NO: 11975 - DNA, 145 bp, Homo sapiens
gagcgtcctgcaaccccagccctcaccaggatttcttgcgtttttcaggaaatcggttgtgattggcatgttccttaagcgtctgcaggaagccgaggcctttttggtatttcaggaggggttgctaacccccctccttgtagga

SEQ ID NO: 11976 - DNA, 1475 bp, Homo sapiens
gctgctctgggtgcacgtccacttggacttgttctcttcatagtgagcactggtcttaatgtatctggccagctctatctgcatgtcgccgaaaaggggcaccacctgcagctgcctggagagagggagccggtgtcctacgtcagagccgccgccgccgccggagccgccgccggggaggagcagcccgtgccgcccaggactgggcccttagggaggaggaggcgagaagatggcggacgaccccagtgctgccgacaggaacgtggagatctggaagatcaagaagctcattaagagcttggaggcggcccgcggcaatggcaccagcatgatatcattgatcattcctcccaaagaccagatttcacgagtggcaaaaatgttagcggatgagtttggaactgcatctaacattaagtcacgagtaaaccgcctttcagtcctgggagccattacatctgtacaacaaaggctcaaactttataacaaagtacctccaaatggtctggttgtatactgtggaacaattgtaacagaagaaggaaaggaaaagaaagtcaacattgactttgaacctttcaaaccaattaatacgtcattgtatttgtgtgacaacaaattccatacagaggctcttacagcactactttcagatgatagcaagtttggattcattgtaatagatggtagtggtgcactttttggcacactccaaggaaacacaagagaagtcctgcacaaattcactgtggatctcccaaagaaacacggtagaggaggtcagtcagccttgcgttttgcccgtttaagaatggaaaagcgacataactatgttcggaaagtagcagagactgctgtgcagctgtttatttctggggacaaagtgaatgtggctggtctagttttagctggatccgctgactttaaaactgaactaagtcaatctgatatgtttgatcagaggttacaatcaaaagttttaaaattagttgatatatcctatggtggtgaaaatggattcaaccaagctattgagttatctactgaagtcctctccaacgtgaaattcattcaagagaagaaattaataggacgatactttgatgaaatcagccaggacacgggcaagtactgttttggcgttgaagatacactaaaggctttggaaatgggagctgtagaaattctaatagtctatgaaaatctggatataatgagatatgttcttcattgccaaggcacagaagaggagaaaaattctctatctaactccagagcaagaaaaggataaatctcatttcacagacaaagagaccggacaggaacatggagcttatcgagagcatgcccctgttggaatggtttgctaacaactataaaaaatttggagctacgttggaaattgtcacagataaatcccagaaggggtctccagtttgtgaaaggatttgggtggaattggagggtatctt

SEQ ID NO: 11977 - DNA, 792 bp, Homo sapiens
tgctaaagaaaggagtacatggaatcctttgaaggtatattcaaagaacagtatgataccatccatcgcttggaaacaaacaagttgcgaaatgttgctaagatgtttgctcaccttttatacactgattcacttccatggagtgttcttgaatgtataaaactgagtgaagaaaccactacatcatccagtagaatttttgtcaaaatatttttccaggaactgtgtgaatacatgggtcttcctaaacttaatgcaagattaaaggatgaaactctgcagccattctttgaaggattattaccccgagataatccaagaaacactcggtttgccatcaacttctttacttctataggtcttggaggtttaacggatgaactgcgggagcatctctaaaatacaccaaaggtcattgtggcgcagaaaccagatgttgagcaaaataaatcctccccatcctcttcctcttcagcgtcctcctcttcagagtctgactcatccgactctgattctgacagcagtgatagcagttcagagtcttccagtgaagagagcgactcttcatccatcagtagtcatagctctgcctcagctaatgatgtaagaaagaagggacatgggaagaccagaagtaaagaggtagataaattgatcagaaaccagcaaacaaatgataggaaacaaaaagaaagaagacaagaacacgggcaccaggaaacaaggactgagagagaaagaaggtcagaaaaacacagagatcaaaattcaagaggttcaaattggagagat

SEQ ID NO: 11978 - DNA, 2061 bp, Homo sapiens
ggcagctgcggcggggccggtctgtagcctttgctgagtcaacactactcacagtgaaagtgatgccttttctccatttgcacaacatgagtgtgacgtggttagccagaccaggagctcaacctcatgtagaatccagtccactgctctgatgccgaaggggaggcagaaagtgccacacttggatgcccccctgggcctgcccacctgcctctggctggaattagccgggctcttcttactggttccctgggtcatgggcctggcagggacaggtgggcctgatggccagggcacagggggggcgagctgggctgtgcacctggaaagcctggaaggtgacggggaggaagagactcttgagcagcaggcggatgccttggcccaggcagcagggctggtgaatgctggacgcatcggagagcttcaggggcactacctctttgtccagcctgctgggcacaggccggccctggaggtggagcccatccgccagcaggtggaggctgtgttggctgggcatgaagctgtgcgctggcactcagagcagaggctgctaaggcgggccaagcgcagcgtccacttcaacgaccccaagtacccgcagcaatggcacctgaataaccgacggagcccgggcagggacatcaacgtgacgggtgtgtgggaacgcaatgtgactgggcgaggggtgacggtggtggtagtggatgacggagtggaacacaccatccaggacattgcacccaactatagccctgagggtagctatgacctcaactctaatgaccctgaccccatgccccacccggatgtggagaatggcaaccaccatggcacgcgatgtgcaggagagatcgcggctgtgcccaacaacagcttctgtgccgtgggcgtggcctacgggagccgcatcgcaggtatccgggtactggatggacctctcacagacagcatggaggcagtggcgttcaacaagcactatcagatcaatgacatctacagctgcagctggggaccagatgacgatgggaagacagtggatggcccccatcagcttggaaaggctgccttacaacatggggtgattgctggtcgccagggctttgggagcatctttgtggtagccagtggcaacggaggccaacacaacgacaactgcaactacgatggctacgccaactccatctacaccgtcaccataggagctgtggatgaggagggacgcatgcctttctatgcagaagaatgtgcctccatgctggcagtcaccttcagtggtggggacaagatgcttcggagcattgtgaccactgactgggaccttcagaagggcactggctgcactgagggccacacagggacctcagctgcagcgcctctggcagctggcatgatagccttaatgctgcaggtgcggccctgcctcacgtggcgtgacgtccagcacatcattgtcttcacagccacccggtatgaggatcgccgtgcagagtgggtcaccaacgaggcaggcttcagccatagccaccagcacggtttcggcctcctcaacgcctggaggctcgtgaatgcagccaagatctggacatctgtcccttacttagcatcctacgtcagtcccgtgttaaaagaaaacaaggcgattccgcagtccccccgttccctggaggtcctgtggaatgtcagcaggatggacctggagatgtcagggctgaagaccctggagcatgtggcagtgacagtctccatcactcacccacggcgcggcagcttgggagctgaagctgttctgccccagtggcatgatgtccctcatcgggcgccccccgcagcatggactcggatcccaacggcttcaatgactggaccttctccactgtgcgatgctggggggagagagcccgagggacctacaggcttgtcatcagggatgtcggggatgagtcattccaggtcggcatcctccggcaatggcagctgaccctatatggctctgtgtggagtgcagtagacatcagggacagacaaaggctgttagagagtgccagaatgggaaat

SEQ ID NO: 11979 - DNA, 331 bp, Homo sapiens
gcggcacgaggacagtggcggaggacggcgctcgctagtctcccaggtcgcggtacacggcgagaacgggcggggcggtctcggctgcgtccgggcgatccagtgcttagttccgtcatatccctctccacgacctcggtcgagcatgttcaccagggcccaggtgagacggattctgcagcgggtgcccgggaagcagcgatttggcatctaccggttcctgcccttcttttttgtcctgggaggaacgatggagtggatcatgattaaagtgcgcgtgggccaggagaccttctatgatgtctaccgtagaaaagcctcagaaagacag

SEQ ID NO: 11980 - DNA, 251 bp, Homo sapiens
  misc_feature (1)...(251): n = a,t,c or g
gccaaattcaactcctgagtcctcagtctctagtcccgggaaggnnnnnnnnnnnnnnnnnnnnnnnnnnnnnnnnnnnnnnnnnnnnnnnnnnnnnnnnnnnnnnnnnnnnnnnnnnnnnnnnnnnnnnnnnnnnnnnnnnnnnnnnnnnnnnnnnnnnnnnnnttctgaaggacactacaagtgcagggccccttcttcgccctatccagcagtaaagtggctagagaggtcatcacccaattccaaca

SEQ ID NO: 11981 - DNA, 1546 bp, Homo sapiens
tttgtgttttggtgcacctatgccgtggtgagattgtgggaatctcatgtttgttaagccacaacccgtgctcctgggccccagcctatgagtgcagccaacactgggcccccctctctaggggcaaatccaggaactgccctttggctgaaggtggacttaggacttgacacaaaacctcacagattccaacacagcactattttgggtttttattttgttgatgttggttaaatcttatctctttttttatacacaatacttcatgtacctatgaaataagacaggtagggaatatgtccagtgcaaacagaggactcacacctgtgcatagacagcaccatccattgattgtcgctgcagtccatggcgttaccaagggctgcgccacccacgtgctgccccaggaggcgctaccaggttctttgggccacaggcctcttcctccactgcatgtggcgggcagggcgggtaggtcgcagggctccatgattgtggggcagcttcaagggcacatggggcagaggccctcgaaggtcccctcctcagtaggggatgtcattctgatagtactggatcatgttgtaggtccggctcctgttgctgaggaagcagctctggatgaccttcatgatgaaatttgcagcctcgcgctcagtcatgttggggctaaacctgtgcttcaagaacttgattgtctggccgcgaaaacagggcaggcccgtgtccaacatgatagtgaccagggagacgaccacatccatgtagggcctggggagagacaggagggagcgggtggctgaggccagcctaggtggtggccctgcctgtagtcctgtggactggctgatgccaacagcctcaggtgtgggctcctgccacccacctcgcctgccacatcttgcacatccccgaggcaactttcgatctgctgcactcggtcacccgtacgtgccccaggcaagggctgcccatacgcactctggacaggctgagtgtcctgccctgtcccccacataaggctgccggccatggcttctgcacctgggtgggatgcagacacgctgacctgcctttctctgcggggcagtggggatgaacccaggttggactgtgccttggccaagtgacctgtatatgaaactgggacaaagcccatctttggcacgtagcctgtggggtggcaggtgctcaggctttggtgacagggtggatgggatgcccagaaagggagacccatgctgaaggcgtgggcaggattgtggggaaggtggttggaattagatgcccagagcaagaatttactggcacaggtgggcagacagaggtgccaaggacaggtgtaggtcagcaggggtgctagcacctacctcactctctggaccgattcccttcatcctaaaggggatctcagaacgttccacacaccccctccgcctccaccctggccctcacccaggtcacccacagccaggtagcctcggacacacatctccatgaaccacttgaagggtgtggcctccatcttgccccccatgatcatcac

SEQ ID NO: 11982 - DNA, 221 bp, Homo sapiens
ccctccctttttgttcccagttctcattggtctacagtgtgaagttcccaagcctggaatttggaagaagcttggggctattggacataatgatagtaaaatagttaattgattaactataattaacatgaataatgaaatccaccattatatagcgctatctgtctggaacagtcgtgtggttggttccttttagctcttggattaaatgttgtatctta

SEQ ID NO: 11983 - DNA, 337 bp, Homo sapiens
gctcatcaaaacggagagagtggttacatgaggcaggtgtgagggacccgagcactcctgaggagggaagaacactcctcttggccatgagtgtccatcccaaagctgccctgcatcctagcccaatgcagattgaatcataaagccaaagccccttccacccgcttctctcaggcaagctgcctgcaagagagaaaagtgtattagtgcaggagcttgtgtctgctgaggatggcacctggccctctcctctcaccacgtccgggtcctcctgaggaccggtcccctgtccccggtccccagccagctcagcctgaccaggcttttagaggctccg

SEQ ID NO: 11984 - DNA, 466 bp, Homo sapiens
tgaaaaggacattgatgagtgtgcctctgatccgtgtgtcaatggaggtctgtgccaggacttactcaacaaattccagtgcctctgtgatgttgcctttgctggcgagcgctgcgaggtggactactgagtggtaccagcttgctcttgttggtcttcattcctgagtagttccattgtcctgaatatttatttgcctttgctatagaattcgcatcccaatgatttcaatctttccagttggcagatgacttgatctccgacattttcaccactattggctcagtgactgtcgccttgttactgatcctcttgctgggccattgttgcttctgttgtcacctccaacaaaaagggcaactcagggaacctacaagccccagccgttcaggagaagggaggggttcccgagtgggaaatgtgggaacttggatggccacccctggcaatgggagagactgattta

SEQ ID NO: 11985 - DNA, 506 bp, Homo sapiens
tctctatttgattttctttatttgatttgtaagaacacattcacaggagcccttcctcgcgtagcattaaaactaaattatggatattaagccattaattccattgaggctaatttgtttttaactttctgtgatatttagacgacacagaatcaaatgatctggaatcctaattgtgctggattagagttgaacacactttcatggtcagaaccgtgatacttctactgggtttatctccacaaaaagattcataacaaaggccaattgctgttcttcaaacccctagtcagccgtatcccaaaggacccgggcagatggtaaaggggactgcagagaagtcacctggcggatgggagggcattggccagtgttccagcttcacttctgagtccaacgggctctgtaaccttggaccgggcaccttttctctctgggtcccagtttcttttcttcattcataaaatgggtagaactagattattctttaaatcccacatttaacc

SEQ ID NO: 11986 - DNA, 335 bp, Homo sapiens
gagctcatgtcctaaacatctctgcatccctcctctctctccatccacgctgctgcctcactggtcctggccaccacggctctctcagctaggctgcagtcacttccaggctggattccccacccctgcccttgaccttctcctgtcctctactccacaaggcagccagaagaatctgccaatgtatccagtcttctcttgggctagagccttctggtggcttccaatctgcacccatccaagccctttgtgtcaggcaccatctcatcttcataaatcctgtttctattgcctggaggactcccccagccctaacttcccctgttcctaaatga

SEQ ID NO: 11987 - DNA, 855 bp, Homo sapiens
gtaggtaggtgtggtgttggctaggcagaacatggttatttatgaagatgcctgtagagttcaacaagcctgcttactgcggttagttgtgaccattgtctaagtaatttaatgttttcctatgagagctgaaggagccgtgaaagggaaaaggtggctcccaatgagttgcagccaatgggaacaatttgatataataaatagtctcatgttgactcctttccaaaacggcctttcaaaggggagtgtggcttgccctggcaaacttctccccacccactcaccacaaaggatttattcacagagggcaagtgcagtatttttcttaaatgatagcccttggagaggaaactaaagagcttatgcttttctaggacgctgggcttacatcctgaggttgcccgatttggatatttttctgctgctctcttggccccccacttaattggtgaatttctaactcttgtgctacttggtatcgtccaaatccaatatagtcacagtgtagtgctctgctgccattgcggggccgtgtgaatctgatctcaggaggttccatattcaaaatttagattggaaacggttataggcccctaaatcctgattaaggatcaggaactgtatgtttgatatcgtatgctaggatatcagccgacatgctagctgactgcattgtcaaaagcttttctgaccgacacattttgtgaggcgtgaacattccgtgggaaccccccgggttgttgagccgccgccctagactatattgtcgtgcgccctttgtgggaaaaattcgccgccttgttcggttatcagcactcctggtccgccttaccgcggggcccctttaggaggccg

SEQ ID NO: 11988 - DNA, 376 bp, Homo sapiens
gtgccattggctgtcacacggccaaggttctcccatgccttcctagctcatctgacatcttcctctcctactcccagcatgcccctaagtcaccttttttttgtaatcagatctcaggttcctttatcttagttcatagtgattatttcgcagaacatgacaactcgcttaaaagaacagtgattgatttcatggagcacttataaaacataggtactgagtacttttacatatgttatttcatttaacctttatggtaacttgattaaaactttgtaacttttcaggtagctttgtttttgtggtacactggaaggaaagaggactagggaagttaaaaacctttcccatgatcacatgggcaggaaactgggga

SEQ ID NO: 11989 - DNA, 377 bp, Homo sapiens
gcggcacgaggtttaatgccaccaaactgtttgaagttgacacagacagctgtgagcgctggatgagctgcaaaagcgagttcttaaagaagtacatgcacaaggtgatgaatgacctgcccagctgcccctgctcctaccccactgaggtggcctacagcacggccgacatcttcgaccgcatcaagcgcaaggacttccgctggaaggacgccagcgggcccaaggagaagctggagatctacaagcccactgcccggtactgcatccgctccatgctgtccctggagagcaccacgctggcggcacagcactgctgctacggcgacaacatgcagctcatcaccaggggcaagggggcgggcacgcccaacctc

SEQ ID NO: 11990 - DNA, 216 bp, Homo sapiens
attttagagaagtggcaagacaaaggaaagcaggtttaggctcccaaaggagggacctctgagaagttacctccacgaagcagctcggctggtgccagagagaacatcggtacaggtctgggaatttccctgggagctggccccaagccacagccctccccagctccgtagtttgtttgttcttcctctcctgggctcaatcatctggacaagccc

SEQ ID NO: 11991 - DNA, 353 bp, Homo sapiens
ggcctgttttccctagggtgacctggccggggtaacaaacacttgttctctaattccacggtcagccttgacttaattgaggtacttgatttccaacttcctgtcttgctgccacagataatcactgatgaaaccaaacaggcaacaccttttggtggtcctgtggagagcgctgccccgtctgggtcttaggaaggcaattgaatatgaatgttctcccgagtgcttgtggaaaagagatggtgttggccactttttagacgaagagaaatgagtactagtgaacactaatcatagtgactaaacagtaaacggctcccatttgttgttcggcttaaagcactggattcttt

SEQ ID NO: 11992 - DNA, 264 bp, Homo sapiens
  misc_feature (1)...(264): n = a,t,c or g
ggataagcacaaaattcaggatggaggttacccttgagtagggaggagtgaggaggggacccctgagtgagaagtgacacgtggagtagcagtgtttcacaggcaatggagatgaatcagctgcttgccattctccctccaggtcttgagatgcgtgatatgttgtctcctcctaggggtggctggagctcatgcagcttggnaagggtgaaaaccccatcttatacccagctgnattgnattacagcttgtccccaaatagat

SEQ ID NO: 11993 - DNA, 492 bp, Homo sapiens
  misc_feature (1)...(492): n = a,t,c or g
aagttctagctaatgcagtaaggcaaggaagagaagtaaaaggcatccaaattagaaaggaagaagtgaaactttttaattctcagacaatatcattgtctatgcagaaaatccaatggaatccacaaaaaagctactaaaactaataagtgaatttagcaagtggcaggatacaaatcactgtacaaaaatcaattgtatttctctatgctatccacaatcaacaattgatttttaaaaactcatttattatagcatcaaaagatttgaaatacttaggggaaaaaatctggataaaagatgtgcaaggccaggcgcatcggcnnnnnnnnnnnnnnnnnnnnnnnnnnnnnnnnnnnnnnnnngcagattcacttgagcccgggagtttgtggaccagcctggggcaacatggccaacctgtttctacatanattacaaanttagccgggtatggtgactgtgcctgtagtcccaactgctcggggtctg

SEQ ID NO: 11994 - DNA, 552 bp, Homo sapiens
caaacagcctgaatgcccagctgtggacccgcatccatgcctggaggaggaggttgcctctgggagcaggcgtagctgctggaactcttcctcccagccttcttttaatgctctccggcacctccgtgatttcaggcagctcctcattggtctggtccttggctggagctccctccagctccagtgctctctctggaggggcctcttcccatgctggctctgtccgcgctggtgctggcagtgctcttacttctgcacatggaccaggagcacgtgtctgtgcctcaatgagctcctgaatctcctggacaaggacagtgtgcagctgcagccccaatgggatctctggtgtggcctggcctgctagggcctgccccaggctgtcctgtggtacctggatgcgccttattacaacgggcgacaggcgtctggggtgagggatgagccttcttcgtcatcgtcagaaaaggctctcactccctccgttcctgaagcagcaacctctcgaagtggggaagcaacaggagaacatcttgctctcttgagcgtctc

SEQ ID NO: 11995 - DNA, 327 bp, Homo sapiens
gttcttacttggactgaggacaagggcaaagcatgattgtatcccaggaaactggggcttgccctgtgtgtggcacaagcatcatgtcttgcctgtataaagccttttggtcctctgtgtactaggtggaatcttctcaacactgtagggccatttcacctcatggtttcatggcagggacatttgcttccttcacaggcctgtgtgaacaagcaaaagtacccacctcctcggtcacccacagagccaccaaagattccatgtcccagagcttcccatagcagacctgaaaagtccatgacctgagctttggccatggtagtggag

SEQ ID NO: 11996 - DNA, 86 bp, Homo sapiens
gatttcacactgagcagctgcagtcggagaaatcagagaaagcgtcacccagccccagattccgaggggcctgccagggactctct

SEQ ID NO: 11997 - DNA, 329 bp, Homo sapiens
ccaaggtctgtgacccaaaggcaaggcccctacttctgctccaaatcagaagcccttgaggaaggaatttgagtggcttatcttgatcatattgtttctaaccctatggccagggcaggcgaggtactacgattgatgcctccagcaaaagttgggtaggaatggttttctaaggaaacagggacgctgcaaatattatagcatagtaaatatctacactttcatccttttggtagctcagcacgtgtgtgtactcacatttgttctcatacatacaatttcaaaaatgggttctgcctaatataatggcaaaggatttcaccccacat

SEQ ID NO: 11998 - DNA, 732 bp, Homo sapiens
  misc_feature (1)...(732): n = a,t,c or g
gattttgtttcaaagaccaaatggaaaaatggcatgtttccttggccaaggcagcaatccaaactgccacgtgactcagctgtggctgaagctgggtcaggccacatggtactgatgctgccactcctaaggaaggccccaagtgggtgagcagcccctccagcaaagatgcaggagcccctgcctagagctccccctgcccanagccccatctgccctctgtccctctgggtgtttcntttccnaatcattanccttttttttnagagacagggtcttaatctgtcatacaggctatagtgctgtggcgcaatattgcaatacagttcactgcttacagccccagnnnnnnnnnnnnnnnnnnnnnnnnnnnnnnnnnnnnnnnnnnnnnnnntctcataccaccacgccccacagcctggtaaatttntaaatgnnnnnnnnnnnnnnnnnnnnnnnnnnnnnnnnnnnnnnnnnnnnnnnnnnnnnnnnnnnnnnnnnnnnnnnnnnnnnnnnnnnnnnnnnnnnnnnnnnnnnnnnnnnnnnnnnnnnnnnnnnnnntgctctaggttttcatttggatttgctgcctagtggaaggcacaggatgggcagtgccttctgccagtgagggaggctccaggtagatgtcattgctgaactggagctcccctggaagcaaatgtggcccgagccttcctgggcagccccttctgccaccaggagccttag

SEQ ID NO: 11999 - DNA, 350 bp, Homo sapiens
gctggaagttctctctttcttcattcagcatagtaggccccaaatttgaaatgagaaagtacaacttttcctgttacttttccagttagaggcttctcttactagagactgcagtcaggtacttggattctgaaatggagttaatgtgacaactgctttggaatctcagtgctttggtactggatttaaagtaacttacagttgaaactgatttccaactgcaagaggtgacacaaaccctgacttttttggaaaatgttttaaatataaaacctgaagtgaaaaaggcttctaagggtaaaaaagatttttaaaatatgggtaagtgctttaaaattagtaagtcggtt

SEQ ID NO: 12000 - DNA, 178 bp, Homo sapiens
tacaggacacacagctctagtaaggatgtcactaacggaaattaaaatcatttgttgtagaatactttatgaatcaatgcagtaagaggaggtttacacttctggtgaagaatagggaatgaatttgtgataggcatgtagaaaattatgcaaacaaataaaataataatcaactcct

SEQ ID NO: 12001 - DNA, 125 bp, Homo sapiens
  misc_feature (1)...(125): n = a,t,c or g
gatgtgtcaatgttcagaggctggttgccctcaaggattcacccaaagataaaaagagaattcannnnnnnnnnnnnnnnnnnnnnnnnnnnnnnnnnnnnnnnnnnnnnnnnnnnncttgaggc

SEQ ID NO: 12002 - DNA, 349 bp, Homo sapiens
cctacttggttagaaggaagtcactgagtatagccattacccaaggaaagggaaattaggctccatcaagggaggaatatcttaaaatttgtgggcaaattttaaaaccatcacagctgggctctgggagtacttttctgaccaaggtagtatcataacaggttttattcaagtgtatatctggttagtcaagaacttagttctcactcacaaactggttcttagagctgggtaactattgctgtcttattccccccttgaaatatatttaacagttattagggaactggatgaagaggaataatgtgaacatgtacattaatttattcagtaaacattcaccagatgt

SEQ ID NO: 12003 - DNA, 700 bp, Homo sapiens
gcggcacgagcgtggccataaggtccggctggcagtgggcagcgggctgcgcccagatacctgggagcgttttgtgcggcgcttcgggcccctgcaggtgctggagacatatggactgacagagggcaacgtggccaccatcaactacacaggacagcggggcgctgtggggcgtgcttcctggctttacaagcatatcttccccttctccttgattcgctatgatgtcaccacaggagagccaattcgggacccccaggggcactgtatggccacatctccaggtgagccaggggaagttgctaaaggatgtcttccggcctggggatgttttcttcaacactggggacctgctggtctgcgatgaccaaggttttctccgcttccatgatcgtactggagacaccttcaggtggaaagggggagaatgtggccacaaccgaggtggcagaggtcttcgaggccctagattttcttcaggaggtgaacgtctatggagtcactgtgccagggcatgaaggcagggctggaatggcagccctagttctgcgtcccccccacgctttggaccttatgcagctctacacccacgtgtctgagaacttgccaccttatgcccggccccgattcctcaggctccaggagtctttggccaccacagagaccttcaaacagcagaaagttcggatggcaaatgagg

SEQ ID NO: 12004 - DNA, 416 bp, Homo sapiens
  misc_feature (1)...(416): n = a,t,c or g
ttttttttgactctatattaaaaataattttttttaaaagagaaagaagcctttgaagttaaaaactaaaaagtttgtggctttcataatctttaatttctaagaaaaaaagccagctcacttgggaacaaatgacaactgcacttttggtatgcagtatgcaaacaagacacaaatacacatacttgaacacacacagacaggtgacagttaaaacccttccgagcgatcagctccccaaatgtacaattctcctctgctctgctgaatgatcccagtgggactagggcgagggcagggagcgctagggagggagggcgggcagacatgttggggggtccaggcccattctgatagggcttctcttccaagggtcctctttgncagtcctggcagggacgggtggctggaagggt

SEQ ID NO: 12005 - DNA, 309 bp, Homo sapiens
  misc_feature (1)...(309): n = a,t,c or g
gctggaatttaaatgattcaaatgttacgttgccaaacaactgaacaagaaatggaattattacaatagactgaactaatggattgttactcacccacttgtatattgagaaatttctgcaaagaaagaagatgcggaatgagcctcttcactgtcttcttgaacctgagcaaggggtaggcctgataaagaaattctgcaagatgaattatgtatttgctattcagtttacaaattagactttaatttcattgttccaagactttaacnccgtacattcttcaactgaggntctttcctttttttttt

SEQ ID NO: 12006 - DNA, 387 bp, Homo sapiens
  misc_feature (1)...(387): n = a,t,c or g
gcaaagctaagtgaagtgacccctcttcttgcctctgtaacaccgccatgcacatttcatacagcccttgctgaaacttcatctagttctctgttagacttaacattccctaagggcaggtttggaaccttactcatctttatatggcgtctaaaatagtgcttgctttatgataggtgctcagtaaaggttgtcttgaattgagcagatcctctagggacaggagttgggatgggagagcagactgtaaagcctcatgagggcaggggcctggcttctttcctgaggcttcagggatacccaggggcctaggntcagttgcctgccatggaaattgtttcactccattcaagccttgtttaaatggagttcngggggcnggggggg

SEQ ID NO: 12007 - DNA, 187 bp, Homo sapiens
gattttatatgagagctgttgagatattcccaggctttggaaaggaaagggaaaactgaagcaaacagaacattataggccaatgtgaagagagcccaaatagatgggtgatttcaaattaatgtgagaaaactaatagctcgtctatatccaaataacaatgagaaaatgcaacaaaaggaaggat

SEQ ID NO: 12008 - DNA, 114 bp, Homo sapiens
taagctcttggggaatgggtgcgggtcaggggtggcaagaaggggtgactttcccccactggggaagtaattgggggggactaaggagctcagggttgttttctgaagtgaaaa

SEQ ID NO: 12009 - DNA, 431 bp, Homo sapiens
gcatggactgcgcgtcttgcagggcgcgaccgcacagcgacttctgcctgggctgcgctgcagcacctcctgcccccttccggctgctttggcccatccttgggggcgctctgagcctgaccttcgtgctggggctgctttctggctttttggtctggagacgatgccgcaggagagagaagttcaccacccccatagaggagaccggcggagagggctgcccagctgtggcgctgatccagtgacaatgtgccccctgccagccggggctcgcccactcatcattcattcatccattctagagccagtctctgcctcccagacgcggcgggagcaagctcctccaaccacaaggggggtggggggcggtgaatcacctctgaggcctgggcccagggttcaggggaaccttccaaaggtgtctggttgcc

SEQ ID NO: 12010 - DNA, 792 bp, Homo sapiens
gcgacgcgcaggcaggtgggcggtgacgttctcctgcagcggcacgacgcgcagcagcagctccagggcgcgcgggtactggccggcccgcaggcagccgaaagcctcgcgcactccggccgcgtgaggaagtccaggaactcccgggagcggcgcacgcagcggagtggcgtagagcaggcccaggtactcctgcagggcgcgccgacgctcacagatcatctcctcagcgaagttcccagtcaggtgcttcctgggaaactccacgtcttcgatctcctccctgaacgtcttcagcagcgctttctggagcttcgcgaagtcggaatagcgccgttccaggacggccttgttgttgtcaaagctcccagtctggatgacgatgatttggtacaccacaaacttagagacttttctctcctcgatgcgagctgaagcaatctcaaagagcagtttgacgtgcttccagcggcatttctggttctgccagtactgctgaagctcccgcgtggtcatgctggagttggagctcaggccactgtgtgtgtctaagtgcccgtcaggtcctgggtgcgggaggtcggggccagtggctggtgcttcctgctgggtccttgccgtgcactgggttatgggtcccatgcagccagggctcccagggtgctctggacttgccatgctccaaggctccagtctccagggctgtgtgtgtccaggggtccgggaggagtgtcatatggccccttcgagctcttggttctcagctccggcgacaagccgaggggctgccac

SEQ ID NO: 12011 - DNA, 326 bp, Homo sapiens
gaatttattttataaagaaaggaaatgctgaaagtccgtattaagtactgagtttagttggagaatttagataagtatcttttaggtaattctaaaattaaaatcctacccacctcactacagggttcctcatgaaggtgggcggccacctggcctgggccaccagcagcacatggagcagacctgaggggcctggcagggggcactgacctcaggatccccaggtgggggttttaaccatgggtgggatctcagcttctgcgcatacactgacaatctcacctgttcctcagtgtactcctctgaaaagaagaaaggataatatt

SEQ ID NO: 12012 - DNA, 322 bp, Homo sapiens
gtgcttgagtcaccagcttgccatcctgtgtcattcaacacctcctccagactcttcgcagaaaggtgacccagaaaccccttgaaggacatgatactgtccctgtgctctgatgtgccccctggtgtttgagtggagtgatttttagatagcggtttgcctgttaaaaccttccctttgttccctatattattgcttgcattttagggcttctcagttgaaggatgtggttgaaagagcccagttcctcagcttgctcctctgggtgacttagagttgtgggtaactgattgttttaggtcctggagaaagcagtgatgat

SEQ ID NO: 12013 - DNA, 188 bp, Homo sapiens
  misc_feature (1)...(188): n = a,t,c or g
gcttggctttttgcagaacctcgtgatgttcctgagcgtcctcgtggactggatgattccagacatccccacggacatcaagcgaccagatcaagaaagagaagagcttattagtggatttcttcctggaaggaggagcatgagaagctcaagctgatggatgagccggntctgaggancccaggacg

SEQ ID NO: 12014 - DNA, 245 bp, Homo sapiens
cggcctctgaaggtgttgggattgcaggcatgagcaccacgcctggcctgtcatcccttcaaatgttctttcagaactgaggcatgcagaggctggaagacaggctgggctcaccggggtggttatctctgagagaggacatgggtgaggtcagaggcctctccctggagaaggaggtaggtggagaagccagatggcatccagataaggaagaccagcatctccttgagagtgtacacgggagc

SEQ ID NO: 12015 - DNA, 534 bp, Homo sapiens
ttctccccttgagctcctgctcccccatcccccatcctcccagattcgggcaggcagagtcacaaaaggccaattcctacccagctcttgtccaaaggaaattagaggtgtccactacaagtgtactttttacccgcccatctttcatgcagaacaccagcaaggaagatataataattgacataaatcatgaaaagatgaagatatggcagatattgctcctagccattgcctcctctaccaaactcccggggagcaatgccaggctagagtttgaaccactttttcctgttctggaaggctcttcccatcttccgcggaaacacacacgcgtgcttactgccatgtctcttgggtttcctattccagttacaaaggtcccgcactctgctcacacagtgcctccgtggcatcggcaagaggacgggtacttctgatggcgcgtgtcccacaggctccacctctgtatggggtgcggcattactgtccttgcccatctacgtgacctggcttgaggtgtgtggcttgtgctta

SEQ ID NO: 12016 - DNA, 1788 bp, Homo sapiens
aagtgttttttttttttttttttttttcatctagaaatcctttatttacattttctcttagaaaaaaatatacagatctgctgccctgttgattcctcagatttagggtctttagggaaaggtgaaagagggtccagcggttcatgatgtcccgcacggtggtggggagttggatggaccggttgttcacagcctcctgcaggtggtcccacaggttcaggtagatggtgttctggtaggcaaaggtgtggaggtaggacgccaggccctgcttgaatacgtcctcggacaggaagctggagagcatcctgaggactgaggcgcccttgctgtaggagatggcgtcaaacagctcactgatctgggccggcgtgttgatctccgaggcgggtgtggacagcgggtgggaggaggccagtgcatccactgccatcacgcggtacacatcattcagcaccatgaggtctttcaagttccaggtgggctccgcatagtcagcacccaggtactccacgtaggaggcgaagccctcgttcagccacaggtcattccaccactctatggtcaccaggttcccgaaccactggtgggccagctcatgagcaattcacagtgaccacccgctccttgttgctgctggaggaggacagggggtcgaacagcagggagttctcccggtaggtcaccagtccccagttctccatggcgccggcgttgaagtctggcaggccaatctggtctgattttgggagtgggtagggtgtgtcataatgaccagcaaagaagttaaggatggggcccgtcacgttcagggcataatcgccgtggcccgccgcaatggcactgggccgggcccagatccggatcaagacaccattggatgcctgcttctccacgtagtcgaactcactgacaatgaaggccagcaagtacgtggacatcttgggcgtggtgtggaaactcagtgacattccagttggggtcttctggaagtggggtgctgggacctttgggaagcatgttggacagggctgtcaggtccttggggtggataagcgtgatgttgaactcggccttcatggccggctcatcgaagcatgggaaggacttccgggcatctgcagcctgcatctgtgtagtggccaccacctttctgacattgccctccatgtactcgctgcggtagaagcccgccaggtcatctgccaactccccctcgaactcgctgtccatctcatactggctgtccttcaccagggagcccttgaggtgcaccaccaggtactcggtgggctccaccagctcagtcttgtcaatgtcggggggctgggagcctcccacaccacgcaggaccaccctgtgcccctggctgagggtgtagttgagcttcttgctgtggatgatgatgacgtcagtggcctccttgcaggtgaaacggacggtgctggagcccttaaaaacgtacaggcccctgtcattgggggtgaggtacggtctcagcgtcacctggtaggaatcgggtttcagcgtgttggggaggcggtaacgattccacgctttactttggtccaaggtggtggccgaggcggggttggtggtggctgaggcggacggggtggtggaggccacgggggagctgttggcgttcttgttcttctcctgggagtacaccactgacagtgcgatgattgtgcacacggctgccacgcccaggaggatccccaggatgcccagggacttggaaatatagaagcccttggccatggtgatggtggggaggcggctcag

SEQ ID NO: 12017 - DNA, 646 bp, Homo sapiens
tttttaataaaatatttccccaacccctgtctgccgtgattggccaaaagcaggaggcagggcagcgtcatatattttcatctccagggagacaggtgcagttagggtgtggtagggcctctctcaaggggtccagaagagtgggggcccctgtcacaggtccgtggtgtccaggccagcgttggtgtaggatggcccctccagctgtccacttgcgcctgcctgccgtcctaacaggaccacgctcaggggctctggatctggctctggtggtgtgtgtggtggcctgtgctccttgatttcctgactgttcttgtccacatccacagagttgtcgtccagggagttgacgctgacagagtccaggtcattggagggagagaggtactccaagcccaggtctttgttggggaggttcagcatgggggttggctcgctcagtgttgtacatgttagtccctgggatggcaggggctgagggcatcaccccctgctgctgtcttcctggcctccttggcagccttcatagcttgaagcttccggttgtagctcttccgcacacacacgaaggccatggtcatgatcacaaggaccagcagcaaagccactcccaatcctatgatgacactgatgagctgtttcgacc

SEQ ID NO: 12018 - DNA, 232 bp, Homo sapiens
gagcttattgctgaggtgtaagtcaagctgaaagtaaaataaattattagcaccacctgctggttaccattgagtaccattgagtctttaagttttccattttggggctattttggttttttattagttagattttggacaggacttgatttgaatgaagaacagtgtgagccactggaggaaatttgtgaaagggaaatgttaacagctaaaggagtttggaacataggat

SEQ ID NO: 12019 - DNA, 494 bp, Homo sapiens
gaagacgagtcgttttaaaaggtagctttgaaaaacaaaaaaggatttaaaattcaaagactttgggaaaattcaacttaaccaataacatgagtaacgactattactatttcctgagtccttaccatatgccaaataccgttgtacattgtacctgcttcacataaattatttcatctcattctcacaacattctgtgaagtgcgggtactttattatctatccctgtttgccagataagggagctgaggacttcatacagtgacttacaagttcggacagcctccagcaaacacaggaaacagaattcgaacccatgcagtctgcctcagagccaaagcccttggccatttttctaacctgccttcccacagatcattttcgcctacagcagaggtcagaaactgacaaccagctggccttacctagccttaggtaacagtaatggctattgaacacttactatgtgtcaggattattttacacacattcat

SEQ ID NO: 12020 - DNA, 288 bp, Homo sapiens
gggtcaccaggcggaatccagactcgtgtgtgtgggctttgtgctttggaagagaagctgtgctctgtgggttccccagtcccttctttcttcccaaaggtgaccggtttccctccgagtcttccaaagatgtgggcagcagggtctcaaatccaccaccctatcccctcatcctaactcctcctagggctggcagcaaatctcttggttttcagagccttccccaggctaactttctctcatcaattcccagcaactttatgaactctttgtccctcaggcaatatt

SEQ ID NO: 12021 - DNA, 825 bp, Homo sapiens
cgtgggtggggtccccacctggttggaaggctgtgggtccgggaacccgagcccaaggagtgggggcggccccggagcgaggctcacactccctgccctgcagattgactgtccacaacctgtacctgtttgaccggaatggagtgtgtctgcactacagcgaatggcaccgcaagaagcaagcagggattcccaaggaggaggagtataagctgatgtacgggatgctcttctctatccgctcgtttgtcagcaagatgtccccgctagacatgaaggatggcttcctggccttccaaactagccgttacaaactccattactacgagacgcccactgggatcaaagttgtcatgaatactgacttgggcgtgggacccatccgagatgtgctgcaccacatctacagtgcgctgtatgtggagctggtggtgaagaatcccctgtggtccgctgggccaaactgtgcaaagtgagctctttcgctcccgactggactcctatgttcgctctctgcccttcttctccgcccgggctggctgaagcaaccttacctcaagtctcaggagaattcatgtctgcctggggcccttccgaacctgtgccaactaagggcccccactgtaagcccccgcacccccaccccctgcccagagcaacagcctaaaggcctgccctgatgctctcctcctaccagagtgaagcccacagagtccctccacctccacaccaggccctctctccagttttatcccctgcctaatgctgcgagaagcacagaataaactttttgtcactctcaaaaaaaaaaaaaaaaaaattcct

SEQ ID NO: 12022 - DNA, 1177 bp, Homo sapiens
  misc_feature (1)...(1177): n = a,t,c or g
ccgaacgcccgcagcagggtcagaagggaggtggccggtctccgtcgtgacctctgacggtttctgagcgttggcctttggcacggcgctacacccttttgctttggttctgccatgccgatgtaccaggtaaagccctatcacgggggcggcgcgcgtcntccgtgtggagcttcccacctgcatgtaccggctccccaacgtgcacggcaggagctacggcccagcgccgggcgctggcccacngtgcaggaagagtctaacctgtctctgcaagctcttgagtcccgccaagatgatattttaaaacgtctgtatgagttgaaagctgcagttgatggcctctccaagatgattcaaacaccagatgcagacttggatgtaaccaacataatccaagcggatgagcccacgactttaaccaccaatgcgctggacttgaattcagtgcttgggaaggattacggggcgctgaaagacatcgtgatcaacgcaaacccggcctcccctcccctctccctgcttgtgctgcacaggctgctctgtgagcacttcagggtcctgtccacggtgcacacgcactcctcggtcaagagcgtgcctgaaaaccttctcaagtgctttggagaacagaataaaaaacagccccgccccagactatcagctgggattcactttaatttggaagaatgtgccgaagacgcagatgaaattcagcatccagacgatgtgccccatcgaaggcgaagggaaccattgcacgtttcttgttctctctgtttggcccagaagcataatgctgtcaacgcaacccttatagatagctgggtagatattgcgatttttcagttaaaagagggaagcagtaaagaaaaagccgctgttttccgctccatgaactcgcttatctccatatcaacataaaccagaagaggcatacatctgtgggatagtcaatacataacatcctatctttatatggccatatgagaagataacttcagtgtccctatgatggtaagttcttgaatgtgagggcaagatggctgtgatagccatgactccccgctttggctggttgggacaagaacccccttccccaaatgctcacagtcccccccttgagctgtgtctcactcagagaccctaaattttgcagacgaacaagggcatcttt

SEQ ID NO: 12023 - DNA, 330 bp, Homo sapiens
gattcatattgaatcatattgttgttgctctatgaagataagcgaattttcttcctgggaatctcataggattattactaagggccagggagatccacttcgttcatttagtcactcaggaagcattgctaagcatccccctgtaccttcccctacagctctccttccaaaacgaaacatcctttggagtgtgttgtcctccagaatcgaatggattctatatgctgcattcagtaacaggttgtggagacaagtgtcttttcctgaaattgctaagtgtatttggcagtactttactacttgtggatagaactgagagtgaggtcagta

SEQ ID NO: 12024 - DNA, 582 bp, Homo sapiens
aatatttagagtaactttattatgtgtaatacctctaacctggaaatgacccttgttaattaattaacaggagagcagatggataaattgtgtgtattacaatagaatactcctcagcaagggaggaggtcatacacaacaacgtggatgaatcccaaaaacctgacactcaaaactctccacaatctggtcctaacattcattagttccatagtcacttctttcccgctaatcacaccatggtctattttaattctagaagattgtcaattatctttgatcagaagcattaaagttctgacctattttccgttcttctatgtcaaaagtgatctgctatctttcctaaatattttgtattttcttatccccaaacctttccccatatcattcctcctacctagaatgcccttgctgctctcctttgcttatccaaagccccatctttcaaggacaagttcaaaacctacacttacccaccagaatgctttggggctgtcatagcactcattctggacagcacgcacatggcactcagctacaaaaatgccacatatggttaggtctttttttacccacgtc

SEQ ID NO: 12025 - DNA, 327 bp, Homo sapiens
gtattacagtaaaggaaaactatttaaacttcccaccatccctcctggtcaatgctggtgtccacccacgtactgtgtggtcagagagctgtctaaaggagttacagcaaacagcaaagctatgtgccttcaggttgctccatttctcaaaatagaatcttttttctgccctctctctatcagttccagggagttatcttctattcagaagatagaacatgtatgaccacaagcaaattatttaacatatctatagtcttgggtctcaactgtaaaacagggtatcatcatcatatggaagatttaaagacaacaaacctaaaccac

SEQ ID NO: 12026 - DNA, 167 bp, Homo sapiens
  misc_feature (1)...(167): n = a,t,c or g
tatgataaaggttatgatacaatgttaatatgcatccagtaaaatgtaaaatgatacctagtgtttaatctcaatcatgtaaagaaaagaaggaaaaaagaacaggagaaagtatggcagtggccgttgtagtaaccgctgttgtttaattgancccctcccttcct

SEQ ID NO: 12027 - DNA, 345 bp, Homo sapiens
gggaagatgcaaagcaaatgtgaaatggttcctgattgaacagagaagtggaaggggcaactccctatgctcacacagggctcagcacatagaggcctagctacggcagaaagagggatgaggctaaaaatgagaatgagtggaaagtttgaatttaattgattagaccaaccccaacatccagacccaaagacctttgctgactgggcctctgaggttcacccactgtattgagaaactgacccagagaggccccttttagttctttttgacatttaaaccataggctactttgatgaagataaaaattattttaaaaagggttgtcaaaatattttctaatgc

SEQ ID NO: 12028 - DNA, 1565 bp, Homo sapiens
aagcgtttgtggtgccagagaaaagtagccagagctgcgcagtggcggccgcgttctgtggttttccgctattcccccagacccgcaccttctcggcctctttgcggagaatcgtgaccaagatgtggaacagtggattcgaaagctatggcagctcctcatacgggggagccggcggctacacgcagtccccggggggctttggatcgcccgcaccttctcaagccgaaaagaaatcaagagcccgagcccagcacattgtgccctgtactatatctcagctgctttctgccactttggttgatgaagtgttcagaattgggaatgttgagatttcacaggtcactattgtggggatcatcagacatgcagagaaggctccaaccaacattgtttacaaaatagatgacatgacagctgcacccatggacgttcgccagtgggttgacacagatgacaccagcagtgaaaacactgtggttcctccagaaacatatgtgaaagtggcaggccacctgagatcttttcagaacaaaaagagcctggtagcctttaagatcatgcccctggaggatatgaatgagttcaccacacatattctggaagtgatcaatgcacacatggtactaagcaaagccaacagccagccctcagcaggggagagcacctatcagcaatcccaggaatgagttgaagcagggaactttggtgggaaatagcttcatgccagcaaatggcctcactgtggcccaaaaccaggtgttgaatttgattaaggcttgtccaagacctgaagggttgaactttcaggatctcaagaaccagctgaaacacatgtctgtatcctcaatcaagcaagctgtggattttctgagcaatgaggggcacatctattctactgtggatgatgaccattttaaatccacagatgcagaataactggatctaactgggtacctgagatattttacagctggacctagtttcacaatctgttgtctccagctctgcatatgtctggccagggggcttctaggaagtaggtttcatctatcaaatgtctcctctgacttccttttgaaacttactgctcttctgttttattttgttttgtttgaagctcagagggagatgggcaattgacagggatgcaatcccagggtgggatttcttgaggaagttacaaataagcttgttacaacatcaagatagatggaattggaaggatgctaccaggagagtacttacatagtgctcaggagtttctcttcttaaaatgtttactgctgaaagatgagcaggaccagggcgttataggcagagcccctagccagaaacctgcctggcctctgccctgttttcatttcccactttggttgtgtggcattactttcagaattgcactttcctgcttgtcatgactttttgacacacttgccatgacgtgtgtttctgtgaacatgaagttctgcggtagtgcctccaggggcagaggaaaagaagaagtgttactgcattttgtacaaaataaatacagtcatatgtttaataaaacagttctaccg

SEQ ID NO: 12029 - DNA, 553 bp, Homo sapiens
  misc_feature (1)...(553): n = a,t,c or g
gggagatgaggtcagagtgggaggtgcggccagatcattctgggtattataggccatggtcaagagtttgtattttatttcacataaaatatattttggggaggtattggagagttttcagcaagagaatgacctatctttgggggttgaatcacaagcctaccgataatgtaaactgccacagtcagttcctgccctgacagaccaagctctcttccttgatggtgggcaaatttggggttgctccctattttaaaaccattgccacccgtagtccccactgtagaatttccttaggtggccatattatatactacgtgaactctggcttccttggttttatacctcatgggctgagttgttaagattcctactcttttccggcattggggttgggggtgttagggnnnnnnnnnnnnnnnnnnnnnnnnnnnnnnnnnnnnnnnnnnnnnnnnnnnnnnnnnnnnnnnnnnnnnnnnnnnnnnnnnnnnnnnnnnnnnnnnnnnnnnnnnnnnnnnnnnnnnnnnnnnnnnnnnnnntgacccagctaatt

SEQ ID NO: 12030 - DNA, 1414 bp, Homo sapiens
  misc_feature (1)...(1414): n = a,t,c or g
acaaaaagcaacaagagtttaattctctttttacatggccacaggtctcttcagtcaggggaacttcagctggtgcctctctcttgcagctatgaggcgacagtgtggtgacatgcctcatacagactgtcccagtaagccaggacaagtcaccattaaaatcttgcatgaacagccctgggcacgtgggaatgttaagaaagagccaccgcctccttagtcagcttaaccacagctccaaacgcagtttgtcccagctgggcaaacgcctcaaacaccaatcatgcgtcgtgctcctattctgggtttttataaaacacttttatatagcgatatagatagcacagtaaatgtgcttctggatgcactctaaccttaggagggacagggattacacactgtgggggcggcgcccaggcccaatcttccacagtgggagaaagtgcgagggttaaatacacgtggcggggtggcagacggcaggaagttacagagcgccacgctccacgtccttccacgcgactgactcatccaacactcagaactcgccttctttatccccttggtgggtaggagcagtaacaaaacaatgtcagtcattttctaagggtggaggatgtcaaactgtctggtaccgagagagcaattcttatccagaaatcatctagaaataattgttgaaggtcagcctgacccatggccccaggctaagggctgctctgtaaagggcgggactggctctgggggtctagggctgatgcagtatctctcagacacttgcacattcacacacccacacgccccaggggaaagtgcacttccaatgctgatacaaaaatagattggcacactctttgacacaatgagggtatcttttaaaagttttcccccaacttctgcagactctcttcccccgtatgctcaagcccttcacactccaagttggaacagatctggagaaggccctggaccacgcttgcaaagtttgtgaatgccggggagaaagactgggctggggcagctagggattctcgctagtggacagagggcagggcctctctgttctcagcacacacctcctcttcccgtgcttgaggagtccatagctcatggctcctcttggctacacacccaagactccttggaaagtttctagtactgcttctccccaaactatgtcgagaggaagaaaagtctggtattctgagttctactttttttcatttccgagtagtaagtaagtgctgctccaccaagctgagaagaaattgcccttggctgtcnntctggggccagtgctaggaactctggaccagccgtctgtagtggggcatganttcgtgctcgggcaagtggagggcgaattccaaggccactaacaccgggaattcaaaggcaatcagttctcgcctgt

SEQ ID NO: 12031 - DNA, 414 bp, Homo sapiens
aaaaacgttgcctgctacctctccatttgggaagcccagggcatgactgctggtgggtggtgacaggcacacagcgggcaaagcattctttggccagagggaggtgggaggaccagtccctgccacatcctcaatccacagacacccaccagccagcctttactttggcctcccactagagggtagtggggcaagaacaggtggtcccaatggctgggcaatcagcacttctggcgttcccacctggactacctctatacccttctccaattaaaaggaaagtctcactttgggcgggaaaccactattacataagggatggacactacacatttagaatgtggacacttggttagggcagtggaactataaagatagcagccagttttcttccttgccttctcctgaaggtaa

SEQ ID NO: 12032 - DNA, 736 bp, Homo sapiens
ttttttcattatttaagaaaatttatttctacttctacagcagaaatacggaaatggtacaggtttgggcaaatcatactttatgaaatggatcctcataccacatcctttttaatacaggcacgttataacataattcctggattttcaaaatccagccaacacggatacctctgctactctgttttggccttcatagctgcttcctctttcagacgagctttcttttctaagttcaagcttgttaaagtctcgtgtctttgggcagccttcttgccctcaataaccatgaagatgcatcctaccaccgtcagggcaatcattagatagctgatcttcactcgcatcttgttctttgcagcatcaagcatctccaacgagacagtctctgggatttcatcttcctttttgaagcgacctgaccatatgaggatctttttctgccaatccgtaggtttgtgtaaaggcactctgttgtaagtgcgggatggagctccgggactttcctgtggttttgtgcaaaatccatttattctcttcaaatcagagcttctggtaagccttagagatgaggaaacatctctttcacataacctaaaacagcttcctgctgcccaggcgcagaccgctgaggctccccatggccacttgctactccgccgaccagcgcagaacttcgccggggacggtggcgctggtgagctcaatgtcacccagcgttggagtgggaaggacg

SEQ ID NO: 12033 - DNA, 3292 bp, Homo sapiens
ccggctcgaagcgcaacgaggaagcgtttgcggtgatcccggcgactgcgctggctaatgcggtaccggctagcgtggcttctgcaccccgcactgcccagcaccttccgctcagtcctcggcgcccgcctgccgcctccggagcgcctgtgtggtttccaaaaaaagacttacagcaaaatgaataatccagccatcaagagaataggaaatcacattaccaagtctcctgaagacaagcgagaatatcgagggctagagctggccaatggtatcaaagtacttcttatgagtgatcccaccacggataagtcatcagcagcacttgatgtgcacataggttcattgtcggatcctccaaatattgctggcttaagtcatttttgtgaacatatgctttttttgggaacaaagaaataccctaaagaaaatgaatacagccagtttctcagtgagcatgcaggaagttcaaatgcctttactagtggagagcataccaattactattttgatgtttctcatgaacacctagaaggtgccctagacaggtttgcacagttttttctgtgccccttgttcgatgaaagttgcaaagacagagaggtgaatgcagttgattcagaacatgagaagaatgtgatgaatgatgcctggagactctttcaattggaaaaagctacagggaatcctaaacaccccttcagtaaatttgggacaggtaacaaatatactctggagactagaccaaaccaagaaggcattgatgtaagacaagagctactgaaattccattctgcttactattcatccaacttaatggctgtttgtgttttaggtcgagaatctttagatgacttgactaatctggtggtaaagttattttctgaagtagagaacaaaaatgttccattgccagaatttcctgaacaccctttccaagaagaacatcttaaacaactttacaaaatagtacccattaaagatattaggaatctctatgtgacatttcccatacctgaccttcagaaatactacaaatcaaatcctggtcattatcttggtcatctcattgggcatgaaggtcctggaagtctgttatcagaacttaagtcaaagggctgggttaatactcttgttggtgggcagaaggaaggagcccgaggttttatgttttttatcattaatgtggacttgaccgaggaaggattattacatgttgaagatataattttgcacatgtttcaatacattcagaagttacgtgcagaaggacctcaagaatgggttttccaagagtgcaaggacttgaatgctgttgcttttaggtttaaagacaaagagaggccacggggctatacatctaagattgcaggaatattgcattattatcccctagaagaggtgctcacagcggaatatttactggaagaatttagacctgacttaatagagatggttctcgataaactcagaccagaaaatgtccgggttgccatagtttctaaatcttttgaaggaaaaactgatcgcacagaagagtggtatggaacccagtacaaacaagaagctataccggatgaagtcatcaagaaatggcaaaatgctgacctgaatgggaaatttaaacttcctacaaagaatgaatttattcctacgaattttgagattttaccgttagaaaaagaggcgacaccataccctgctcttattaaggatacagtcatgagcaaactttggttcaaacaagatgataagaaaaaaaagccgaaggcttgtctcaactttgaatttttcagcccatttgcttatgtggaccccttgcactgtaacatggcctatttgtaccttgagctcctcaaagactcactcaacgagtatgcatatgcagcagagctagcaggcttgagctatgatctccaaaataccatctatgggatgtatctttcagtgaaaggttacaatgacaagcagccaattttactaaagaagattattgagaaaatggctacctttgagattgatgaaaaaagatttgaaattatcaaagaagcatatatgcgatctcttaacaatttccgggctgaacagcctcaccagcatgccatgtactacctccgcttgctgatgactgaagtggcctggactaaagatgagttaaaagaagctctggatgatgtaacccttcctcgccttaaggccttcatacctcagctcctgtcacggctgcacattgaagcccttctccatggaaacataacaaagcaggctgcattaggaattatgcagatggttgaagacaccctcattgaacatgctcataccaaacctctccttccaagtcagctggttcggtatagagaagttcagctccctgacagaggatggtttgtttatcagcagagaaatgaagttcacaataactgtggcatcgagatatactaccaaacagacatgcaaagcacctcagagaatatgtttctggagctcttctgtcagattatctcggaaccttgcttcaacaccctgcgcaccaaggagcagttgggctatatcgtcttcagcgggccacgtcgagctaatggcatacagagcttgagattcatcatccagtcagaaaagccacctcactacctagaaagcagagtggaagctttcttaattaccatggaaaagtccatagaggacatgacagaagaggccttccaaacacaccattcaggcattcgcaattcgtccgactagacaaaccaaagaagctatctgctgagtgtgctaaatactggggagaaatcatctcccagcaatataattttgacagagataacactgaggttgcatatttaaagacacttaccaaggaagatatcatcaaattctacaaggaaatgttggcagtagatgctccaaggagacataaggtatccgtccatgttcttgccagggaaatggattcttgtcctgttgttggagagttcccatgtcaaaatgacataaatttgtcacaagcaccagccttgccacaacctgaagtgattcagaacatgaccgaattcaagcgtggtctgccactgtttccccttgtgaaaccacatattaacttcatggctgcaaaactctgaagattccccatgcatgggaaagtgcaagtggatgcattcctgagtcttccagagcctaagaaaatcatcttggccactttaatagtttctgattcactattagagaaacaaacaaaaaattgtcaaatgtcattatgtagaaatattataaatccaaagtaaattacaaaaaa

SEQ ID NO: 12034 - DNA, 772 bp, Homo sapiens
gatttctattcattgactaaactaataaagttatttaattgaccaaatttttatatgtagtttccaggagtcttaactataaaccacagatttcttctttcccctctgtcacccaccaccttctggtatacttatacagcctacttgcattattgtaattttaaaccattttcagtttcagatgctttagaaatagaccagttgtttttgtggtatattgcaacaacgggaagattatattaccaataaaatgagattaaaaaattagagcttttcccttaattacataatgtttacaaacttggtgtagatgtgaccgtgttattcataataacaatcctttgtgtggcacagggcatcatgggaaaataatggagtcccagggggtagaaggcactcttttttgaccagtttctgtctccaataaagcaggactatagggatcgtgcctgaccctgaaaaagtgttggagacttttatcttttactctttataactgtgttatttcccactagcctggactggaaagcagccttggactgcattggaaccctgactgctcggtttacagtaccaaggccccagttttctgagaacccacctcatcctagatcaagtctgctttagagtgcattttagaatgcacagtgacctgctaaaacagaaaaaggatgtgaatggatagtgacatgtatggatggcaggacttggcacctgaccatggcatttggggcttctctttccctttgaaatgcaccattactttaaaaac

SEQ ID NO: 12035 - DNA, 68 bp, Homo sapiens
gagagagaactagtctcgagttttttcttctctttacttttctgcattgacatatatttttactatgc

SEQ ID NO: 12036 - DNA, 1835 bp, Homo sapiens
tgccaaggctccagcccggccgggctccgaggcgagaggctgcatggagtggccggcgcggctctgcgggctgtgggcgctgctgctctgcgccggcggcgggggcgggggcgggggcgccgcgcctacggaaactcagccacctgtgacaaatttgagtgtctctgttgaaaacctctgcacagtaatatggacatggaatccacccgagggagccagctcaaattgtagtctatggtattttagtcattttggcgacaaacaagataagaaaatagctccggaaactcgtcgttcaatagaagtacccctgaatgagaggatttgtctgcaagtggggtcccagtgtagcaccaatgagagtgagaagcctagcattttggttgaaaaatgcatctcacccccagaaggtgatcctgagtctgctgtgactgagcttcaatgcatttggcacaacctgagctacatgaagtgttcttggctccctggaaggaataccagtcccgacactaactatactctctactattggcacagaagcctggaaaaaattcatcaatgtgaaaacatctttagagaaggccaatactttggttgttcctttgatctgaccaaagtgaaggattccagttttgaacaacacagtgtccaaataatggtcaaggataatgcaggaaaaattaaaccatccttcaatatagtgcctttaacttcccgtgtgaaacctgatcctccacatattaaaaacctctccttccacaatgatgacctatatgtgcaatgggagaatccacagaattttattagcagatgcctattttatgaagtagaagtcaataacagccaaactgagacacataatgttttctacgtccaagaggctaaatgtgagaatccagaatttgagagaaatgtggagaatacatcttgtttcatggtccctggtgttcttcctgatactttgaacacagtcagaataagagtcaaaacaaataagttatgctatgaggatgacaaactctggagtaattggagccaagaaatgagtataggtaagaagcgcaattccacactctacataaccatgttactcattgttccagtcatcgtcgcaggtgcaatcatagtactcctgctttacctaaaaaggctcaagattattatattccctccaattcctgatcctggcaagatttttaaagaaatgtttggagaccagaatgatgatactctgcactggaagaagtacgacatctatgagaagcaaaccaaggaggaaaccgactctgtagtgctgatagaaaacctgaagaaagcctctcagtgatggagataatttatttttaccttcactgtgaccttgagaagattcttcccattctccatttgttatctgggaacttattaaatggaaactgaaactactgcaccatttaaaaacaggcagctcataagagccacaggtctttatgttgagtcgcgcaccgaaaaactaaaaataatgggcgctttggagaagagtgtggagtcattctcattgaattataaaagccagcaggcttcaaactaggggacaaagcaaaaagtgatgatagtggtggagttaatcttatcaagagttgtgacaacttcctgagggatctatacttgctttgtgttctttgtgtcaacatgaacaaattttatttgtaggggaactcatttggggtgcaaatgctaatgtcaaacttgagtcacaaagaacatgtagaaaacaaaatggataaaatctgatatgtattgtttgggatcctattgaaccatgtttgtggctattaaaactcttttaacagtct

SEQ ID NO: 12037 - DNA, 228 bp, Homo sapiens
ccgagatcggcccgcggatgacactgcagctcatcaaggtccaggagggcgtcggggagggcaaagtgatgttccacagttttgtgagcaagacggaggaggagctgcaggccatcctggaagccaaggagaagaagctgcggctgaaggcgcagaggcaggcccagcaggcccagaatgtgcagcgcaagcaggagcagcgggaggcccacagaaagaagagcctgg

SEQ ID NO: 12038 - DNA, 484 bp, Homo sapiens
ccctccccaggctctccttctggaattggtgtgggctctcacttccagcatagtcggagccagggtgagcgtcttctttctagagaagcaccagaggagctaaagcagcagcccctggcccttgggtattttgtatcaactgccaaagctgagaatcttccccagtggttttggtcatcgtgtccccaggctcaaaaccagtgccctctcttcttaaaggcttcgctgcatcaccacatttcagtagcacagacagacgaacttctgcctgccaggaattctcagcgggttccacaccctcttgactccaaaaccacgtcggatgttttaaggtttgttttggagcagtacaacgctctgtcctggctcacgtgcaatccggccacccagggaccgtacttcctgccttcccgttccactttgtgggtgctcactcagttgtacaatgccatcatgaatatactttaattggaaaagcacttgt

SEQ ID NO: 12039 - DNA, 340 bp, Homo sapiens
gacaaccctgtcacataactgggatcatccccattttacacatcagagaaattaggggaaagcctggaggactcactaatacattgcagcttcggggcggagctgtgagtcccttgccgcatgtattggactccaagggggccacttcagagcctgttgctgagacacttctgttctcgcgggtgtaacagcaagtactcagtgactgtgtggtggggggagctggggcccgggcattaatagatgatccacagagctgtcattctaagtctcagtgcagagccataggggttcccagcagagaatggtcactgaggtcagggtgcctccaccacaggag

SEQ ID NO: 12040 - DNA, 495 bp, Homo sapiens
gcagccacagaactcatttgggtgaagcagtggtccaaatttgtccaaatatgtaagcatcagttaaagaaaaatctcttccacagactctaccctcatttttccaggaatgtgtatggttggacatagtgggaacaagtttaaaaagtggggacttctgctttcaggaagatggagtagatgtacattgccctattcctcccactaaaacaactgaaaaccttgagcattatatgtaaaataaacataagaagactgaaaggtggagagaaggcatacacactagggacctcagcacccaaggaataacacggtggtgagttccatgggttttctttttgcctaatatatcccaggcttggaactgaagaagctggcagcctggaaacagcaatgggtacagacttgaaaaaccctgttctctttaactcgaaggacgaggaaaaagacagcctagcaagccagaaaacttttagaccataactgctgtgctct

SEQ ID NO: 12041 - DNA, 325 bp, Homo sapiens
gagactattgaaaaagtctgtgtgaacagagagcagttcattaagcccattgctttcagtaatgtggccttgaccccttctgcttcccccttctcccatggagcatggcagggcttggttatttagagtccatacatgcaagccattgagagacttgtttgctcaaatgcaagtttgctcaaaaacaggtcctgaaggcttgcttaggattacagggatgctgggtaagaacaccgttcctctctctcgctggagaaatccctgtttctctgactccctttgtgatcctcacagtaatgtattctgtgccactgtaggacacaag

SEQ ID NO: 12042 - DNA, 240 bp, Homo sapiens
  misc_feature (1)...(240): n = a,t,c or g
ctggagagacatgcagctncaganattgctgcagcagcatagatgttaccatattnttaaatgagctttcctcatccggctccctaagcaagcgctgttggccggtgggagtgactaagtgctccacctgtgggtgtccttcttaatgtgctgcttttgttctgtataaattcacaccacctcactcccaaaagtacttcctgtggctcagaaaaatatgttcaataagattttggatag

SEQ ID NO: 12043 - DNA, 323 bp, Homo sapiens
gctagtccagttgggttaccatccattgacccatgcaggcagcgtccccatcttcctcttctgctcctctggcaagtttttccggcataccaggaacaagggttttcctgcaagggccagctcctgttgggactcctagtttcaacagacaacatttttctccccatccttggacaagcgcctcaaactcatccacttctgccccaccaacgttgggccaaccaaaaggagtcagtgccagtcaagatcgaaagatacctcccccaattggaacagagagactggcccgaattcggcaaggagggtctgttgcacaagccccg

SEQ ID NO: 12044 - DNA, 333 bp, Homo sapiens
ggaatatttctatcatcatggaagttctattgaatggcattgctctataggatcaagactatgctagtaatttaactgcttgatagaacaaatgtcaaatttcttctaaggaagatagtagactccaaagtctttttaatatcatccaaaatgctcagcatacaatttttaaaaattactaattgtgcaaagaatcaggaaaatgtaacctacagtgaagagaaacaacaggtgataaacatagactcacaagtgacccagatgttagaattacaaaagacttaataactataataagttaaagagtctataggaaaatatatctgtagtagc

SEQ ID NO: 12045 - DNA, 498 bp, Homo sapiens
cagcctggtcctcagagtgtggaattaacacctttcctctagcaactgtttgtgctgctgagaacagcacagactctctggcagcctggttctctccagagggaagcctgtgaagcagaagaaacatatggcatctgcactcagggcgcccagttccatccggccttgctataaaatgactttgcctttccttttttaaaattacaaaaataattcaaccaatacataaacatatgaagtgaatcacggagggccttcctgcgatatctttttttgcctaccatttgtcatggaatgggtaaaggggaccacagagggaagagacgctgccccttcgcagggccatggcagtcccctgggctgcgtctccacggtgcttcctgtgaaacgctgttaccacggcaccgcactggagaccatgaaagagaagagtttgacatctcagctgtctttgctataaatagaaataaataaaccttaactaaaaaaaaaaaaaaa

SEQ ID NO: 12046 - DNA, 764 bp, Homo sapiens
gtaagtcacagtgcttaaatctcaggatttttcattaggagagacctgtcgttaaggatttgtaggtataattgcttagcctccattattggtgcttgggatagagaggttttagatttttgttttttttttgttctgcctcaaagctcagtttattgaagacatttgtaagctattggatcatcacttgaatcaagattttgactagtgagcttaattgtccatttcttacaatttcaaagttacagtctcagaaatggttaattttaataactgtcctatcataaattaatgttggaataaattgaagttgttgataaatacttcatgaaaactaaagtctgaaataaattacttgttttatgtccaatagctactacatttgatagaacagttttgaggaacatttcattcttgaacgcagcatctgacatggttctcagcaagttggaatagtaaggattattggcttgtttcgatgagtggaagcggcatgtttgtagcatacaagttattcaataatcttgtgctgatgacctaaaaatatgtcttaactattcatcaaggaaagcctggtgaagcctttacttgttactacttcaacagttggaattagttgctctttttacttgatgaaacaaaactatacctctgaatatttatggatactttttactaaatcaggcttgtgttcttaatccaaattagtaaagttttatggaagctgaaatgtaatacagtagtctccccttatctgtaagaga

SEQ ID NO: 12047 - DNA, 1902 bp, Homo sapiens
gtgtttgctcatctgatgctttttagttcagttacatgtaacatcacatttttttatcacgtgaaagatgttagatttgtttgcttataaatattttaccactcccacataaaatgctcatagtttccgagaggaaagagggaagattctctcttcttttaacagagagatgattgctctgtatacccattgcttcctccctgaggctgtcccaaagtgaacactgatggagtggtcaaaatcataaggttgtagcaagccaaagatacgtatgtgacagaagcacataagcaataagcagaaaaccagaagtgcatgctgtgatgcctgtgactccttcatcccgctcagtgccatgtcctcttttgtgatcttccagaaagctccaggattcatttgagttccacatccaagtaacagatgaattatattcatgttgtaatgcattttgtggagtttacaaaaccagtgtctgttaaaactttgggaaaatgtcttaggaaaacgttggtgcttgggtgatgctttatttgtttaattatcaagaacaaattatggccaatgctagtttctgcttaaccaaaatactctgtgtatatattatacatatataaatacatgggattgtgtatgtctatatgtgtttaaagcttactatgtcttcattttggcttccatgactatcttttatacatggaattccttaagattgagaatatgtcactgagtgaatgatacctgcagacagtcagttgatatatgtagagttcagaatgactggttttctcatgtgcctttggccatggattcctcaacactggattgtataacagaattttggggggggagcttttaaaaaataatgactgagtctcccaccagaccgattacatcattctcttgtggcgggacccaagtagaattgccttttcttttaaagttctccagatggagctaatatgcaacaaagttgaaaaccactgatcctgggggtgtcttgttaattttgaagtaaaagtgtacagaagacgtagtggtatgagaaagggccatttttaagacagttacctgttgtgctgctgttacaatatataatgaaaccaagtcaggggagtgaatttatcaatcttttgatgtaaagtaaaaacgtagttcacacttcaggagagaacttcatagcacaatgtctttctataagatatttttaatgatttagtattttacaacatttgtttaccatattttgatataccatttttttctatctgcccagttttattaaaaaaactatatattattttctaaagaaacaatcatatttttatacaaaattatgttttcaggtaacgaaatagatgtagggtacagtggaacataagcagtgttacccctggctgggagtcagtattatacaacaaatggtgagctggaacatgccctgtctgtgctgtccctcctgtgctgggtcgcggatgtgtaggcaacattgccttatcacgctaggttcacctgacactttaaaaggaaaaaaagttccatagagttctgtggtcacaaaattgttttgcttttatcaaatactttaatagaaccaaagttgcagatattggaatgtatggaagtatctcagtctctgcataagaggattaaagtatgaaaggatcatttaatgactgttttacttataagtcattaagtaatccaccatttcttatggatgatgcttaagcctggtgaggtttgtactctaaggagcccagatcataatgcagtgcatttccttagcccttagagtttcttgcaaacatttaaaaaaagacatatttaagaaagaaagataaagaaaaaccatatttaattccggtaacaggtaccgccttaaggtttaattccccccacctc

SEQ ID NO: 12048 - DNA, 547 bp, Homo sapiens
acagaactggctactctctgactatgggcagtgggaagtatgtggacactatggattcaaacagcaacccaatactgttggcccctgaggtgtgctgcttgcccctttatcaaatatacactgtgccctatggggagtccagtccccactctgggctgatgagaggagggtccatgttaatcactgagacccgtttaaaaacaaggctccctccaactacaactactgggaaaacttacatctcctacacacacaggatccagcgtaggtagtcgatagatggcaagactgttggggttgtctcctccagtggctagcagtgttctagaaggattcagctcgatggcatggataccacagccctgctgggttcacacctccaggctcccggtctttcagaatggggatcttggtgatctggcttgtctggacatctacgacaaatagctacaagaaaaaatggatacagaagctgaacataaatttaacgtggccaatacagggtataaacatccaaatgttcaactgttcatcaacatttaattaa

SEQ ID NO: 12049 - DNA, 809 bp, Homo sapiens
gagttgattttgggtaacattaaatgtcaacaggagggtgaaacaaatgaaaataacaccagtccctcaagtcacgatatagcagctctagtctctgccaggcccttctttactataatgttgcctaatgactggcaacctaggaacaattgttaggtgcttgtccccaaactagctcttatttttcagaactacccataaggaatgggatccagggatgtgtgataggaatggggatggagtggggacaccaaatgaggactaatctagagacctgagctattcagatcagctagtctagtcacttgctaggaatggggatctttagaggcaccagaaagatacattttctaagagatacaagagcagtagatatgccattctggcagctttttaacaaaagtacaaggcattcaggatgaaccagatggttaggaaaggcttagaaccagaagtctgaagggccactctggtcagaacttgatttcaggagataatctgtcctcagaaaaggggaacacttctgtctaagacaagacccaaacggcaattaattagaggctgataaacttgctttatttagatatgtttaagtgcagactaaatctccatcccacagggctatctatactgcagaggcctgcaagttcccagtgacctgcctcatcacccctctgccctctgttgctgcccctctcctggctccattggcttctcactgctcaccaaacaaaccagacaggtgcctgcctcaggccttgcttgtcttctggctggaggttggggaaactcgtgcagcacctgctccc

SEQ ID NO: 12050 - DNA, 497 bp, Homo sapiens
cttcattcttcgccaggctctctgctgactcaagttcttcagttcacgatcttctagttgcagcgatgagtgcacgagtgagatcaagatccagaggaagaggagatggtcaggaggctcccgatgtggttgcattcgtggctcccggtgaatctcagcaagaggaaccaccaactgacaatcaggatattgaacctggacaagagagagaaggaacacctccgatcgaagaacgtaaagtagaaggtgattgccaggaaatggatctggaaaagactcggagtgagcgtggagatggctctgatgtaaaagagaagactccacctaatcctaagcatgctaagactaaagaagcaggagatgggcagccataagttaaaaagaagacaagctgaagctacacacatggctgatgtcacattgaaaatgtgactgaaaatttgaaaattctctcaataaagtttgagttttctctgaaaaaaaaaaaaaaaaagtcg

SEQ ID NO: 12051 - DNA, 129 bp, Homo sapiens
  misc_feature (1)...(129): n = a,t,c or g
aaaaaaataaaaaaaattatgtcttctgaggaaattactaaagttcagacactgataaatggataattaaaatgtagtgtgtccttacaatggaatattacttggtgataaaaataaatgaatnactta

SEQ ID NO: 12052 - DNA, 404 bp, Homo sapiens
tttttttttttattattgatactttttttattacttattcaatatcattatatattttatacatttttgctctggttaagacttctggttcttactggttcaatcttagaaagttgtgtatagttaaaactttatcagttttctctaaattttttagtttgcatacatagagatgttcataatagtctttgaaaacttttcaatttatgtagaattcattgtgattttacatttttaacattaaatagatgcagaataaaagcttgacaaaattcaacatttcctcatgataaatctctgaaaaatttaggtataggaaaaaggcacctcaagccaataaatgtcacatataacaaaaaatgcagagctaattacatactaaacaaggaaatgtaagattttac

SEQ ID NO: 12053 - DNA, 337 bp, Homo sapiens
gaaagaaaagcagtaaaattttattgggaaacatttgagcttttcattacatatttgcaattgctatgtatgtgcacataggttcagtagtatgttgcactagcatttggaaactataatctgtggaaagtgtgacactcctagattggcagatatttgcgtgtttgaattgtgatacgtgaccactggtcttatttttgtgtcaaaaggatgatcttttccaataaagtcttaagtctttaaaaaaaaaaccttaactgctgaatgtgcctcaattaatataatagataatattcttgagagttatggaagatggatgtaccagaaaacttcctct

SEQ ID NO: 12054 - DNA, 1839 bp, Homo sapiens
tttactccatggtaccaaatgcaactattcaccaggatccccagtctatttttgttacgaatccagttactttaacaccacctcaaggcccaccagctgcagtgcacgtttcttcagctgtgaacattatgaatggttctcagatgcacataaacccagcaaataagtctttgccacctacatttggcccagccacacttttcaatcacttcagcagtctttttgatagtagtcaggtgccagctaaccagggctggggagatggtccactgtcctcacgagttgctacagatgcctctttcactgttcagtcagcgttcctgggtaactcagtgcttggacacttggaaaacatgcaccctgataactcaaaggcacctggcttcagaccaccttcccagcgagtttctactagtccagttgggttaccatccattgacccatcaggcagctccccatcttcctcttctgctcctctggcaagtttttccggcataccaggaacaagggttttcctgcaagggccagctcctgttgggactcctagtttcaacagacaacatttttctccccatccttggacaagcgcctcaaactcatgtgactctcctattccatctgtttcttcgggatcatcttcacctctttcagccacttctgccccaccaacgttgggccaaccaaaaggagtcagtgccagtcaagatcgaaagatacctcccccaattggaacagagagactggcccgaattcggcaaggagggtctgttgcacaagccccggcggaaccagttttgtcgctcccgttggacacagtggaatctggtcatttggtgtcaatgctgtgtcagaaggcttatcaggttggtcgcaatctgtgatggggaaccatcccaatgcatcaacaattatcagacccaagcacattctcccaacatcagccaatggagagagatgattctggaatggtagccccctctaacatttttcatcagcctatggcaagtggttttgtggatttttctaaaggtctgccaatttccatgtatggaggcaccataataccctctcatcctcagcttgctgatgttccaggaggccctctgtttaatggacttcacaatccagatcctgcttggaaccctatgataaaagttatccaaaattcaactgaatgcactgatgcccagcaggccagtctgcttccttcagtccctgctctcaaaggggaaatcccatcacctcagctaaccagaccgaagaagagaattggacggccgatggtggcctctcctaaccagaggcaccaggatcatctacgaccgaaagttcctgctggagtgcaagaactcacccattgcccggacacccccctgctgcctccctcagattcccggggtcacaactcctccaacagcccctctctccaagctggaggagctgaaggagcaggagacagaggaagagatacccgatgacgcacaatttgaaatggacatctaatccagtgcagatgacctggcatgtggagttacagagggatccctcatgccactgctgccaccacctcttcctggggcatccaaaggccagctggcctcatctaatctggaagggagtgacttgttagttccaggcctcctttagttctgaggcagctagaccagggataggagtgggcaacttgccaagcccttaactctacttcctcttcagtctgtggtactcctcctaaccctaaaccctctatgctcaggggctggaactggggaatggagtaagtcaccttctgactgcttagtaaacattcaaagaaaaaaaaaaaaaaaaaaagtcgac

SEQ ID NO: 12055 - DNA, 616 bp, Homo sapiens
ttttttaccattaaaaacagttatgaaatgtggcatcccgttgatgcaaggactgggaaagccatttttattttattttttttccccaaactcactgtaaacaacagtaactttggttaaaataaaaaaagtcttctatgtaggcagagctttgtcttttcaaagagggtggggtagggtcctgaggggagtaaggtgaggacaaggaacagaaaggcgtgaggtgatggatggtcgggaggtggaaggaggagagagaaacaggagagactttttcccaagggagaagctggacagcacagggtaaactggattctgaggtggttttgcataaataaagggcaacagtcagtttctaagttctccacacacgcacacacacacgggggggggaggtgtcccacggctgtcatgactggccaatcaaaaacagtacatcacaaatgacttgtgaaaccaatgagttcatcaacggtgataccgagatgtccaacagccgtgattcgtacagagtaaactctgagtggttctcgtccaccttggccaaggcaagcagcgcgcgggcagcccgccgcaatcatgtccacactagttggctcaaagggtgggttctgcc

SEQ ID NO: 12056 - DNA, 43 bp, Homo sapiens
aatggctgggagcaccaaaggtgagcctcacacttcacacttt

SEQ ID NO: 12057 - DNA, 484 bp, Homo sapiens
  misc_feature (1)...(484): n = a,t,c or g
ctggagaaaggccatatgcgtgtgaggtatgtgggaaattatttggtaataagaactgcgtgactatacatcagaggattcacactggagaaaggccgtatgaatgcagtgaatatgggaaatcgtttgctgaaacatcccgtctcgttaaacacaggagagttcatactggagaaaggacttatgagtgctgtcaatctgggaaacatcagaatgtctgctctccttggtcttaagagacttcgcattggaacggagtctcattctgtcacnnnnnnnnnnnnnnnnnnnnnnnnnnnnnnnnnnnnnnnnnnnnnnnnnnnnnnncttttttcttcataaactacagtttatataggcaaaactttcagtactaagcaattttagtctctgcaggctcttgtcttgaattaatacaacttttgttaattctcttatgaagttaaatcttcctgcttgtatgcaaaaaaaaaaaaaaaaaaaa

SEQ ID NO: 12058 - DNA, 639 bp, Homo sapiens
cgcgttgcgtctacctgcttttaaggacgcttatgatcacattgcgcctacccagagaacccaggtcgtctttctattttcaggtcagctgattagccaccttagttccatctgcaactttagttcccactggctgtgtaacctaacatagtcacaggctctggggactgtcacgtggacatctttgggaggccgttattctgcccaccgcaccctccgttcatcccctgccctggccgggcacctcgctctacccccaggaaaatgtgagctcgttttcctgctcggcatgtgctccccctaaggctctgctcctccctgggcctgaaagttccttctcagcctgagagggggcccttcgatctcaggcatgactcagcccggctgatgcctctgcagtgctgagtcaggatttggggccggctctcttgggtctgtccccttttcccaggtactgccttacaaagctgtggccaggaagtggccggtataaaggatgcccaaggtctttgtacgtgtgtaggagttagcgtgtttgatattgttaatataataataattattttttagagtactgcttttgtatgtatgttgaacaggatccaggtttttatagcttgatataaaacagaattcaaa

SEQ ID NO: 12059 - DNA, 64 bp, Homo sapiens
gtggcaggtaacggggtcgggattaaaatgtaaacctgtgggtgtcttctgctgagtcattagg

SEQ ID NO: 12060 - DNA, 364 bp, Homo sapiens
cactaaataaatgtcaagtgataaagcattgcagtggcttaaaaatgaagcttgcattcctgtaacccactaaattgttcatatagagcctcctgattgattttggttttctttgtgtgcaactttgaatccctgtctcatatttgggtcagagcaatgggagggacacatgacttgctttaaaattagcctcaaaactcattgtataacagctctcgttttcactaaatggaatgatttcttgagaagacaagcacagcatttgtaataagcctgcatagttgagtcgccatggagaaaattgtttacagtcaccaaaacactcaatgtttccacctgtaaaatggggtgtagatttagtttg

SEQ ID NO: 12061 - DNA, 180 bp, Homo sapiens
gcacgaggcctacagcacggtcctaaatatctcgcagtcagcaaacctgcagtttgccagcttgatccagaaggaggactcagacggtagcattgagtgtgtgaacgaggagaggaggctccagaagcaagtctgcaacgtcagctatcccttcttccgggccaaggccaaggtggcttt

SEQ ID NO: 12062 - DNA, 103 bp, Homo sapiens
tcagaaagatgaagtttccagaaactaagaaggtagcacaatatgtggcatcatactcagaaaggaagaccatgccatggggccagaaattcagaaacgtaat

SEQ ID NO: 12063 - DNA, 441 bp, Homo sapiens
gcactcacctatttgtttcattttatttttcttttaccatgtgaggagcacgtttttgtgtgactacatttatagagcagctattagatgcagggcacagtgtgagtccatttctatatgtcatttcaattcatctgtcctctaagtgaccaactcatcttgatatgcctgggattttctgggttttagcactggaagttctgtgtcccaggatgcccttcagtctcaggcaaaccaggacgagtggtcaacctataaaataatccatcatgcagatggagaaaatcaagggctcagagaagttttaagaacttagctgagctcaagaagctaattaggggtgggacctggctgtatccctcagaaaatccgtgctctgtccatcatgttgtcatgctgcctgttcatgggcagggactggtctcatttcactttgtatct

SEQ ID NO: 12064 - DNA, 751 bp, Homo sapiens
ctttttgaatagtttaatagttattatttaaataaggctttggcgtgcttttccacatttttaggtttttttctctatgtgtacaccttgcaagatgtatcattaactcatgaaaccaccagctcctcaggcaacgaaaagggaggtagaaagaacgccagaaaggtgggtctgtgtgttctggggtgcgtggggcccgcccccgaggaaggtgccaaccgtccctggagagcagaatcaccaggcctgggaaagccatgcgggttcgagagcctgcgccatggccatgctggggcagggcccaaggggtgcccaggcgtctgcccactgagaacactgttagtgcggagggatccacaggaggggagagcggcgccagggtcccggacacaggcaagggtctctagcccgccacccacccactgccctgggggtctctgtcaggcttctaggagacacagagactctgaggtcatgtctcgagggtggctacctggggaggctgggcagagtctggagacatttctggctgttgtctgactgggagctgctggctaggggtgggtggaggccagggatacctttaagcatcctacagtgtgcaggacagctcccaccaaggaggacagcccgccagagacacagcaaagtgggctgggattggggagctgcagcctggtgccagcctcacattggcaggcgggcgctgcaggaggcttgcggagaacacggcgaccgagggaggtttggc

SEQ ID NO: 12065 - DNA, 183 bp, Homo sapiens
ttttttttagattggtagaggtggtttatgtgccccatagccaagagaggtgtgcaccaaggaggatatcatcaaatctgacaatctggaaagcctttgaaactgttcttttcctaagcacagtattcagctgtgtcctcttgaacccatatctatcaggtcaacagctttagcccattccac

SEQ ID NO: 12066 - DNA, 180 bp, Homo sapiens
  misc_feature (1)...(180): n = a,t,c or g
gtattttgccttcacataccagacatgagacatgagagcagccttcctcctaggcttctnagaagagggcctgcttagcccaaagagagctgacaccacaaaaagctcccctgaagtgaatccacttaaaacggggaccaaaatttcatatgtggtggacactgggggataggggaaacc

SEQ ID NO: 12067 - DNA, 249 bp, Homo sapiens
gtgagcatataatgggttttcaatacattttggtgattaaatgaatatatacatgtatatgcggttatacaagtgtttgtatacacacatgcctgatatattagggtgatgcttataagtaacccccaaattttcgtgactttacctaatagaagttcatttttattcatttaacactctgaagcagatgttcatagttggtaggcagttctctgtgaaataattcagagatctgttttctcttctgtt

SEQ ID NO: 12068 - DNA, 623 bp, Homo sapiens
  misc_feature (1)...(623): n = a,t,c or g
ctattgacttctaattttttcacagtgtaaacgcagaatatatatagtctgtaatgatatagatttaaaactctaaaattttttaaatttctatcaaaataatagttcatagtttaaaatacgtaagctccaggccctgctcaacactaggccctactccccacaccctgcccctaagaagcaatcaatttcaaactctgtgacttctaaatgtcttgcttacacagctattnnnnnnnnnnnnnnnnnnnnnnnnnnnnnnnnnnnnnnnnnnnnnnnnnnnnnnnnnnnnnnnnnnnnnnnnnnnnnnnnnnnnnnnnnnnnnnnnnnnnnnnnnnnnnnnnnnnnnnnnnnnnnnnnnnnnnnnnnnnnnnnnnnnnngaccatggcctatttcttcatttttcaactttagacattttctcttcactgtagaaagtcatgctttagctaatccatcccccactccaatatcttttacaaagaatcaaattttctatgaccttgcaaatctgaaaatatttttactccgaaattcaaagttgggctaagcatgcaatcttaggttgaaaatcagattcactttgtattttgaatgaacagcttcattagagtctaagttc

SEQ ID NO: 12069 - DNA, 329 bp, Homo sapiens
gaactatctcatgaagaagttatgcagaaaatcggtgaactctttgctctaaggcaccgtataaacttgagttcagacttcctgattactccttagcattggccgaagagttaaggtcatgaatgaaaaacttcagcactgcatggaactaacagatctaatgcggaatcacctgaatgagaagagggcactccgcttggagtggatgattgtcatcctcattaccatagaggtaatgtttgagctgggacgagtatttttctgatcaagtgataaccaaagtgtcactgcaagagatattcaagttctacaatcaaaaattaaatgtt

SEQ ID NO: 12070 - DNA, 401 bp, Homo sapiens
  misc_feature (1)...(401): n = a,t,c or g
tcggcacagaggctccagggtctaaagctaggatttagctccaggcctggctctttcattttttttttttttggaaccacttttttaggtggaaacttccttggaagttgagaaatttgtcctaaggcttactaggaattggcaaaagggcaataggatatgtcattccaggacagtgtgtctgccagccaactggaatgcgaacagggcactctgcctgggaatatgagcagctgcgtagatctatccacttttgctggggatcaccagtgaggaaccatggtcaggctgcctgggtttaaatttagggtcactactcantagcaagtaaagagncaatattcnaacggctctccagacacagtttccttcaaccaataagaatggggntaaccgntcct

SEQ ID NO: 12071 - DNA, 331 bp, Homo sapiens
ggattcaaccaatgagccagggagttctagccactgtaaaaagatactatcgagcaggacttctccagaaatacatgggatgaaggaaatgacccaaaaatattttgggaaggaacttgacagtgttgggatgcaatttatggaagtgttcaaggagcttgggaacatgggtaaaatcaagtaccataaccaaagcatggaaaaaacttttccctggcaatgaagagaattcaggtatgaacattgatgaaggagccattttagcagctaatttaccaacagttttacagaacacagaagaatgtgaacatgttgacattgagaatattga

SEQ ID NO: 12072 - DNA, 66 bp, Homo sapiens
ccttagggagtcaatgtgtgtgttgctgcttatttaaatacagttcagttggagccccgagagtgc

SEQ ID NO: 12073 - DNA, 441 bp, Homo sapiens
tttttttttttaaactttgtatcaaatgtattttcagcaagacttgaagatttgacacaggcacagggaaaaggaacaaacttaaaaagagtataaataaggtcagttcaaactcacttctatttgaaatgtgttttaaaaacaattttagtcttatattttaaaaatatgattgagaattttttttttctttaattcaagtcttctcaatcatcttaaaatacttgtgagctgaactgatacattaaggcaaatttttattttaaatactcatttcattgatgaactctgtttcatttaaactgctaatccagggagaaagttttcgtaaaaaacattttattgctacaaagggaaacatggtcacaaagagcctttaagcgtatcttaacgcaaattactattcaatgtctaatgcagtaaaaaaatacacagagcaca

SEQ ID NO: 12074 - DNA, 729 bp, Homo sapiens
ccgcgtcgacttttttttgtcagtagaaggtgatttattggaaagtttagaaacatgtggcaacaagacaggtagatctctgcactgttactccccagaccgagagcttacataccatatagaaagagcataagtgcttcagaaggaatgtgtaggatcgctgaaattgacccctcagggaaaggcaagaatgctgtgtctcatagcccataatttgccaaaggacaggacttaggtaagtacatgtttatgataacatcaaggttgtcttggcttacacaagcaacagtaagtaaagtagaaatcttgaggcattcctgggcctggggttaatcagaagtcaacatggcagattagcatccaagatgaagtggcatcatcctgcacagtgtccaacgttgtacacagtgtctttaagatgcagaagtagggttgaaaccacactgaagtaggtgacactctcttcttccttatccgggaatgagttggttgttggtgatcatcagtctgatccactccaagagagatcgtagcagggtccagtctgtgctctcctgcgatcattcgccatgactagaagttaaaactacacaaacgcgcgatcaaaacccgggacccgcacgcccagatgaccgggacgaggccatacttcacatcttctctcacagactcacaattacgcaacggtcacctcaaacgactttatggcggacactcccggaccttccg

SEQ ID NO: 12075 - DNA, 361 bp, Homo sapiens
cacgaggggttctctaaaaagaatactacgaccgcagagctgaaccttgctggcttcttaaacatcactgtacacacagatcttctgaggatcttgttaagatgcagtttcagattctgtgggtctggagtggggcctagaattctgcatttccagcaagcccccagacaatgtggatattccttttcaggggaccacagtcaggggggatgctgatagactatatctactgggccaaaataaaaattaaaatcttatacacaagctactaactcttcctttctcattgacaaccactattataatgtcttattcattctaatgaacatattttttaacttctaaaaaaaaaaaaaaaaaa

SEQ ID NO: 12076 - DNA, 278 bp, Homo sapiens
ggcaagctgccccagggatgactggtggagaaactgaaacatagggcccaatttgctcctcctgggccgtgaggcaggccagccacccccgaagcacagcggggcagcgctgcagtcatgtctgccatgatcttgacccacagctgcaccgcctccagtcccagccccacaaggcctgtcctgggtggacacgccgagtgtgagaggttccagttagttcctctgcccagtcccagccaggacaggctctgcctctggccagtttgaaagagcaggct

SEQ ID NO: 12077 - DNA, 325 bp, Homo sapiens
ggattactcgagtggatggaaggaagttgcttctttatagggagcagcttgtaaagattctccaaagaaccctacatttaacctgtaagcagggttacactctgtcttgtaaccttttgcatcatcttctccgttctaccacacttatctaccctacagaatactgcagtgtgccaggtggctttgacaagcctccttctgaatactttcctatcaaggactggggcaaacccggggacttgtggaatctgggaatccagtggcatgttccttcttcagaagaagtgtcttttgccttttatcttttggactcctttcttcagcc

SEQ ID NO: 12078 - DNA, 639 bp, Homo sapiens
atcgacactttcaacaagtcaccccccaagcggggtctggttgtggggatcacgttcatcaaggattcaggggacaagggcagccccttcctgaacatttactgcgactacgagcccggctctgagtacaaccttgactctattgcccagagctgcctgaacctggagctccagttcactccgttccagctgtgccatgcggaggtccaggtcggggatcaacttgagactgtgtttctcttgagtgggaacgacccggccattcatctctacaaggagaacgaggggctgcatcagtttgaggaacagcccgtggaaaacctcttcccagagctgacgaacctgaccagtagcgtcctctggctggacgtccacaacttccccggcacgtcccggcgcctctcagctctgggctgtcagagtggttatgtccgtgtcgcccacgtggaccagcggagtcgagaggttctgcagatgtggtcggtcctgcaggacggtcccatctcccgagtgattgtgttcagcctctcggccgccaaggagaccaaggacaggccactacaagatgagtacagcgtgctcgtggccagcatgttggagccagcagtggtgtatcgggacctgctgaaccggggtctt

SEQ ID NO: 12079 - DNA, 322 bp, Homo sapiens
ggatagggttctcaatgcagatctcccttttctagttagctatattcttgactgcatccgctaaaaatgttaaagcttcttgagagacagacatgccagattttcttggtatctcccataatacgacctacagtccatggtctacagatgttttaaatagaattgctattctcgatacatacaaagacgtaattgctgacccacaatcagtaacatccatattgggagatttttcaaaggatggtgaccctgcttgtatttatttaccttggtattttttcttgcatccttctgtgattcaaaaaagtaaaatgtggctttc

SEQ ID NO: 12080 - DNA, 355 bp, Homo sapiens
gggcatgggagagccaaatggctggtctctggctctccagagcagcggggcagggatgtcacctggaagccctttgctccaggcactgcattgctgtagggactgggggcatcccggccttcccattcagggaacgtgttggggttcggggagccacagggatgggcagctccaaatggggtctccccagtttcaaaggggctcatgccagtgtcccaggaaatcccgtccctgagcggggatctctaccatgccccaggacggtggaaatcaacaacacggatgccgagggcaggctggtgctggcagatggcgtgtcctatgcttgcaaggacctgggggccgacatcatcct

SEQ ID NO: 12081 - DNA, 371 bp, Homo sapiens
  misc_feature (1)...(371): n = a,t,c or g
gggaaatgtatagtgttctgcttttctcctgattgggttatcttgcctctgctaagtttggtttgtcccgtctctatctcagtggccactggagagagggtgtctgctgttcttccctgattccacctgtaaatacaaacgttatctcttctccctggctttgctctgtgcatttgaggtgggaatgtactcggtttggcgaaatagtctttcatgtccctaaacctgaagcctctattgactgtaaatggtagagaaaaggaaagtacccccaaggtgtgaactctagttagggaaaaaaatatttttgggcttgacagtgactcttagttaactcaatttactgggaatcaatagnagttcaggaaata

SEQ ID NO: 12082 - DNA, 753 bp, Homo sapiens
tttttttcaccattgaagaacctgcattatcgtttattgtgatcctaattcggtccacagtaacaattgaaactgcctcgactaaattttaagtttctggggcagcaccacctgaaggcagtgactgcctttttaaaagacagggttctgacattcagagatttctgtttctctatccatcatttttgggcatcttgaatcacctgatttagagtcagtgacatcctgactggattggttctgctctcgctgggcgggtgagacccccagacccacgtccacagtgcacctgatgttctcccagcggtcgtcacttccccaaggaggccaggtaggcataccagaacagagctgccaggttggcgaagagcacccggaacttcagagggacgtagttgatgttgatgaactgtagtggcgtccacacccgccagttcatcctcagcgccggccagaagccccccctcatcttggcggcgaaggctgaggcgtctttcccctccagaaagttcatgatgaggaagaacaacatgaggaaggccggtgcaaagacgaggcggtccaggagaagcctcctgagcccttgccagggggacctcaggagggatccaatgttccatgaagaagtagaagaagtgacttcagcggccctgtgaagaagaacccgtaaacggcatatctcagaggcccaccgacatccagacttctagagttttcttttttccgcttcttctcaatcatctgggccaggac

SEQ ID NO: 12083 - DNA, 859 bp, Homo sapiens
gcttggtgggagcagacctctactgtcctctgtaacttgctgctattgaggacaagggagtttttctttctttagcgtcttcagtgaaggatacaatacaacaatgcctaatgtatttgactttttagcttgtgtctgtgtgtataggaaaagcctaaaacaagttatttgcatttcagtggttttgtgagacaaagaatgggaaattctgtagcccttctggcttaccctgttgattataaacctagcctcaaaagagattgacaggcatgactcaagtgagtgttcacatatacaagcctgcatgagccctctgtgggtaggtggtcacacttgggcatctgcagcattgacgtggccccgctgggtgccttgagcatgccctcttcctgctctgcaatttgaatcaccaccgtgccccttccaccactgttccccatgcaaaagctctgcttccagcagcccccactgaccgctctctgtgtggagcaaagtgctgtcgtgcggtgaccaccaggtgaagagcagcttgtattcagacatctagagaaggttaaatcttagtgtccctgggccaggagcatatcccaaggctcctgcgagccagtgggaccctgtccactgccgctcttggttcactgctgtgtcctgccccaccctcctctcctcctgcctgttggttccttgacctgcactatgggttagttgagttccttacgatactacggtgaaagcccgggtgctagagcccctcttgtttacaagacataatgagggatttgaaatatgtaaaaataaacatgagaagctaaaatgttcttccatcataagcttaaagggaaaaaaactaaaaacttta

SEQ ID NO: 12084 - DNA, 460 bp, Homo sapiens
gtaactttagcatggtgtatggtgtgtgcgtagtcatacattagtgtgatttttgtctgttttgaacactatactgtgaagtccacgaggtggaggcacagtgacagcaagcctcactctacatcttcagtgctggacgtcatccagtgtcatggcatcatgtgatttttagggtactattcatgtgtgttcagttatgtaaacttgtttctcagttgtatcaataggcgtaaataagttctcattgttgatgttattgaagtgtatccataagtatgtatggtcattcctctttttttttttaaggatgatacatatatttatttcttaaaaatttcaggggacgtcccagtgttagccacttcttgtcccttctgtgggctacatccagttgtaaattgttccagtacaacacatcagggtgtttggaaatgccccaaagtccaggaacactaactta

SEQ ID NO: 12085 - DNA, 93 bp, Homo sapiens
tcccgtcccacccttggcctccccaaagtatgtgttaggattacaggcataagccaccgcacccagcctacatctataacaatagcaaaatag

SEQ ID NO: 12086 - DNA, 689 bp, Homo sapiens
ggtctgggtcctgtgcaagggctggaactggcgtctggcacgggccagccagggtttagcatcccacttgcccccgtgggccatccacacactggccagctggggcctgcttcggggtgaacggcccacccgaatcccccggctactaccacgcagccagcgccagctaggggccccctgcctcccgccagccactgccagggactctagccgggcggaggtcacgcacccgccagtcccgggccctgcccccctggaggtagctgactccagcccttccagcccaaatctagagcattgagcactttatctcccacgactcagtgaagtttctccagtccctagtcctctcttttcacccaccttcctcagtttgctcacttaccccaggcccagcccttcggacctctagacaggcagcctcctcagctgtggagtccagcagtcactctgtgttctcctggcgctcctcccctaagttattgctgttcgcccgctgtgtgtgctcatcctcaccctcattgactcaggcctggggccaggggtggtggagggtgggaagagtcatgttttttttctcctctttgattttgtttttctgtctcccttccaacctgtccccttccccccaccaaaaaaagaaaaagacaaacacaaataaaattatttgaggcgggaaaaaaaaaagg

SEQ ID NO: 12087 - DNA, 340 bp, Homo sapiens
ggtttttgccatttctgacttcgcagtattgtttagggaccagagggtgtctctgggaattgctttttgacagtgccttatgtccagtcatctttggaaaagattgcttattaaaaatattttgttcttccgtcatctcattgtcattggagcaccaagtgtcattggaactctgaagctctctctgccctttaggtttggaccaagtgctgtcaaagccagagaaagtaggattaaagatactgatcagccaggacagataggggttttctgctggaaactgcgatacctaccctcggtacatggggatagctcacgtaagtgacttggtcacttggca

SEQ ID NO: 12088 - DNA, 64 bp, Homo sapiens
gggatatctttttgaatattcataaggaaacctgtatcatatgaaacacattaaaaggtaaaca

SEQ ID NO: 12089 - DNA, 246 bp, Homo sapiens
gttctcaacctggtgctttccagtaagaagccaggcactgctgtggtggagtttgcaaccgtcaaggcagcggagctggctgtccagaatgaagttggcctggtggataaccctctgaagatttcctggttggagggacagccccaggatgccgtgggccgcagccactcaggactgtcaaagggctcagtgctgtcagagagggactacgagagcctcgtcatgatgccatgcccaggcgccgag

SEQ ID NO: 12090 - DNA, 430 bp, Homo sapiens
tctctgaaaataattaattgctgaacaagtgaaactaattaagtacatagccatttaaaaggaaatagtgtagcatctgatggtcgaatacaaatattgccacaaatcagtgcaaacttaaaaatgattttccttctagtgcattaaaagaaactgagcaggcttggtacacacaaattggcctgagcataagaagaaaaagtatcaactaaggatttaatgttttacgtttcatgaagaaactagactttttacataaaactgctatagatggccataagtggtccagggagcaacagatttgtagtatgagcaaatataaaatgaagcatcataacttgagcatttattgaaataaattgtgtggtccaattgaatctgttctcattgatgtgctggtttatgtaggagatactgtgtatttctacaa

SEQ ID NO: 12091 - DNA, 87 bp, Homo sapiens
ggtaatctctctttatgggcagacaatgatttcagaaacaccacaaattattctcaaagagaaaagacgaggatttttttttttttt

SEQ ID NO: 12092 - DNA, 289 bp, Homo sapiens
gagacagaagtgaacctctgagtcgttgttcattagaagacccagaaccatcaggctggtgtccctgctttgcaaacacaagacagaagagatcaatgtcacttctgagtgatcacattggtgtttcagttaactgactcaaggcttggttggatagatattaacatattctgaccttatctgggagaatactggtctgcattctttgcaaacttctgccatttcctctaatttattaccagcatatctatgggtcctaataaatcttccatttgcaattagaatatcc

SEQ ID NO: 12093 - DNA, 451 bp, Homo sapiens
  misc_feature (1)...(451): n = a,t,c or g
gaccagaactgggttctgacaggtgggagccagcagctcctgaaggctgggggcagagggtttctgaggggacccaggttagtggggcattggcctagccctgggccgtgggtatcactcagtgtcttgcagtaggtgttgatactttcgaagccacattgtttcttgggttcttacacatctttatatcacgtttttataaccatcaccctttccaatcaaaatatttattgccaattttttcttttaaatattttcaattttcaaagtgtgtagtgcgtgcattgttttaaaagtttggtagtactttttggccgtttgatatttaactccgtttctttttttttgagacgggagttttgcnttgtcgcccagtcccggagttgcagttgacgtgantcttcagctcactgcaagctttngccttccggggttcaaaaccattctcttg

SEQ ID NO: 12094 - DNA, 327 bp, Homo sapiens
  misc_feature (1)...(327): n = a,t,c or g
gcagggcactctattaaatgatacatacgcacatgcgtgccagcacacacacgtctggttttcacaataacattatgaggtaggcagtattatcagcctcattttatagataaggacattgagacagagagtttaagtagtttgtcccagtcacacagctaagtgttggagctggtatttgaaacctggaggtctggttccatagcgatgactaataaccacttctctacggtgaggccctgattgagcttcagaacgcattttaataacatggcatgagctttttgattatgaatgtgtggagtccaatnaacttctctgagtgct

SEQ ID NO: 12095 - DNA, 832 bp, Homo sapiens
atttcttgaaagctatgccttattaatactatgccagaatatttatatacagcaagaaaaagtttgttgcatttcaactttaaaaacaagatcagaaagtatcacattttccttatggtaatattaatttattctaggtgggtgttattacagctaaagcccaggtttgcattaattttttaaagccatagtctctcaactctattgattggggttaataagactcacaaaattgtcaagcagaccaattaactagggacaaatttcaaacctaaaatttagtttgcgtgtaacgtgggactgacacaagtttggaaatcatggcaaaacatcaattacctaggactacaaaacattaatttcttcttttaagcagagagaatatggatttaattgtttaccataagaaaagtgacatatccaaccaaccatccatccccacctgtgccctattctttccttgtgtttctttagagccttttcagctatttcctgtgaagcaaactgcacgaaggcctcccccgtactcctcccctggaagtccaccggcaatgttatcccatttggcacgatttccaacccttcaacccaaggacaaataaccccagtaggggggcaatattaacatcacaagcccagaaatgattcttcttatagctttaaataaaccagaatttttaactttaggtgaatggtatgctttcaacaagtactctttaaatatgcattgcaataatatgaagttccattattataaagtataactattcttaacacacccatggtacagtatatattaaaaaaaacttgctgaacacaggatgcattaaga

SEQ ID NO: 12096 - DNA, 421 bp, Homo sapiens
  misc_feature (1)...(421): n = a,t,c or g
gaagaaagtagaagaaaagcgagtggacgttaactcagcagtagccatgggagaagtcatcctggctgtctgccaccccgattgcatcacaaccatcaaacactggatcaccatcatccgagctcgcttcgaggaggtcctgacatgggctaagcagcaccagcagcgtcttgaaacggccttgtcagaactggtggctaatgctgagctcctggaagaacttctggcatggatccagtgggctgagaccaccctcattcagcgggatcaggagccaatcccgcagaacattgaccgagttaaagcccttatcgctgagcatcagacatttatgggaggaagatgactcgcaaacagcctgtacgtgggaccgggttcaccaagacatacaaaaggnaaaaacatgngagcntatttcacg

SEQ ID NO: 12097 - DNA, 870 bp, Homo sapiens
ccagagcctggggggtaggtctccatgcctgccaccctggcatcggctttctgtgccgcctcccacacaaatcagccccagaaggccccggggcttcagcttctgttttttataaaacacctcaagcagcactgcagtctcccatctcctcgtgggctaagcatcaccgcttccacgtgtgttgtgttggttggcagcaaggctgatccagaccccttctgcccccactgccctcatccaggcctctgaccagtagcctgagaggggctttttctaggcttcagagcaggggagagctggaaggggctagaaagctcccgcttgtctgtttctcaaggctcctgtgagcctcagtcctgagaccagagtcaagaggaagtacacgtcccaatcacccgtgtcaggattcactctcaggagctgggtggcaggagaggcaatagcccctgtggcaattgcaggaccagctggagcagggttgcggtgtctccacggtgctctcgccctgcccatggccaccccagactctgatctccaggaaccccatagcccctctccacctcaccccatgttgatgcccagggtcactcttgctacccgctgggcccccaaacccccgctgcctctcttccttccccccatcccccacctggttttgactaatcctgcttccctctctgggcctggctgccgggatctggggtccctaagtccctctctttaaagaacttctgcgggtcagactctgaagccgagttgctgtgggcgtgcccggaagcagagcgccacactcgctgcttaagctcccccagctctttccagaaaacattaaactcagaattgtgttttcagcaaaaaaaaaaaaaaaaa

SEQ ID NO: 12098 - DNA, 301 bp, Homo sapiens
caattttctattctgttctgaacattagcttttagtttcagggtatgtatgtgtaaatacacaaatactttcaaaccgtatacatacagtttttaaatgacctaggtcaagatttaatagcagagatttaaatttatagtaatatgcctccatcatctcttggcaaaattctcttctgttgttttatagcagtttcctgttaacacgtgttatttactaggcttgtgaggacagaggatggggttttattcatctttggcatcctctgtgggtaaggtataggtacgaaggcacaggggta

SEQ ID NO: 12099 - DNA, 354 bp, Homo sapiens
  misc_feature (1)...(354): n = a,t,c or g
gattatagaggagtgaagagaacagaccattgaaaagactattatctgaccagcggaggcgtaaaagagaggaacccagttgaataggatccaacccctggctagcctntacacnntaatanggagacanggatnangngccntacctccnanagntcggtattttnctanngnnntttnctctttcnagacnttanangnacncnttntcnnncnnttgtncccnncntnanggtatttgtngnacttantgctatnccttnttnttcnnctagtgnttgncctntaanttgttctanctatggtgacctncttntgnctnnctttntggnngnatcntnngncttctccccc

SEQ ID NO: 12100 - DNA, 927 bp, Homo sapiens
gttaaccctacatgttataaagatggcgactgttaacaaaggctgtaacagattaagtactattttatatccagaaagtcttctctatgtagagaagtcagagagactagatgctttcactagggaatgtcttcccacccagccatcacaaatgtggacaatcactgcatccacatctgtaggcatatttctatggaagtttaattgacagctatattcattatttattttacaatttcatttttctacacctttgagatttatgaatgcagttttttcttaaaatttattttaacttgacagtatgtttttagttcccccaatttaattaatggaccatgtgcatatatatgggagtgtgcttacatgttaataatttacttgcatacttatgagaatttcacattggaattcataatggtaaaacaacatacatctgccaatatacgttttttctgttggtttaagagaagataactgacagctttacctacttcctacagatgcatctaaacccagatattactgagaagagtgtattgactctgagtgtaagagagtatgtgtttttttgtttttagttctgctctagatcataattgtaaaaaatattaagtcataatctgttacactaaaatttgtcagccaaatgttagatgaaatgtctgcactgtagtctcagatcactgtcacgtatataaattgcttcttcattttaatttgtagaagtactttacagtaggaaacgccagtaaacaacttttatactgttaaaaggcttttttccccttcctaaatgttttaattgtaccatagtgttttgctcactgaagaagcttcttatggaccttgcaactttgttcgtagcttgaggttgattattgtggttgtattgttcactgtgtgtagaaatagtatgagtacgat

SEQ ID NO: 12101 - DNA, 957 bp, Homo sapiens
cttaccttagaaaaccaaattaaagaagaaagagaacaagacaactctgaatctccaaatggcagaacatcacctcttgtgtcccagaataatgaacaaggctcaaccttacgggatttgctgactacaacagctggaaagctacgtgtggggtctacagatgctggcattgcctttgccccagtatattcaatgggagccccaagtagcaaaagtggacggactatgcctaacattcttgatgacataattgcttcagttgttgaaaacaaaattccaccaagtaaaacctccaagataaatgtaaaaccagagcttaaagaagagcctgaagaaagcataatatctgcagtggatgaaaataataaattatacagtgatataccacattcttggatctgtgagaagcatattttatggcttaaggattataagaatagcagtaattggaagcttttcaaagaatgttggaaacaaggacagcctgcagtggtttctggtgtgcataagaaaatgaacattagcctatggaaggcggaatcaattagtcttgattttggagaccaccaagctgatctcctgaactgcaaagatagcatcatttcaaatgccaatgttaaggaattctgggatggttttgaagaagtttcaaaacggcagaaaaacaagagtggagaaacagttgttttaaaattgaaagattggccttcaggagaagacttcaagactatgatgccagcaagatacgaagatcttttaaaaagtctgccattgccagaatattgtaatccagaaggaaaattcaatttggcctctcatttgccagggattttttgtacgtcctgatctagggacccagggttgtgcagtgcctatggtgtagttgctgctaaagatcatgatataggaacaacaaatctccatattgaagtttctgatgttgtaaatatactagtt

SEQ ID NO: 12102 - DNA, 571 bp, Homo sapiens
ttttttttttttttttaggcagaatcaacccatgcttttattttcattgcatataaaaatttcatatgaaggtattgatgtacagtactatccccgtgggctgtaagagaggctaagaaaccactaaaagaataatcatttgtaattctcacacacaatttaccactctgaaaatatatccaaagaaataaaaacaactcaaatcagttaaggatgtttttgtaattatagtgtcccctttgtactgtttaaaacaaaagtaatcaaattcctttgggccagggctgctaaaatctacagtttgtgtcaaaaaataaaataaaataaaataaaataggctcatttttcctagaaaaagaatctttcctttcactgaaaagccacatgattcaagggctgggcaagtactgggaggatgtttccatataatccattataaatgtttcctgctttaggggctggccattgtacaaggtgaaattttaaaattctaaagcaatgaaagttttgcagaaacaaatcttagaggatagtgaatgctttctgctatgtaaactgacatcaacccacc

SEQ ID NO: 12103 - DNA, 457 bp, Homo sapiens
ttttttttttttttgcagtggagcaagagagaccaaaacctaacctgagttacaagaaacaagacagtaatggctataaagggagtgaccaggagcaactgggacactcctttacctcccatatccaatgtatgtgtttcacagaaaaacaacaaaattaacaaattcacaaaatacaacagctagaattacaaaatccattcatccaagggtggtagaaggcaggatggaaaggtggaagggtaaatggcacagggagaaaaacaaagtgttccaatcagtccaggcacagggactggcaaatgctagaaaatagctgcagaaaaacctgtggtcctttcagactcacggtgatgttaaaaatccacacactggtgtcagggaacattctgccttacgtgcaccagagacaaaaatttcaattcctcagagagaagggaatacgcagagggccctt

SEQ ID NO: 12104 - DNA, 809 bp, Homo sapiens
cttagctatagtcgagctgtctgggaaacaggatgaaaaacaggagggttattttcttgtgccctctttgtcagctgatcccctcttctgctaccagctatttggccagcaagccgtttttagtccccactttgcccatttttctgttttggttcatcgtttcttaaaagccatgttataaaacatggtagtttgaatcctgttgctaattttaaactttcctctaaaatgtactgaattttgacaaaaatttgaaaatatcctcagctaactagaataaaaaggatcataaaacaatgattttaaaactgaaatctctagaaactcaacatccaagtcagccgcatttcttcattcagagtgtgtgtgtcacacctgccaaggtgctgcgtactctgctaaccgagctagagtagtgaggcaaaggccattttctctgatcacaagattttacatttttctgggattttgacctgcaaagtagtctcgtaagagcatttgagagacttacttggaactgccttcagaatctatagagccttttttctctttttcctctaaaatgaaaagagcttcattttatgattataacaaaagtgacactgtaagcagttagaacattaagaagtataaataaaaagtaaaaatccatctacaaccctaccatactccagaaggaggaaaagaactgtcatgtatgtatacacacatacctatgtaattttaatataaatagaattatgttctacatgctgttttatttcctcaacagtaaattatggacatgtctgaaatgtgagataaatttc

SEQ ID NO: 12105 - DNA, 1035 bp, Homo sapiens
gacaacacctatagtctggagctcttccaggagatgcgaaccacccgcaagtctccgtctggcctgtgggctggttggtgggcggcgctacgaacgtccgctggtggaaaacggcaaagttgttggctggtacaccggctggagagcagacaggccttttgccatcgacatggcaggatttgctgtaagtcttcaagtcattttgtccaatccaaaagctgtatttaagcgtcgtggatcccagccagggatgcaagaatctgactttctcaaacagataacaacagtcgaagaactggaaccgaaagcaataactgcactaaggtattcattacacttgtgctgcccgacctcgagtgtcaccatgaagagtgcgctacccaagctatttccttcccccttcaggttcctcgtgtggccacactcggacagaagaaggttaaatcctagcccaacgagcccaaagtacccaccctggacacagtgaaaattgaggtataaattgaagcagcaactggtgcagtttgtccagccagtggatccatatggaagaggatgtttggagtttaggctacagagcattcaggtattgtttgttttacttcagtacagcagcctttcttgtcatctgatggacatctgtttaaatggagcttgtcagttaacataagctaattggatggttggtacaaaatgtatgttttgtcttcatttgttctgcatgttttctctacaacaactaaattggaagatttttttgtacagtgccgatactgcaagataccactcttgagtatatattttttctttttctccaatttgcccttataattggtagacttgaacaggttggtagacttgaacaggtttttaaaacagacaagtattttgtcagctaaacgttcctgatgattcctgactttgcaatactaagtaatttttggaaggttagtggcagtatacatcataggaaataaaaacccacaaatgaaaaggtctatggagtcatgtttaatgtagggaaataacattttg

SEQ ID NO: 12106 - DNA, 2017 bp, Homo sapiens
  misc_feature (1)...(2017): n = a,t,c or g
gatggcggcgcccatgctgcgctggggctgccgtggaagacgttgggctttcgccgcggttgacggtggttcttgccaccgaagaggggctccgactgggtccacatccaaccagattaggggagagagctcagtggctcagcagcccctccacacggcccagaagacgaggaaaggtgaacacaaatgggctgctgtggtaggtttggaaattcatgcccagatttcctccaactctaaactcttctctggatctcaagttcgcttttcagcacctccaaattctttggtttctttttttgatgcatctctacctggaactttgccggttctcaacaggaggtgtgtagaagcggcggtgatgacaggcctgggctctgaactgccacataaacaagaagtccttgtttgacaggaagcactacttctatgcagacctccctgcaggctaccaaattacccagcagaggctcccaattgctgtgaatgggagcttgatatatggcgtctgtgcagggaagaagcagagtcaggtgatccccaagacggtgaggatcaagcagatccagttggagcaagacagtggcaaaagcctccacgacaacctgaggtctcagacgctcattgatttgaacagggcaggagtgggccttctggaggtggtcctggagcccgacatgtcctgtggagaagaggcggcaacagctgtcagggagctgcagctgatccttcaagccctggggaccagccaggcgaacatggcagagggccagttgagagtggatgccaatatatccgtgcatcaccctggggagcctttgggcgttcgaacggaagtgaagaatctcaacagcatcaggttcctggccaaagccatagactatgaaattcagaggcaaatcaatgaacttgagaatggaggtgaaattctgaacgaaacacgctcatttcatcacaagctggggtgcaccatgtcaatgagagacaaagaaggaaaacaggactacaggttcatgccagaacccaacctgcctcccctggtgctctacgacgccacatctctgcccgcaggtgcagacccacagcaagtgatcaatattgaccagattcgggagacactcccggagctccccagtgtgacccgagagaagcttgtccaacagtatgggatgctgctggaacacagcttcactttgctgaacgaagtcggcctactggagttcttccaaaatgtgataaaagaaactagggcagagccaaaaaaggtgactagttgggtcctcaacacttttctgggctatttaaagcaacagaacctcgctgtcagtgagagtcctgtcacaccctctgcactcgctgagcttcttgacctgctggacagcagaacaatttcttcatcagcagctaaacaggtgtttgaggaactgtggaagagggaaggcaagactccaggggcagattgtttcagaaaagcagcttgaacttgatgcaggaccaggggggcactgggagcagctctgcccacttcttgtgatgggaggcccatccttcaagtggtaatgggatgttgaagaacagaaaccccagagctattaaataaactgatttggggttggtcccggaaagcgactcaaagcccgagcagatccagtcatgataaaggagatcctggagaagaagctgtcattgtgagatgtttgggatccccttgcccaagggacaacaacaaacagtgcagcctgactgggaacaggatcctgtgaaagctgatncccatgtgccctgagagctgcctctcaatccctgtcccaagccacagctatggcattaatgtcaccagtgttctcaccctctaggccctgtgcctggaggtgcctccacagccgaccagcagccaccccgcctgcttcatccacatcaggagggtccggtgaggctgcagcagtggttaaggagtaacaccttcttgtattaaggaattttaaactaaataaaatgtatgttggagatactgtta

SEQ ID NO: 12107 - DNA, 382 bp, Homo sapiens
gagcaggaggaggattaccgctacgaggtgctcacggccgagcagattctacaacacatggtggaatgtatccgggaggtcaacgaggtcatccagaatccagcaactatcacaagaatactccttagccacttcaattgggataaagagaagctaatggaaaggtactttgatggaaacctggagaagctctttgctgagtgtcatgtaattaatccaagtaaaaagtctcgaacacgccagatgaatacaaggtcatcagcacaggatatgccttgtcagatctgctacttgaactaccctaactcgtatttcactggccttgaatgtggacataagttttgtatgcagtgctggagtgaatatttaactaccaaaataa

SEQ ID NO: 12108 - DNA, 382 bp, Homo sapiens
aggaaagaaggcgtcggtggattttacaagggaattgctcctaatttgattagagtgactccagcctgctgtattacctttgtggtatatgaaaacgtctcacattttttacttgaccttagagaaaagagaaagtaagctcaaagaggacaattccagtatatctgcccaaggcagcaacaagctcttttgtgtttaaggcataaaagaagaattctgcatagaaacatggctcatattcgaaattgctctatagtcattagaagccagagaactgctaagtctcctgcaatgtttttctgctttttgccttccccatatatatggaacttggctacctctgcctgaaatggctgccatcaacacaatgttaaaactgaca

SEQ ID NO: 12109 - DNA, 321 bp, Homo sapiens
tcttcacacacaggagaaattatgtcaaactgtattggggtgtctggggcaacaagagaatctagagagagggcagccaaatttgtagactcagatcctaaggatcctgaactgctggttcgagctgtcggtggccgagattgtcctgctgctggccgcaggctctcgtgcctctgctggaaagatggggaaggagtgacagcttccagagctgattgatttactcgtgcagcagtttcctctggattttcacttaagtatatttgtttagatatgttgtttattgtacagatccactcttcatgatcttttttgtcgacg

SEQ ID NO: 12110 - DNA, 1029 bp, Homo sapiens
gcttccgggccctggaaaggggtccccgcgcgccccgggtcggaggcagacccctgggtttgggggacatgggcatttggggcgcctgaacccaagacctctggatgagctgccccgttcagaccatggatcctgaggtgaccttgctgctgcagtgccctggcgggggcctgccccaggagcagatacaggccgagctgagccccgcccatgaccgtcgcccactgccaggtggggacgaggccatcactgccatctgggagaccccggctaaaggcccaaccctggctcttcgacgcccccaagttccgcctgcactcagccaccctggcgcctattggctctcgggggccacagctgctcctgcgcctgggccttacttcctaccgagacttcctgggcaccaactggtccagctcagctgcctggctgcgacacagggtgtccacccgactggggtgacacgcagggcctatctggcggacccactgggggtgggcgctgcactagccacagccgatgacttccttgtcttcctgcgccgctcccggcaggtggctgaggcccctgggctggtggacgtacctggtgggcaccctgagcctcaggccctgtgccctggtggcagcccccagcaccaggacctcgctgggcagctggtggtacatgaactcttttccagtgtccttcaggagatctgtgatgaggtgaacctgccgctgctcaccctgagccagcccctgctgttgggcatcgccgaatatgagaccagtgctggccgagccagtgccgagttctatgtccagtgcagcctgacttctgagcaggtgaggaagcactacctgagtgggggacccgaggcccacgagtctacaggaatcttctttgtggagacacagaacgtgcggagattgcccgagacggagatgtgggctgaactctgcccctcggccaaaggcgccatcatcctctacaaccgggttcagggaagtcccactggagcggccctagggtccccagccctactcc

SEQ ID NO: 12111 - DNA, 652 bp, Homo sapiens
gcaacaaagtcataaagagcatattttagagcacagtaagactttgcatggagtaaaccattttgtaattttcctcaaaggatgtttaatatctggtttctctcattggtaattaaaattttagaaatgattttaggctctaggccactttacgcacctcactttctgaggcaattagtggtaaaaagtatttttccccactaaaaaactttaaaacacaaatcttcatatatacttaatttaattagtcaggcatccattttgccttttaaacaactaggattccctactaacctccaccagcaacctggactgcctcagcattccaaatagatactacctgcaattttatacatgtatttttgtatcttttctgtgtgtaaacatagttgaaattcaaaaagttgtagcaatttctatactattcatctcctgtccttcagtttgtataaacctaaggagagtgtgaaatccagcaactgaattgtggtcacgattgtatgaaagttcaagaacatatgtcagttttgttacagttgtagctacatactcaatgtatcaacttttagcctggctcaacttaggctcagtgaaatatatatattatacttattttaaataattcttaatacaaataaaatggtaatggtct

SEQ ID NO: 12112 - DNA, 350 bp, Homo sapiens
gtgaatgagacctctgatagggggttttcagaaccttgttcacaccaaaatgtgacagttctttcatgttttcctaaaccaagttaaaattacatgtatattttggtgttaaggttgatttttaagatacttctgatttgtacaaaaggaatgtttcctttataaatcacagaagaaaatgacaatatctgttgggatatttgatataatttaatggtgttataaaacctttaaggagggattcatgggtgaatatatgtgataacatctttatactttgaaaaatgttccacttacccttcaggatatttgttgtaagttaattccattcttaatacctttaattttgc

SEQ ID NO: 12113 - DNA, 387 bp, Homo sapiens
aaatcacatgtggagtgtgctcgattttctccagatggtcagtatttggtcactgggtctgttgatggattcattgaagtatggaactttactactggaaaaatcagaaaggatcttaagtaccaggcccaagataactttatgatgatggatgatgctgtcctctgcatgtgtttcagcagagatacagaaatgttagcaactgggggcccaagatggaaaaatcaaggtgtggaagattcagagtggacaatgtttaaggagatttgagagggcacacagtaagggtgtcaacctgtctaagcttttctaaggatagcagtcagatccttagtgcttcttttgaccagacaattagaattcatggtttaaaatctgggaaaaccc

SEQ ID NO: 12114 - DNA, 797 bp, Homo sapiens
gatctgcctgcctcaacctctcaaagtgctcaactcattgtttactgtcttttttcctagtaatcttaaaataatttgcctcacagaaatagagacagtaagtgtctgcagccagttcactgtttttggtaattcattggtcttcaggagttaagattttacattgtcacattttaatttttaagcctatttttcatctctgaaactttccttttctccttggttctggctatacttggactcaaactgatcagtgtgatcatgtccaaaacagcttggcctggaagaggtaggccttattttttcagcctagtagtgtcccatgcacatgctctttgtagcattcaagtgtttaacattggataaattaagaaggtcaagaatgttgttgaaacttcaaggtctcaaaaggaaatgatggggacatagaacaactgttggtgtaccaaaaaaaggtacagaggggcaccatttgtattgtcacacaacaatgatcagaatgatcagtttagaatgatcagaaccaaaacaccactctttaatgggggccttttcctggctagaagtctttcctcagtttttgttgactatcatacgctgatttgtgggtgacggaagggggctagagataacgtttctctgtactttggtaaaggatgaaggagtcagagagggaacagaaaaagtgagagagtggcctgctgaaataatagcctgcctctaaaagttgtgaccagaaagtatgattcatttgggcccagagggaataaaatatgtttcttcatatacctcccaaa

SEQ ID NO: 12115 - DNA, 387 bp, Homo sapiens
gtttttctgacttgatttctgtaatttccagaaacccagacttctcatttccacacctagagatggaaacaggcaagtaactgacatgtctatttccttgggagcatgtgagaacatagcagtagggaccaaaagtctcagcacacttacctccgattatgccttaaagagttgattgtgaagaaccagtaactttgtcccaaatgcttctttggctgtttcatgcaggacttaattattgcttttaaaaattcacaatgaaaagacgattctgctgtatttgttaaacgttgacatttgcttctagggccttgagtatgtgccacgtgctttgtgaaatgctatggattcacatgtaaccatttaaaccattaatttaaaaagggg

SEQ ID NO: 12116 - DNA, 369 bp, Homo sapiens
atggctgtgaatatatgttttcaggacagccccctggatgagagataagagagttcctgggctcaaaaaaggacaagattctttactgagattgggaagtatgggctacttagaaacgttggagcagccacccctggcattccacatgttcaccatttctaggatcttggcctctctgtgaggtttatgcaccaatgctgggcagccctgggcaggggcctcggcctcctttttgttttccacttcagacaggtaccgtgcagatgttaacaaggtttgagcgaggtgcatctcacacaagtgtgaaagcccaatcatcacattgttgaattacaaaaggatctagggctcctattcttgtcacttgct

SEQ ID NO: 12117 - DNA, 621 bp, Homo sapiens
  misc_feature (1)...(621): n = a,t,c or g
gcgagagctcaaccctcgtatctgtttcttcgacttcaaatatttctgtgaactgcgacccggcctcatcggctgggtcctcatcaacctggccctgttgatgaaggaggcagagcttcgaggcagtccctcactggccatgtggctggtcaatggcttccagttgctctacgtgggtgatgccctctggcacgaggaggccgtcctcaccaccatggatatcacacatgacgggtttggcttcatgctggcgtttggggacatggcctgggtgcccttcacctacagcctgcaggcccagttcctgctgcaccacccgcagcccctggggttgcccatggcctctgtcatctgcctcatcaatgctactggttactacatcttccgtggggcgaattcccagaaaaacactttccgaaagaatccttctgaccccagagtggctgccacagggcggaaactgctggtgtctgggtggtggggtatggtccgccatcccaactatcttggngacctcatcatggtctggttggccttgcctgcgggtgtcaacctgctgcctacttcaactcctcactttacgcctgctggtgcacnttaggccggataacggnatncctc

SEQ ID NO: 12118 - DNA, 327 bp, Homo sapiens
cagaagagcattgtgagcaaacggagattccagtacgaagaagaagtgaaggcgaatccacacaattatgatgcatggtttgattacttgcgcttggtagaaagtgacgcagaagctgaagccgtgagagaagtctatgaaagggccattgccaatgtcccacccattcaggagaagaggcactggaagcgctacatttatctttggatcaactatgcactctatgaagaattggaggcaaaggatcctgagaggacaagacaggtgtatcaagcctctttgggaactaattcctcacaaaaagttcacattttgcccaaaatgtgg

SEQ ID NO: 12119 - DNA, 370 bp, Homo sapiens
ccagcggcggcttctgatgggtctctggtagggcaggctggcgtcctgccttgcctagagttgccgacttatgccgctgcttgtgcgctggtgaacagtcgctactcatgcctggtggccgggccgcaccaaaggcacatcgcgctgtcgccccgctaccttaacaggaaacgcaccggcattcgagaacagcttgatgcggagctccttcgctattctgagagccttttaggtgtccctattgcatatgataacatcaaagttgtgggagagcttggagatatttatgatgatcaaggacacattcatcttaacattgaagccgattttgttattttctgccctgaaccagggcagaagcttatgggta

SEQ ID NO: 12120 - DNA, 1549 bp, Homo sapiens
attttgtggaagtataatactttgtcattatgagatgtcgtctctcggtgcctcctttgtgcaaattaaatttgatgacttgcagttttttgaaaactgcggtggaggaagttttgggagtgtttatcgagccaaatggatatcacaggacaaggaggtggctgtaaagaagctcctcaaaatagagaaagaggcagaaatactcagtgtcctcagtcacagaaacatcatccagttttatggagtaattcttgaacctcccaactatggcattgtcacagaatatgcttctctgggatcactctatgattacattaacagtaacagaagtgaggagatggatatggatcacattatgacctgggccactgatgtagccaaaggaatgcattatttacatatggaggctcctgtcaaggtgattcacagagacctcaagtcaagaaaccgttgttatagctgctgatggagtattgaagatctgtgactttggtgcctctcggttccataaccatacaacacacatgtccttggttggaactttcccatggatggctccagaagttatccagagtctccctgtgtcagaaacttgtgacacatattcctatggtgtggttctctgggagatgctaacaagggaggtcccctttaaaggtttggaaggattacaagtagcttggcttgtagtggaaaaaaacgagagattaaccattccaagcagttgccccagaagttttgctgaactgttacatcagtgttgggaagctgatgccaagaaacggccatcattcaagcaaatcatttcaatcctggagtccatgtcaaatgacacgagccttcgtgacaagtgtaactcattcgtacacaacaaggcggagtggaggtgcgaaattgaggcaactcttgagaggctaaagaaactagagcgtgatctcagctttaaggagcaggagcttaaagaacgagaaagacgtttaaagatgtgggagcaaaagctgacagagcagtccaacaccccgcttctcttgcctcttgctgcaagaatgtctgaggagtcttactttgaatctaaaacagaggagtcaaacagtgcagagatgtcatgtcagatcacagcaacaagtaacggggagggccatggcatgaacccaagtctgcaggccatgatgctgatgggctttggggatatcttctcaatgaacaaagcaggagctgtgatgcattctgggatgcagataaacatgcaagccaagcagaattcttccaaaaccacatctaagagaagggggaagaaagtcaacatggctctggggttcagtgattttgacttgtcagaaggtgacgatgatgatgatgatgacggtgaggaggagtataatgacatggataatagtgaatgaaagcagaaagcaaagtaataaaatcacaaatgtttggaaaacacaaaagtaacttgtttatctcagtctgtacaaaaacagtaaggaggcagaaagccaagcactgcatttttaggccaatcacatttacatgaccgtaatttctt

SEQ ID NO: 12121 - DNA, 843 bp, Homo sapiens
gtgtgcctggtagatccccggggcaagccctgtgagacagtgttccagaggctaagctacaatggccagtccagtgtggtacggtgccggccactcacaggccgcacacaccagattcgagtccaccttcagttcttgggccatcccattctcaacgaccccatctacaactcagttgcctggggtccttctcgaggccggggcggctacattcccaagacaaacgaggagttgctacgggacctggtaggcagagcaccaggccaaacagagcctggatgtgctagatctctgtgagggtgacctgtccccaggactcacagactctacggccccctcctcagagttgggcaaggacgacctggaagagttgggctgcagctgccccagaagatggaggaagtagctgaggcagcccctcaggagttggacacaatagccttggcattcagagaaggcagttgaaacagatgttcatgaatcaagagacagacccactctgtgcagagtgccggctggtgcgacaggatcccttgccccaagaccttgtgatgttcctacatgccctacgctataaagggccaggctttgagtacttttcaccaatgcctgcctgggcacaggatgactggcaaaaggactgagggtgtggccaatggagggattgcttcttgggttgtgacaaggatgggctatagggcaagggctgaccccatgggctagtacttggggtttctataggaatgaggacgggcttctaaagagacctgctcatacttgctacctccttccagtgggaatttggagactttttggtttgtaaatatatccctttttctaaca

SEQ ID NO: 12122 - DNA, 2239 bp, Homo sapiens
tttcattcattaaaatttttattttgaatagcttcaatcaaaaaaggtttcataagattatttacaatgctgaatgtacaattatgaatgtatgcctttttgacaagagggtaccattcttgagcagcaatacaattttaaaaatataaagatgcagtatcatttctgatataaagttacttaaaaaaatccaaggtcttagggaattcacaaatcataactagaagtaacttttattaatttaatgtacacataattaccaaattttaatacattaaaaatgtgtaaatgcccacagactgtacaaaaattaacaccccattttgttaaaaggttcccaaccacctcccaccataaatatacaaaaacctatttttagatatgtcaaaattgcatgcatgaatattttctaaagcttgaattttgctcttcactggataatgttatctatagctgtttctgtaacagactacataaacattgatatattatttaccatgcctttgaaactgtgcaggactttcataaacatggggaacaaaataaatagagtaaaaactgcaacagttttgtttagatgcaagtgcaattgggaaagctttcgaatttcaggattataaaactactataaaagtatttattctgttgttggcttagccacttgtattcaagcattatttgcagcattgctttacagcagttggtgctagaagatacaaaacatatagttaccactatttatacttgagggagaaaaaaaactttaaacaaccctgagggagacacacattaaaaatcttgttatttatttaaaaagttaaaaagttacatatcattatttaacaattactttccccagacatttctgtcctttaagtatgtgcataaataaaatttaaatcagcaatattcatcttaatacatcaaaataatatatgtacagattttaaaatttaggtctgtataaactcaaataatttaatgtgaaattcagaatcaaaattactatgtaatggtgacctacgagagaagactcagtctatctatggcactgagtagaacccacacctggcttcacaggcattcttcaaataacattctcaacgtgaataacccaccttgtctatattcaaatctaacttcctacaaatgcttttccagccacctaaacacctcattcctttgaaaacaatatggacagaagagatataaaacccttactaactctaaatgttaaaaaagtgggggggggtgtcaaaaatagctctttatgatcatgctcttaaagatgttaaatacaatcggataattgaatttttaagctgctacttagcaattactttcattatatgcttcagtacttaaaccaaagaataaaatgcacaattgtggaaatcactgaagaataacacgagcatatttgaaattaatatggaaattataaaatgatccagagaataagtaactatagaaaatagtgctaattcacagctcaagaggtctaagatgcatagcttcatagaatcattcatggaacaactgttatcatctaatgtgtattaatagcatattatacatttgatggaaaacttcgattatatttttgcaggaatcatcagtggcaatagcagtaacagtgatcctgagtgtaatttctatttttctatagttaccaaacatcatccaggtctttgcagcataaagagtgagaaccatttggtcctaaaattctaggtaaaatttggtaaatttgtaaatatatgttgggaaaagaatgatcagctagaagtagaaagcacgagcaagcatgttactggctctggaagaacagagaacaatgtcacactgttttcatagtttagcgtccattttatagcacgatcagttttctgtgttgtggtaactgtgggcgttgcccagactgctggatccacctataaaaggtgttttttaaaagttaccttaattttggcaagaatttaaatgttaatcaggccaaacagaaaggtgaaaaatgtttctccacatctcttttggctcaatgaatgtcaattttttaactttatttcctcaattttttttctcccagaaatttccgcatcaaatatgctcatttgtaacgatccaattcaaaatagacatgttctgacctctggcgccacctaatggcataaaacaaactcatcaaattcatattgctttgaaaaaacggcagccattcaaatccagtattttttaa

SEQ ID NO: 12123 - DNA, 639 bp, Homo sapiens
atcaggcgatagatcaacgctaaagccaacgaggggcgcttctgccgctcctcctccatggctgaccgctccagccgcctgctggagagcctggaccagctggagctcagggttgaagctttgagagaagcagcaactgctgttgagcaagagaaagaaatccttctggaaatgatccacagtatccaaaatagccaggacatgaggcagatcagtgacggagaaagagaagaattaaatctgactgcaaaccgtttgatgggaagaactctcaccgttgaagtgtcagtagaaacaattagaaacccccagcagcaagaatccctaaagcatgccacaaggattattgatgaggtggtcaataagtttctggatgatttgggaaatgccaagagtcatttaatgtcgctctacagtgcatgttcatctgaggtgccacatgggccagttgatcagaagtttcaatccatagtaattggctgtgctcttgaagatcagaagaaaattaagagaagattagagactctgcttagaaatattgaaaactctgacaaggccatcaagctattagagcattctaaaggagctggttccaaaactctgcaacaaaatgctgaaagcagattcaattagtcttca

SEQ ID NO: 12124 - DNA, 415 bp, Homo sapiens
ttataattagctaacatgactagaaaacacatgacttaggtggagagttagctttcttttctagtttgtgtatgacttgccatttgtgacgtatacaccaaaagatctggtgttttagacttctgccattcacttggcatttaaatctctctttgcttatgctgttaacgagtatgccataggataggacaaattcagtaaacaggaaaacttgtccatatttgcatagacatttgtagggttttttttttctttttctttttagaacttcaccattggcttaagaatgtagttcccaaaacaattttttcttgcaaagtactttccttacacctcttggctacagggtgggccaaattaaacatatatgtattttcatttaaatgtatgtgcagtttggtttatcatcttaaga

SEQ ID NO: 12125 - DNA, 609 bp, Homo sapiens
tttttctttcagctgaatacgaatgagcacagtggtggaatttctgaagggaagtgatgaaattatatttatttcagtgggcacttttccattttaccactgtaccattatttggttcctggagttatacactaattttcagtatattactgttaaattaccaacacaaggcaatttatttgaaagattccgtttatcctgccattgctttgaaaagcagcaggaaacgaaatcctttgacttgtatcagcttctgcagagcatctttgctttcctttgtcctttgtttcctaccttttgaatcagattccgttttagtcaggaagacttcttgggaccattcttagtaacctgaaatttcttttttaattgcatgaagtggattgatcatgagcaaatgatgtgcttatttctccctcactgttgaatatctttgaacttgctgttttcaatatgggcagcacaaaggtgagagatacatattaatagtagtatgtattactcttatacattagatacctatatttaaatgaaaggcccaatttgtaaacatatacattcatattctctcttgccccaagttttagggaacatgttaggatataggag

SEQ ID NO: 12126 - DNA, 181 bp, Homo sapiens
  misc_feature (1)...(181): n = a,t,c or g
gcctctgggttgcagattgcttggggtgaaaatgtctgtgctactgaaatctaactttttacaaaaaattacgnnnnnnnnnnnnnnnnnnnnnnnnnnnnnnnnnnnnnnnnnnnnnnnnnnnnnnnnnnnnnnnnnnnnnnnnnnnnnnnnnnnnnnnncatagtgaaaccgtgtctct

SEQ ID NO: 12127 - DNA, 381 bp, Homo sapiens
  misc_feature (1)...(381): n = a,t,c or g
cggacgcgtgggtcaggttggtagccctggattacaacctctgccaatttccatggtgtaaatactctcaccatggccaattccaggctaccaatgtggaatcactgagtatgcagtgagttaggaagagataatacagtcatataatggtgactatttatggcaatgaggacacatgctgagaaatgagtcattaggcaatttttgtcannnnnnnnnnnnnnnnnnnnnnnnnnnnnnnnnnnnnnnnnnnnnnnnnnnnnnnnnnnnnnnnnnnnnnnnnnnnnnnnnnnnnnnnnnnnnnnnnnnnnnnnnnnnnnnnnnnnnnnnnnnnnnnnnnnnnnnnnnnnnnnnnnnnnaaggatttgtgtatctaaacat

SEQ ID NO: 12128 - DNA, 421 bp, Homo sapiens
aaaattatcaagcgatttcaagtagatgtaattctagatcctgaaacagcacatcgtaaacttatagtctcagaagatagaaaaactgtgcgctatggaaatacaacacaaaatgtacctcataacccaagaagattttatctcctcccagctgttctgggttctaagggatatagttgtggcaggcagtactgggaagtagaagtgaaagacaagcctgaatggattcttggtgtctgtaatgactgtcttcccagaaggaggaagagtcaaccaattttagtacaggatggattatggggaatttggcgatctagtcagaataattatattgtattgggccacaaggaaattattctgctgccacaagtaattcctagtaagattggcatttttttagactatgaaatgaatgaagttt

SEQ ID NO: 12129 - DNA, 774 bp, Homo sapiens
ttttattcttcttcacctccccttgctgttccacggcgtctttcactttggaggctggaaccttggtggagatttctgcatgtggatttgccactgggtggagtggccgttgatcctgttccttattgactggttcgctgttggaagcttcagaaaagatattccacacctggtccagaatggattcattatgaacttttaaactgttcttcatccaattctgaaattttgcctttttcctgggaacgttgtcaaaagcactaatttgctctaaaagttctctcactttggggctgacattgggtctctttattaattcactaattttctgaatccacgcctgctgtttgatgtcgcctttgtgggttttaccttcatagcctttgccaccatacttctgatcttcacttatgcatttcacgtggtttttatagtcatcgccccagaaatctttaccgcagtcaatgcaagaaaggcattcacagtttctgcaaacagacacatgcttttccacttgtattttcttcactgattcaccacatgcattgcatgtaaaaaataccatttttaggtaaatggctaaatattctctatccaagacaggttttaagtcttgtcaaaaagccgtcatgtagaaattcagtcactccaatggaagacagcaaacattgcctctcagccagctgcccgccaacggtttcaaccggccgcggggagcacgtggactcgccgccgccagcccagcgccgcagctacctgcctctcaggcttggc

SEQ ID NO: 12130 - DNA, 500 bp, Homo sapiens
atacacagccttccccagcatcttccccacaaactcggaagagctgcaggtaattctcatggatgtaggatgtgggtgaggggtacagcctctcatccccactggttgtctgcaaggcaaaaagacggggagaggcagaggtcaagtgccttgcaaggagcaagcccagctcttcacttcttgaatctggctgctgtcagatctttctattggcagcagagcaggtggatggcagggatcaacgcagggagcagagaccgagatgtgggggtggtgctgggcctggacttctggctggtggtcagctctgttaggacacagccattcagcacatctactccatccagacctcaacatgcacagccccagaaccacaactttggagttctcctactaaatcatctgtttagtttgtctcttgattctaatctgttgaggccttcctggcttctggttccatcatctaatgcattcctagtacttggggtgctgaggttttt

SEQ ID NO: 12131 - DNA, 43 bp, Homo sapiens
gagaaaagcaaacccttgtggtagatgtagttgcaaatggtgg

SEQ ID NO: 12132 - DNA, 162 bp, Homo sapiens
attggccattcaagtttcctcctttatgaaatggttgttcatgtcatttgctcatttttatattagattgtttttcttttttccagctgacttgtaggaactctacatcttatcaatattaatcatttatcgaaaactatttgggtgccattatcttctcct

SEQ ID NO: 12133 - DNA, 1292 bp, Homo sapiens
tacgatttggattctcgcttaagtacagatatttatcaatatttttataaggcaaagttcatttaaaaaatctttccaagtagcagtgtgcctaagatggcaaaatactaaaaactggtgtttcctgctcctgttgtgtgtcacttttcaagccgattgaaatatttctggcttttagggcattactttttaactatctcctttaaaaacgatgttctgtaggtttagtgtctttgttcatttccaaaagagtccagacaactgtgtctgcccctgcagaggctgtttgtccaaaggcagcatgccgctttccacccggaacgcagacaagcaggggagcggaattctaaagcagcgacttaaaatgaggaatcccccaattgcactaaatggtttcagggattgactaatcattggtctttaacattaactcagattttcgatgtgtaaagagctgtgtgacttggcgtctgagagatccctctgctttgctttgcttcagagtcctcgcacccgcatcctcagaactgtggggcatggtgggctctaacgagcactccccttctgttttccttcattacttttgacctccttaagacttcagagagaatgtccgtcaagttcttttctccatcaagttctttaagttccttgaaaggaagggactgtgcaaacacaaagcaatattcttttgtatctgcaaatgcgtccgtggacataccaattggtatcaaatagaataaaatcaaatataaatgtttgagtcttaggttaaaaaggaaggttatttgtatagtttatagataatgaaggaaaaatttctttttcattgcaggaaatcttgtttactggaagatagagtcactcttttcatataagacaaatagtgctttaatgccaacttctttttatctcaacatttcaggatcatgctaggcacactgcccccttgaatagacattatatgcacagttgcaagtcagccaatgtttttattcagaagtatttccccccattatagtgcctgcctatcagagatacaaaaagcatccaacacactaccgtaataggcttctttggggatgagaaatttgagtctcaacaactcagagtttgagatgtcagcttttttggtaaacgtaggtgttagaggtatattttgctttcctacaacaattgttggcccttgatttcaagcatgttgcttcataggaagcaccagagtgccatctgctgcatttcaagagattgtaaatgtcatctcagctggctcagttatatctctaatgtcc

SEQ ID NO: 12134 - DNA, 391 bp, Homo sapiens
ccctcaggcggcctgttccacgccaggattagttttgcttcgcagatgggccgtggtggtgagaggaagcaatcagtatggaaatggagaaatggcttaccatgcatgtccttctccccaggagggaggtcgtggtgcaggcgagcagacgccagactcctggacacttgccgcctgcgttatggaggcttagctaataaccttgcaggggtcttcaggcttttccactggctcacctttaggcttctgacacttttacctacgattgaaaaaagacgagattccatgagactagaaatgtaggagcatctcagaccttcacagaacgctctgttagaagatgagaaacatacgttgcttgtgagaggtgaagccagctggacttcctggg

SEQ ID NO: 12135 - DNA, 1170 bp, Homo sapiens
  misc_feature (1)...(1170): n = a,t,c or g
tttttttcaagattctgaaaactttttaattcacatatagcaatttgtacattatagcaaaatttgcattattcaagaataagttacttgtacagtacataaaacaatacataaaaatttgccaaataccttctgcctataatgatacaagatgaatccactttatgttatcacaatgtgctgtatattctaaccaaacacaggatgtcagatgtgtcccttgttaatatactcgcaagttcctctagcttgtgggagatgttagagctaacacatttgcagtaagggacttagtcctgaatagaaagcatgaaggaatctcaggcaaccctcagggaagagtccaaggccttgactttaggttaagaaactgttatgtaaaaatagtgttctctggcccaagattttaatgattgctattcctttttcctacggtccagaaatgatcaaaggcagaagatttataccagataaagccatatggattgctggtctaaaattcaaggcaggttagttgacttaattctttggtgctggtgactgttagtttgtaaaagttcaataagtcagatgaaggaagggatggtgccgggagctgtcaagctgtactggtggggtctgtaattagagctaactggagggatcatgatgtctactgtccagtttggtgttgagccatggctctcggtagaagttgccggctggggcctggtcaggactggaaggagagtggtgggatgtgctgtgcctatggtgggctagctgcagccagtggggtgcctgccccacactgctgcccaccccttcatcagctgattctgctcccacataaagaaaggtgttggcttagtgtcacttcttcctagagccatgggagttttctgtcagcatgtttttgagctgtcctggtaacttggacgggaagcagtctggaggtgggtgccttccaaatctctgccacagaatctgaacttgcactttgcagcctgttagtcagagctgctaagtttgctctacnctggtgcctcttggcaccacctgagagatgtatgtagagaggctgctaagaaatgagtnccctggcatgaagacgtcatatcccagatgtttaacttctggctggagggagggaacttaatttggttcattatctactgggtacctttcctg

SEQ ID NO: 12136 - DNA, 287 bp, Homo sapiens
cgggagtacctgtacctttcagctgcgccggccgcgaggccacggagagctcgccttggagagcccaggagcaggggagacatggactcagtggtctttgaggatgtggctgtggacttcaccctggaggagtgggctttgctggatccttggcagaaaaaactctacagagatgtgatgctggaaacctataggaacctggcttcagtaggtgatgacgacaacattccttcacttagagaacaagttgcccatcaacgatatttcaagacctggcatgtggaaag

SEQ ID NO: 12137 - DNA, 572 bp, Homo sapiens
aagcagttggaggaggcatcagccagcctccgtgagcggatcagacacctagatgacatggtgcattgccagcagaagaaagtcaagcagatggtcgaggagattgaatcattaaagaaaaagttgcaacagaaacagctcttaatactgcagcttttagaaaagatatctttcttagaaggagagaataatgaactacaaagcaggttggactatttaacagaaacccaggccaagaccgaagtggaaaccagagagataggagtgggctgtgatcttctacccagccaaacaggcaggactcgtgaaattgtgatgccttctaggaactacaccccatacacaagagtcctggagttaaccatgaagaaaactctgacttaggcactcagaggcatacactttttacagatggacaaaagctctggaaccctgtggcttcaaatcctttgggaagggtgactgttgtttcccctacacacagtgtaagccggaatgggaatcgctgaggctctgatccacttctaagacaggaaggaaagtgaaggcagagtgagcaggtaagagaggga

SEQ ID NO: 12138 - DNA, 681 bp, Homo sapiens
ctagggctgaggttccaggcctgggggtcgcttccagctgccagatcccgtgcagtcctggggaccctgagaagcaccgagccatccctgacccaggaactttccgcagactcgccgccatctgggagtgaagcaacatggatgcagtcagccaagtccccatggaagtcgtgcttcccaagcacatcctggatatctgggttattgtcctcatcatcctggccaccattgtcatcatgacctcgttgttgctgtgcccagccactgcagtaatcatctatcgcatgcggactcatccgatccttagtggggctgtttgagagcctcccaagagggccgggtgagggatgaggacaggcatcctatccccagcctcttcctgtcttcagaaaagcagcaggagggactttggggcatggacctgagttctggttttgattctgccacgagccagctgtgtgaatttggtcaagggacctaactctctgagttccaggttccttatctttcaaatggggatggtgatccctgccctttctacctcatagggatgtgagaaccacctgacttagtggatgtgaaagctgtttgtgatcagtaaagctaccacagatataagggtgttatgctgaatcctgagaagctttcaagaaccagagaacctgattgctgatgatgggc

SEQ ID NO: 12139 - DNA, 126 bp, Homo sapiens
ctcaccgactctccacttgcccaaactgccaaaagctggtgattctgggacaggccttcactttggagccacgggatggggtgggggagcccatgggctgggaaggagggtgctgtggagggggct

SEQ ID NO: 12140 - DNA, 450 bp, Homo sapiens
ttaaacacagtaaactagattagtcgtcagtgttttaattgcccctcttctcctctcctgcattcctctcctctcttctttcctctctgtcccttctctttcccctctcaaccaggagaccatcatgtctctctgccttcctcctctcccctccaggggagtcaggctgtctgtgaaagccatgagcttctctccctctcccactcctcctctcctactttcagatgggatttattccttttttaaacaatgaacatcggaaatgagactgtggggtgtggtttctctctctcttttttttttaattttctttgttgggtttttgagcaacctcatgtccccttcccagggagctttttaatttacctcttagaactcaagtggatgggaagtagagcactatgtgtcagtatgctttgttttctgacacgattacacagcgaggcttta

SEQ ID NO: 12141 - DNA, 1000 bp, Homo sapiens
ttaaaatatacaattaatgaatagtactcaaagtgtttttgttgcactgttactctgaatatggactctctatatctggtatggcgtgactgggcataacttctgtaatgtatttcagttatatgtttttccttttattgccagcttctgataatgaaattttccaaagggatgagatataagaatcatcttttataaaaaccagtggggagtggggtattataatctagttctaaactgtccatttgctttatataaaggctttgatttcaataactgaccatttgatgaatatttaaattacacagaataatgtctacatagaataaacttaagtattcaagagccttaaagtgaaaaaatgaaccttttgactgccttaaaatactacttgctctgtaattcaggcatactagttactttccttggggtctgtttaaataatgccttaatagtgttctaatgtttctgaaatacagaactcaaagggtcttttagagcttttaattttacatagtgaatggaaatttaagtattacattttaaaacctgattgtacattggtaatttaaacatccaataacaggaaaatctagatacagtgatgtgttatacatacatgactgttaacatcagtaatattttatgatagtttaaggttttttattgttttctataacaagttatccaacaggttggactttgtaacatgatatccaaggaccaagttgcatatttaacatcgaatgaaaatgtagttggtacagttccaaaaataattaattttttaagggaatttttcaagacaaaaggcaaatattttgtttcaaacctacaagcaaattcattccaagaagtgaatatagtagtaaaacataaagactattgcaataaaaagtttccaggccagtgacttgtttaattacattcacatttttacattcactttgcctttcaaaggcaggagtattttataaaactgaaataaaactttaaattg

SEQ ID NO: 12142 - DNA, 1101 bp, Homo sapiens
  misc_feature (1)...(1101): n = a,t,c or g
taatcacaggtgccgggcagcctacaacattgtgacacggctttcaagcttccggatcactcaccatttctttactgagagtgtcccctggcaactgcttaacaaaatcccaagctcaggggcttctcagcatttacctaatttctgaaaggctcttctgaaaggtggtatctgttctttcgtagcacagtgtttatgtttttcctgtttattgttttggttttttttttttttttgcatttgcacagtatacacaaaagaatatggggttgtaatgatcctgaatagctcaaaaaaggttttagcatggtcaaacaggcttatggtttaaaatgtgttattctcttctttgggaattagctaaatgatgcaataaacctgttttgttttagaatgtctaggaattaaacactttatgtttacagaattgagctgcagaaagtgcaagacatgccaatttgagacacacggtcttctaagactgaaggataaatttaatgcatttcagaaactaaacatcacagcaagctctatctctgagctataatttgtttttaatgcaaagacactagtttgataatatatactgtaatcctgaaacatttgtgttacttacctttggaggtagaaattataccaataaattattgcaccgttagtattagattctgtgtaccttggaagttatgtcattaatataggctggttcatcaaataaagcaaaaccttgcaatatcagctagatttacactccgggacgttgcccaaaggtaggaagaaagcagagggaaatatttcagtcatcatttccaaagtcattatcaaaatctgtgaggaagtttaatcttccaaagagtcaatgtcagacatcaggcctctgttgcctgcttctctcgaggcactagattaggagtcttcaataagagactttaacatgaggtatatgggaaggatgagggcacccgaggataagttcatcattaggtgtgaggcactgctcacccttggctgggccaagtttcttccnttaaggggcctggaaggcacagggttttcccaaaggaaaagcgtttaagttccctctttaataggattctatgt

SEQ ID NO: 12143 - DNA, 2743 bp, Homo sapiens
agttagttacttcctgtctagagttgtagcttccacctgcaccttctagccaccatggcaacctcatctgaagaagttttgctgattgtaaagaaagtgcgtcaaaagaagcaggatggagctctgtacctcatggcagaaagaattgcttgggcacctgaaggcaaagatagatttacaatcagccatatgtatgcagatattaaatgccagaaaattagtccagaaggaaaagctaaaattcagcttcagctggtcctacatgcaggggacacaactaacttccatttttccaatgaaagcacagcagtgaaagagcgagatgcagtaaaagaccttcttcagcagctgctgcccaaattcaagaggaaagcaaataaagaactggaagagaagaacagaatgctgcaagaagatcctgttttgtttcagctttataaagaccttgttgtgagtcaagtgatcagtgctgaggaattctgggccaatcgtttaaatgtgaatgcaacagatagttcttccacatccaatcataagcaggatgttggcatttctgctgcatttctggctgatgtccggccccaaactgatggctgtaacggtctaagatataatttaacttctgatatcattgagtccatatttaggacctatccagcagtaaaaatgaaatatgcagaaaatgttccccacaacatgacagagaaggaattctggacacgttttttccagtcccattattttcacagggatcggctgaatacagggtcaaaggatctctttgcagaatgtgccaaaatagatgaaaaaggcctaaaaacaatggtttcattaggagtgaaaaacccactactagatttaacagctttggaagataaaccattagatgagggctatggcatttcctctgtgccatctgcttccaattctaaatccataaaagagaatagtaatgctgccatcatcaagagatttaaccatcacagtgccatggtcctggcagctggactcagaaaacaagaagcacaaaatgaacaaactagtgagcccagcaacatggatggaaattccggagatgcagactgctttcagccagcagtcaaaagggcgaaattacaagagtccattgaatatgaagacttggggaaaaataattctgtaaaaacgattgcactaaacctcaagaagtcagataggtattatcatggtccaactccaatccagtcactacagtatgcaacaagtcaggacattattaattcttttcaaagtattagacaagaaatggaagcttatacacccaagttaactcaggttctctcaagtagtgctgccagtagtaccatcacagcactgtcacctggaggggcacttatgcagggaggaacacagcaagccataaaccagatggtgccaaatgatattcaatctgaattgaaacacttatatgtagctgttggagaacttctacgacatttctggtcctgctttcctgttaatacgccattcctagaagaaaaggtagtgaaaatgaaaagtaatttggaacgattccaagttacgaagctctgtccattccaagaaaagattcggagacagtatttaagcacaaatttggtaagtcacatagaagagatgctccagacagcctacaacaagctccacacatggcagtcacggcgtctgatgaagaaaacgtgaggtggccatgatgcttacaggttttgtgagattgagagaactatgacctgcagcaactctggaaacctggcctgacagacaagcagatgacctcacaggagtgataagaaacatctgctccacgccaactcccagagctgatgctattgtacttgcacattggagactgaaaggaaagaagggactaaatgctggggaggtaaattaagacagaaccaaatgagctaagttgcaaatatatatatatacacacacacacatatatgtacatgtgtatgtacatatatattttaaaagactgtttactgcagttgctcaggaactgcttttgattcacattaagctgctttcagaaattaaaaaaacactttttaaagggtgcattgataaaatctgaggttttttggttgtcgtttttttctgtgtacatttttttcctaagtttatggcacagggtagaccttaagtattcctcctccatccttcattcttcaccctccattggatcctcaagttttaatgaattccaattataccttacatcagcaagttaaaaaaagtactttaaaataaagcaaagggagactgttgctcaaccatcaggaaacagttgtcagaagacatcattggttctgtgtttcctacggaaataagaaacgataaatattgcactgaatgtttgtggtttggagtccctgaataataaagagggaatatatttgcagaaagtcgcatagggttttttaatgcagaattttgtcagaagacaatggcgctgcatgtttttctttgagtgcaaatgtacattgctaagatttttttaagatggcatgtgctttgaaaagaagatattgcatttttaagagtttaaaaatcttatgagtgagaaatattaaaaaaatcttattttcacctctttagaagaaataaaagatgtttctcctatctccttttctctagtatttgactgttactgtccttggcgaatcgataatcattgcatagtgactgaaaagcctaagtgcaaaaaaaaaaaaaaaaa

SEQ ID NO: 12144 - DNA, 381 bp, Homo sapiens
cggagccagaggaggcgccggtcgctggcagctgagcggcggaacccttcgctggcgggagcgcggttcggggccgcagaggtcaagagacaactgcctttgaaagagagtgagtgactgtttccaaaacagcaagcatagggagagccgccggaagtattgacggaaagcttgaattacctacatgattgatgatggtctccagctgtcaaagaagattgtggttgccaagagaaaggtaaccatttctcatccccttgagtggaattggatgcctctaggagcccacattggctggcagtagacatggccgaatttacaagctacaaggagacggcctccagccgccacttgcggtttaagctacagagtctaagccgc

SEQ ID NO: 12145 - DNA, 691 bp, Homo sapiens
ggggctggcccttctggatggggagcccccctgactctgtgctggccgagctgaggcgcagtcgggagagggaagggcccgctgcctcgccagcagaaaatgaggaaggggcctcagagccttcacctggaggcatcaagtggggacacctctttggctcccgaaaagcccagcgggaggcccggcccacaaataggctcccctcggactggctgagcctggacaagtccatgttccaactagtggcgcagacagtgggttcccgccgggagccagagcccaaggagagcctgcaggagccacactccccagccctgccctccagtcctccgtgtgaggtgcaggcactgtgccaccacctggccaccggccttggacagctgagcttccacaaaggagacatcctacgagtgctggggcgagctggaggagactggctgcgctgcagccgtggccccgactctggcctggtgcccctggcctacgtgacattgaccccaactccaagtccaacccctggaagcagccaaaactgaggccctgtgcatgctggtggcctcagggaccctcataacccccagactcagagcccgagagcccttcccaagccattggcttggctgcagagtagactgagagctggggccacgtatccctgtgctggcacctgctccctgtgctcagtattaat

SEQ ID NO: 12146 - DNA, 340 bp, Homo sapiens
cccacgcgtccgcggacgcgtggggtaaatttagaaaaagcttcagagtctttgaaaggaaacatggctgcttttctaaagaatgtgtgtctggggttggaagatctgcagtatgttttcatgatttcttcacatgagcttttcattacattgttgaaagatgaagaacgaaagctacttgttgatcagatgaggaagagatcccctagagtaaatctgtgcattaaacctgtaacttcattttatgatatcccagcttcagcaagtgtcaacattggtcagttagagcatcaacttatattgtcagtggatccttggaggattagacaaattttaattg

SEQ ID NO: 12147 - DNA, 484 bp, Homo sapiens
gctgtaagtaccatagtaaatagagggataacacccaaagcttttgtgttcagaaactatggtcattttcctggaatcaactctcattatttgggaggctgtcagtataaaatgtggcaggccattagagcctcatctgctgctccaggctactttgcagaatatgcattgggaaatgatcttcatcaagatggaggtttgcttctgaataacccttcggcattagctatgcatgagtgtaaatgtctttggccagatgtgccgttagagtgcatagtatccctgggcactggacgttatgagagtgatgtgagaaacacggtaacatacacaagcttgaaaactaaactttctaatgttatcaacagtgctacagatacagaagaagtccatataatgcttgatggctgttacctcctgacacctattttagattcaatcctgtaatgtgtgaaaacatacctctagatgaaagtcgaaatga

SEQ ID NO: 12148 - DNA, 414 bp, Homo sapiens
  misc_feature (1)...(414): n = a,t,c or g
ggaaatagctaggcattattttttgaaatatatgacctatatgtagtcaagaatccactgaacagagggaagcaaaccttttggaaactggcttttgggcagacagtaaacgtccagtttgatgctggaagcatgaacagcttcatcaggtaggtactcctcaactctgatgagtttgtcctttcagcctaagggggtggaaaggggagnttgattgcgagtgtgtggagacaaaggcagttcccaccacagttaggtcctggccattgtttcctcgcctgcgatgctccttgtacatcctcaccctcctctcccgcctctgccttctgctgggtcaaaggtggccttttctctccagccttgaattgttccctgtgcttccaagggcccatctgctggnacagnncacacttc

SEQ ID NO: 12149 - DNA, 389 bp, Homo sapiens
  misc_feature (1)...(389): n = a,t,c or g
acagacgtgagccactgcgttcagtgtacagtgccatttcttagaaatcactcctcacgggaacacacacttagaggtgacgtgtagagattttatttatttagttagtttagttagttagttagtttgttagttagttattatgtgcgcggggaggtggggggacggagtttgggctctgctgcccaggctacagtgcaaatggccctaggggactcaaggagtcaacctacggcagagaggacacgtcattctgagcgtaagggccacagcgaaaggtggcaagggccgcgcttttaaaggctgaaatcccggcggctcaggcctgtcgtttccagcactttgggaggcccaggaangcggatcatttgagggtcaggaagttcgag

SEQ ID NO: 12150 - DNA, 406 bp, Homo sapiens
cccacgcgtccgaagaaaccattttagcaaattatggttatatgttttaatttaatctacagaatgttttatagtaaaattctagcaccactagaataatcacatagcatgtacaatatatttatgctggctgaaaagacagaatctgggaataataaaattgcaaccagtttggtaatgcaaacagcagaatagaatgaaatctcagtaatgaattaaagcaacaaaaagatattgattggcaaaaagcaagatataagagatgcatttgcttaacatctctacataatatttatggtctggtcagtattggtctggtcagtattgcctggctgacgtgaaatgtaaactagtaggcgtgttattgatctgctaaaactaaccctctttttaagaggagatttaa

SEQ ID NO: 12151 - DNA, 630 bp, Homo sapiens
ctgtactgcttcttaaaccagcattgctgaccagcattatatttatttttcttttattattcagatgcagtagcattgcttatgttacatatgtttatattcacaaatatttttaaactgaaatatctgaacataatataatttcgtggaagaatacattgaccattttttttaatgtgcatgaattcaccgcaacacatgcagacaactgctgcaatggagagtatgaagaaacctggtctttttattcatgtcggtggcagtgtggaaattccatccagaaaattacaactccacttgatttagttgatcaccatctcagtcttcaaaagataacatcatgaggtgtgggaagtcctagttttaaggaaaccactgaaatatagatgggaaatgtggactttacaagtatatgttatatatacttgcaatgtgacatggttctgtagatcattttataataataaatattttaatttatcataacatataaaagaaacctttgttgtttgttgaaagaaaatgaaggaacagggggaaaaaaggtgcaaaatgctaaatttctaaaaatggatttggcatgtcttcccatcagttcaggtcaaaagtgcattgttgtgagatttatta

SEQ ID NO: 12152 - DNA, 304 bp, Homo sapiens
  misc_feature (1)...(304): n = a,t,c or g
gaaaggctcagtgtcaggagacagagactgagggagactgaagacctgattctctgttccctgcttgtttttnaacttcaaactcagatgaagccaatggacctgctgaaacacttgtctgtggaaactgggtcaggtcgggagatctactgaaatttggctttttttccatagccacgtgccttctgctgttgacagttcattcattaccaaagcctgtgtgtaactttgccttgttctgtggccatcttcttgctcatgctatttctcctggggaatgagcagtttgacttctgttcccacg

SEQ ID NO: 12153 - DNA, 99 bp, Homo sapiens
tggcccctacaagcacctgcaggacaagtgttggtgtagcagtacttggaggctttctttatgctgtgggtggccaggatggtgtgtcttgcctcaaca

SEQ ID NO: 12154 - DNA, 363 bp, Homo sapiens
gtcgcctgggggccttgctaaataaaaatgcagcttctgattcaatagtctcaaacaggaccagagattctgcgtctcttgttgagttcctgagtgaggcagacaatgccagtccacagactcacattttgagatacagcacctgggccattgtgttccaatgtgcttgataacctggagcacctattaaatatccaagttgccaggactttcttctggaaatcttaattcagtatgttttgtttggagccttggacgtttgggaaaactagaatttctttctctccctttagacaaaagtcaactactgctgaggcatgggcttaataaatgttgactaaaatatccaactcaacaaccaaa

SEQ ID NO: 12155 - DNA, 508 bp, Homo sapiens
ctaagaggtgttcccattcggcagccagactccttgaaataccctttcagtaatcattcaaccaacgcttccatgtctctactctgtcgtaacaaaggctgtgggcagcactttgaccctaataccaaccttcctggtcagagttgcctctgaagctgctgccgctaaatatatcccaagccctggaaatggcattggaacagaaggaattagaccaggaacctggggcaggacttgacagtctgatccggactggttccagctgccagaacccaggatgtgatgctgtttaccaaggccctgagagtgatgctactccatgtacctaccacccaggagcaccccgattccatgaggggatgaagtcttggagctgttgtggcatccagaccctggattttgggggcattcttggcacaaccagggtgcagagtcggtagacattgactgggggaagcagctcccagcatcttgccgccatgattggcaccagacagattccttagta

SEQ ID NO: 12156 - DNA, 749 bp, Homo sapiens
tttttttttgaaatccatattacctatttattcaacaaaaaactgagtatcttctatggtccaggccatgtccttggcactgcgaacagagataagtcctggccctcaaggagctcacagtctagtgggggaaaaaagacacaagaataaataaatataatgtatttggagtttgcaaagggggccactatgggagacaaagaacagaggaacctaaatatcctatagttagcatccacaggaaagaaagacctggcaatgtacatttttgtaaagaatagataaggcagtggttctcaaagtgtggctgggctaattacctacatcagaatcatttggagcacatattaacaagtagattcccagtaccttctgcacatattcttgatttagtacgtgtgtgggggggtggtgtacggttgaggcctgagaatctgcattttaaaagcactttaggtgatgctactgcatcttaaagtttcagaactgatgagataaagtttgttcttttaactggaataaagaatgatctacacatctgaaatgctaacttgtattagtctttaatgaggggcaagggaagtagagaaaaggatggtagttgatattttctactatagtgaagttaatttaattctcacaataatcctatgaggtagatattattatccctattttagatggaaaaaaaaaccccaaaattagatagtttaagcaatttgttcaacagtatagagctaatgaatagc

SEQ ID NO: 12157 - DNA, 384 bp, Homo sapiens
ctccatttcaagaaaaattaaaaaactgtttgttgcctgcttgttttaatgttctggcttgaggcagcgagcccttgactatgccacattgccaggattttgcaggttagattgtactacagcactgcctttggcttgccagactctggagtccccacattttcatcctgttctcaggaaaacactttgacccacttgaagctctgagctactgcttcacagcttcctggggtcagtctccagccaaaaccatagatatcccaactgcagccaaaccacggctctgggcgaaggaacgattaggtttactctaggtttccacaccctgatgctcctgcctttactttgacacctctgactgccaggttttcacagacctgttga

SEQ ID NO: 12158 - DNA, 392 bp, Homo sapiens
tgtttgttttgttttgtttgcatgcaaaaggtatttagttatgtcagtaactgagacttacttaaccattttacaactctttccccaaataaagtacttaaaactctccctgcattagtaggtagccagtttgtattgtgtttataggtttttataaagtcagctactaacctggtactatgtagattgtctaactgtatagatagatagcattaacatttgtggagaaatttcaacaaagaggttaaaccaatacgtttggaattgctggataaaagacccagagcagttaatcttacaattggtgttttccccaaagtatagacatgactgcccgtaaatactgctggggagtctaggactaattccagaaataaaaatacttctggtct

SEQ ID NO: 12159 - DNA, 868 bp, Homo sapiens
ggggttttgccttgcacaaaacaaaaatttattgggagaaagatggctgatgggaggcaagatctggattcaggaatcctcaattttagctctcgctctgtcaccaaaaccctccgtccctcccagagcctcgaggagtttccccttgtgtaaaccggtatcgcgtcccttccagctctgacatcctgcggttctagaatacccattgattgaaagagctgtggccaaacaggaaggacagagcaagagccgctgacaaaggattctgccaagacagaatcccaaggtcacaggagagaggcttggggcagtgaaagccctctcgggtcttggctttggaagtgtggactgtaccagcagatgggcccttgggaagccaacagggaacaattcaaggctggagagaaaaaggccacctttgacccagcagaaggcagaggcgggagaggagggtgaggacgtacaaggagcatcgcaggcgaggaaacaacacaacggccaggacctaactgtggtgggaactgcctttgtctccacacactcgcaatcaacatgcgtatttgctattctcaaacaactcccttccacccccttaggctgaaaggacaaactcatcagagttgaggagtacctacctgatgaagctgttcatgcttccagcatcaaactggacgtttactgtctgcccaaaagccagtttccaaaaggtttgcttccctctgttcagtggattcttgactacatataggtcatatatttcaaaaaataatgcctagctatttctactttgaaatcatgactaaagccaaaccacaaccacagcaaagataacctaaggatttgtttaccagaaatacctacaaaaaag

SEQ ID NO: 12160 - DNA, 920 bp, Homo sapiens
tttttctcatacaaacattatgtatctttatttaaatttgcaaatgaaaacaacacatatttcatgttagttttaataagagattccctatcctctgccccagtaaaacctaaccaagccagcctgacaggttatatcaatacagggagctggagtgggagccaagggtggtgttagataggggtggggtacagatcaagggggcctgggagactcagtgactggaagtctctgcccctcactcttggtgagtagctaatttcagcagctggcttcataaggaggagtcaggggtgggtggaggctcctccccaattccagatccacttcctcttctccttctgtctcctggacacttaggtcttactgagatggttttcccacagtaaagagaggtgggggcagagtactaagggtcaggagtgtgactctttcccatgactcaggcctctgtgctagaggtgacccctataggaaggagagaccccaaatcctttagccaatgagtggtggggtcatcataccagagagccagcttgactctgggcaggcaccatcacaggcacagcacccatgcggctcaagccagaggaagaaaccccacccagggatgggggatattggttgagggtgggccccatctgtcgtgggcagtcttggtgagggcagggcctggctggagagactgggcgtgggggtcaatgcaccaggcctgggagggccatggggtggccggagggctcgtgcggaggtgacagaggaaagggtcccattcttggagattgtgtctgagctcttgggccagggcagggtccggggagcaatggcatcctccttgatatcattggctggctcctccagggccttgccccggcggtggtacaagaggaccagcccagccagcaaccccagtccaacct

SEQ ID NO: 12161 - DNA, 886 bp, Homo sapiens
tttttttagtaagtatacatttaggtgtgaattttttattgaaataaacaacagcataaagaatacaagtagccaaaatggttttgaaaacccaaattaggtcaaagttctaaattaaaaatagcagttgtgtatcaatttaccttattctagcaatttaagttggtaacatacaaagttattctgatacaagatattaaagacacacttggttttaatcaactacctttgaagacaccaaatctaaacactactggaaacatcgttgacactacagccaaatggacttgagccaaattttctcaagcacaaatgcaaactcattaactatttctttcagtatctaagaatatctttattgaaaaaaattaaaaataaaatcagttcgccagaagcagttagaagtgtggctttgttcgtgtccaagcggattgttaaaatatatacataaagggaaatcttgccagatgtcacaaattatagcggcacccgttcagatttagggtgagtttctgatcaacctatcagtctccaattttacagaggccctactgtttctacttccactgttgcccaaaagtatcctgataaaactcctggttttcagatttgtaaccatagttaccagaatgatcaccaccttggagcggttgctgagcaatgggttgggagccccagttctgattattggtctggcgccgcttggaatctggctggttgtacccatcagctttgcgctttcctcctacatttccaccgcggccacccctcgcaccacgtaccccgcggcctctttgttgttgggcacctcctctcgcacctcgaacgcctcttgctgatccaggacctcctctctgtgaataaccggctctaccgcggggaggag

SEQ ID NO: 12162 - DNA, 650 bp, Homo sapiens
acttatcatgacaactcaaggtgacatgaatatttaatgaaaatttagaatataacaacatatgactctcattctgtggacataaaaggaaaaatacagtaattcattttactcattacattttacaaaatcagcccaatgaagcagtattttttaataaaaacagtaatttaatttcaaacaaatatattaccatcctattcctttatcttgtatatatgtatctaattggcaaaacatactttactgaaatcagtaacaatccaatccatgatacttcaattgcttcgatcaataaacatcttaaatttgaaactcatttttcttatgccataagcctgattatcagttctataaaaacgctacaccctattgcttggcccattaagtgtaactagtcttctgcacaaggctaagtgggctaaggtacttttgaacaaccacacacaattcatcaagcacacacactcactcctgctcctctcacacacggccaccagagcagctcccctagttctcttgttcctcatagtgagcatagccactagcataggtccttcctaaattcaaattagtaaacaaatctgatgactcagtatctgaatcctttctgccttcatcttcttcctcttcatcatcctctgcttcat

SEQ ID NO: 12163 - DNA, 548 bp, Homo sapiens
  misc_feature (1)...(548): n = a,t,c or g
aagtaccagaagcaatatgtgtggtgtcagcctgatnggctgctgggctgaaattctgtacttcaaatcgtgtccatactggagaaagcagccaaggtgagcacctcaagtaaaagctctgagccacagaagaagagcaagatgccattcatgatggcttccaggcggaattacgtaggtctgcagcagcaggtaataggaggccatcatggccagatgggaaggtcaaggccacgctaatactgagtggcatctttcgctggcagaggtttccctttgtaccaaaaaacaggcgaattacttcaattccaagataaaggaggagcatcaccacatccagtactaggttagctgttggatatggtagcaggacacctttatacagaaatatgaaaagttccagcaggaaataggtagcattataccacccgttcagaaagaacaggatttccagcggggtggaggacaaccgtttacctccggaatctcacctcgcggcgccatcttcagntngncncngactacgctgccacaggcgctcccggagc

SEQ ID NO: 12164 - DNA, 519 bp, Homo sapiens
ttttttttttttttttaaggagcaaaaggctttattgataaatatgcagatatgtctgtccacagggacctgctgtggaggccatgaccaggctgcagacctcccactgcctgggttacagccaggacatggccctgtgcagaccctgccacgacagcccagccgtccaccacccgcctcatctctgccaattgtgctgggggcagggagaggcagaggcccgcctcaggcttcccaagccctggggctcacgggtggttccctcccttccaagggagtggcactgtgcccaggggagagccaggggatgggggcagaggagggagacagcagctgcttcagaccctgagcagaaaaccagagtgagcacagctggcagcaccagatgacagatctgggctccaggggcctcctggttggcccttgtggctcgaacctgcttcgggagacaggcagggtgagggccctgttcgccttttctctgacaaggttgcaaggcccgtgtgtggctgcctgctc

SEQ ID NO: 12165 - DNA, 645 bp, Homo sapiens
tttttttttttttttatttctatggtagaagcatttatttcagatatagaaaaataacactatttcaaagtcagagtaagtaaacagaagtatattttttccttgcatacccatcctcaaatgtcaacacacagtttccagccattcttacaaggaacaaatgcaaaattaaagtaataactgtcaacagaagagctgtattaaagctatgtatcaaccttgaaaatcagaaaacacaaagtgatctagtgcagtgattctcaactttagtgtgtatcagaatcacttggattgtggaaaaagcaccttcagagagctgaaggaaaatcatcaggtcaagcaagcccttggtctcagaataaatatcaaagagactaaagatacgtgctttgttcctcagggaagagggaaggacaaaatatactacaatatagaagatcagccatttactctgtgtcacttctctgagcttcacattcagaaataacgacagatacaactctcaagaattgttctacatattaggttagatagtgtaataagtgcttctccaatccataatacatacctactatcattatttcaacatcattatcatttgatacggagtacatcttccccacctaccccctcttggtgccgaat

SEQ ID NO: 12166 - DNA, 1178 bp, Homo sapiens
  misc_feature (1)...(1178): n = a,t,c or g
ttcaagttaatggcagctaaaacgctcccagtccatttattggccacatgaggtggtcgtcaagaaacaagttagaaggttatgacaggaagtagtataataaatgcccggcagtacgaggggttcaacagaagtgaacaaggcacaagaaagaggtctgtgttcaggaaacaggccagtccccacatggagcaggtgactcctgtaagcctgtgaggctcagggaggtcgtgtctggctctggcctgctggagcacacggccgctggagcccgcagccagctcagtggagctgagcgtccagttcgtacttctcacagaacttgtcagtgaaggggatgcaggtgaggaactcacaccactcacagcggacaggatagacgtagaagaggaccaccaggccagccaggaggcccaggaagaccacctgaaagatgatgatctggcagcgtttccggtacaggtcgaacttgccaaagctgatgtagggcaagaaggcgaaggagaggaagaggccactgatgaaccccgagatgtgggcaaagttgtcaatccaccgcagcaagccccaaaggtgaagaggaagagcaccacagccagcagcttgaagaaggcacgccaggnccgcgccaggatntgccaagctctggaagagcttccacggaagaggcaggccaggatgccgaactgggagccagcaggacccacctctgctcggtatggcaggaagatggcacttggccaggttgccggtgacaccactcagcaggtagatgatggctatgcggtgccagcctgccagcttctccaggtcccgcaggacagtcatctggaagcagatggacaccaggcagtgcaagatcccggcgtgcaggaagagggatagccacaggcggtagaactggtcaggcacctcggggttgagaaaaggcaggagcccacacacatcatccatgcagtgcacctgagagcagagcgtggcctcctcatggaagtagcccctcatgaagtcacagtactcccgggaggtgatctcacacctgcccttggtgccaatgcagcagggccgtcctgtgatgacacagtccatgtggggatggttggtgtggttcccagcgctgtttttggtgcagatcgggccacttggtgatgtcttctggccactcacggacgcgtggg

SEQ ID NO: 12167 - DNA, 2236 bp, Homo sapiens
atggataatctcagtgataccttgaagaagctgaagataacagctgttgacaagactgaggatagtttagaaggatgcttggattgtctgcttcaagccctggctcaaaataatacggaaacaagtgaaaaaatccaagcaagtggaatacttcagctgtttgcaagtctgttgactccacagtcttcctgcaaagccaaagtagctaacatcatagcagaagtagccaaaaatgagtttatgcgaattccatgtgtggatgctggattgatttcaccactggtgcagctgctaaatagcaaagaccaggaagtgctgcttcaaacgggcagggctctaggaaacatatgttacgatagccattcgcttcaagctcagcttatcaatatgggtgttattcctaccttagtgaaattactgggcatccactgccaaaatgcagctcttacagaaatgtgtcttgttgcatttggtaatttagcagaacttgagtcaagtaaagaacagtttgccagtacaaacattgctgaagagctagtaaaactcttcaagaaacaaatcgaacatgataagagagaaatgatttttgaagttcttgctccattggcagaaaatgatgctattaaactacagctggttgaagcaggcctagtagagtgtctactagagattgttcagcaaaaagtggatagtgacaaagaagatgatattactgagctcaaaactggttcagatctcatggttttattacttcttggagatgaatccatgcagaagttatttgaaggaggaaaaggtagtgtatttcaaagggtactctcttggatcccatcaaataaccaccagctacagcttgctggagcattggcaattgcaaattttgccagaaatgatgcaaattgtattcatatggtagacaatgggattgtagaaaaacttatggatttactggacagacatgtagaagatggaaatgtaacagtacagcatgcagcactaagtgccctcagaaacctggccattccagttatagataaagcaaagatgttatcagctggggtcacagaggcagttttgaaatttcttaaatctgaaatgcctcctgttcagttcaaacttctgggaacattaagaatgttaatagatgcacaagcagaagctgctgaacaattgggaaagaatgttaagttagtggagcgtttggtggaatggtgtgaagccaaagatcatgctggtgtgatgggggagtcaaacagactgctgtctgcccttatacgacacagtaaatcaaaagatgtaattaaaaccattgtgcagagtggtggcatcaagcatctagttaccatggcaactagtgaacatgtaataatgcagaatgaagctcttgttgctttggcattaatagcagctttagaattgggcactgctgagaaagatctagaaagtgctaaacttgtacagattttacatagactgctagcagatgagagaagtgctcctgaaatcaaatataattccatggtcctgatatgtgctcttatgggatctgaatgtctacacaaggaagtacaggatttggcttttctagatgtcgtatccaaacttcgcagtcatgagaacaaaagtgttgcccagcaggcctctctcacagagcagagacttactgtggaaagctgagaactgcccgatacacggcatcatcccatctctaatttcccctctgtcctccatccagcggcttcttccgcttcattctctaccataccacttgtgcatgcatgtgatgttctaataccaattgaagaaccgctgtaggtacctccctaataagatttctaaacctatagttagtgtgatcatgactttgtcaaaggcaagtctccacccataaccgttctcttgtattcctgttgcttgagctacattaagtagaatgtgcatgttgtagtcctatgatgatgtaaacttggtactacataatgacttgctccacacatgcagtaaactacataatgatgtactggtaaactagaaacaaagaatgcagcaggatctgtctagcttattaaagatgaaactgaattggaaaaatagctccattttttggtgcttgggaagcacagtgaccaaaaaagttgtatggctgcttattcattagtctttcctactgatgtcaaatccatggtacctagagttaaataaaattccaatgctcttactctttaaaaaaaaaaaa

SEQ ID NO: 12168 - DNA, 1045 bp, Homo sapiens
tatttttttttttcttttttttaatgaatgaaattctttgtttttaatttcacacagtttaaaatacaatatgaaatcaggctacagtatataaaaaactctccagcaaaatgatgtgccagcatcagctactaaaataaacaaacaaaaaactccgccataagaatttttttgcatttttttttaaaaaaacatcgacacttacatcgctacatctctaagctacctcagttctgatttttaaaaagcacctgcttttcctttttttcatcttgcttctaaattttcagcttttaaaaaatataaattatatgaaaatacaagttggaaaatagtcaaacacaatataacatctttttcatccctatacttctcagcttaaaaaaaaagtattcttaaaaaaaaaagttcaataactgaggcagtattcctgataattttattttaatatatatattttatatatgtatatgtatacatatatttatggttccttgaaacttctttggaatgtaggtaagagttcaacaaatttatatagaccccaacagagtaagcggcatgcacagcatgactagaagagagatggtgtatttctcaccatgaaggttaggcaggttaatgctgtaaaacccagagtgttcatctccaaagtgaggaaaagcacatctgatctttgaatgctacctccaatccccacagccacaaaaatcagggctctatgtaggggaagtcccctctccagaatggagaagggaacaaaagtgactctgaaccctaaagccaaaaccaacaaaggttaaggcatctctgggaaaataaaggtttcacccagctagaccagatttgcccatccttcctctgaagttaacgtgtgtttttaaaaagcataaacgcaacatttccagtgtataaaccacccaccactcttcctgggatggtctctggcctttggacaaaggagaaaaaacatctggccagatcgacaaagctgtcttaactaatacactatctacaaatcttgaaaatggcatcgtgccgaatt

SEQ ID NO: 12169 - DNA, 948 bp, Homo sapiens
atgaaaacaccaggaaatatgcaaaagctgaaactcttatgacagtcactgatcctgttcatgatattgcattcgctccaaatttgggaagatctttccatattctagcaatagcgaccaaagatgtgagaatttttacattaaagcctgtgaggaaagaactgacttcctctggtgggccaacaaagtttgaaatccatatagtggctcagttcgataatcataattctcaggtctggcgagtgagttggaatataacaggaacggtgctagcatcttcaggagatgatgggtgtgtaagattgtggaaagctaattatatggacaattggaagtgtactggtattttgaaaggtaatggggagcccagtcaatgggagttctcagcagggaacctcaaatccttccctaggttcaaatattccaagtcttcagaattcattaaatggatcttctgctggcagaaagcacagctgagtacaagctaactgggagtaactttgctgttttgctgcttgttgcatgcacacaggaatggaaagcgagctccttttccccttccccagcgccgtttgacctctcccaagatacaccagcagcctgcttactactaaacgcaatccaaaaggcctttaaaaatacagtgtatattttttgtactagtcagtttattgacactatttgaaacttttgaaatataaacggagaggctttctgttgagacattgtcaccaaaacaattttttgaaatgttcctgaaactaatttgggtttaaagattaaaagggttgttaccattcttatctgagtagttgggaggaggggaataccactttagttcatttggaaaatatagacatatttcttttgctttcttaaaacagcttaaaatgatgaacttttataattttaatttgaagattgaataaatattttttataaagattg

SEQ ID NO: 12170 - DNA, 1431 bp, Homo sapiens
actgaggcctgggagcaggaacctgtaggcagcgcttgagggtagcgggatagcagctgcaagcgcgcgtgggaggcgggggctctgggcggaacaaaaatcacaggatgtcagaggatgtttcccgggaagaactgggataaaggaagggtcccagcaccatggaggacccgaaccctgaagagaacatgaagcagcaggattcacccaaggagagaagtccccagagcccaggaggcaacatctgccacctgggggccccgaagtgcacccgctgcctcatcaccttcgcagattccaagttccaggagcgtcacatgaagcgggagcacccagcggacttcgtggcccagaagctgcagggggtcctcttcatctgcttcacctgcgcccgctccttcccctcctccaaagccctaatcacccaccagcgcagccacggtccagccgccaagcccaccctgccggttgcaaccactactgcccagcccaccttcccttgtcctgactgtggcaagacctttgggcaggctgtttctctgaggcggcaccgccagatgcatgaggtccgtgcccctcctggcaccttcgcctgcacagagtgcggtcaggactttgctcaggaagcagggctgcatcaacactacattcggcatgcccggggggagctctgagtgcagcttaagcctctccacggtgacgggtggctctgtggctggtaggactcacccatgatatggggtgcaggaactctgggggccctgaaggatttgcttccctcccctgggaaggcagagggctcttaataaagaggacccagaagattcttatttagagcttcagtctttggagcacacagggccttcgtgagacagtgaaatcagataataatgagatcttttgttaaaaaaaaaaaatgggaagggagtgcgggagagaaatggtttgtgtctcccttattcccagttaaatacctagctgcagattgtgccatcacccttcattcttcccagatggatgccatgggctatgggagcaaattgccctggacctttgcctgaatgggggcaggaaaggtgaggtgttgctggcctgtaatgccaccaggtgagttccagatgtggagcaacttgggcttttggggatggggcagcaaagttgggagctggaccccaattgagtgggggtagcaattggagtccttgtgtctcttttccaccccctgccatcctcacttagaggggccatggcactagatggcactagtcccccgataatttatgtctcgttgaaataattttgtatatcattctagtcctgaaatatttttttcatatgtgtaggtgaaatggtatgaataagctaacaggaatagtatctaaaaacagaaaacatccatattaaaatgtctaaacagggaaaaaaaaaaaa

SEQ ID NO: 12171 - DNA, 545 bp, Homo sapiens
ggcgccaatccactcctgaagaacaaagatggctggaacagtttccacattgccagtcgagaaggcgaccctctgatcctccagtacctgctcactgtttgcccaggtgcctggaagacagagagcaaaattagaaggactcctctgcatactgcagcaatgcatggccatttggaggcagtcaaggtgcttcttaagaggtgccaatatgaaccagactacagagacaactgtggcgtcaccgccttgatggacgcaatccagtgtggtcacatcgacgtcgctaggctgctcctcgatgaacatggggcttgcttttcagcagaagacagcctgggtgcccaggctctgcacagggcagctgtcacagggcaggacgaagccatccgattcttggtctctgaacttggcgtcgatgtagatgtgagagccacatcaacccacctcacagcacttcattatgcagctaaggaaggacatacaagtacaattcagactctcttatccttgggagctgacatcaattctaaagatgaaaaaaatcg

SEQ ID NO: 12172 - DNA, 1215 bp, Homo sapiens
acgcacccagcgagcccaagcgccttctccgcaccagggaagccccacccaccagaagcccaagatgtccagacaagccgggccaaagccaagaccaccaagaagcggccacagcgggccacatccaatgttttcgcaatgtttgaccagtcccagatccaggagtttaaggaggctttcaacatgattgaccagaaccgtgatggcttcattgacaaggaggacctgcacgacaatgctgggcctcgactggggaagaaccccaacagacgaatacctggagggcatgatgaggcgaggccccggggcccatcaacttcaccatgttcctcaccatgtttggggagaagctgaacggcacggaccccgaggatgtgattcgcaacgcctttgcctggcttcgacggaggaagcctcaggtttcatccatgggggcccaaccccgggagctgctcaccaccatgggtgaccgcttcacagatgaggaagtggacgagatgtaccgggagggcacccattgataagaaaggcaacttcaactacgtggagttcacccgcatcctcaaacatggcgccaaggataaagacgactaggccaccccagccccctgacaccccagcccccgccagtcacccctccccgcacacacccgtccataccagctccctgcccatgaccctcgctcagggatccccctttgaggggttagggtcccagttcccagtggaagaaacaggccaggagaagtgcgtgccgagctgaggcagatgttcccacagtgaccccagagccctgggctatagtctctgacccctccaaggaaagaccaccttctggggacatgggctggagggcaggacctagaggcaccaagggaaggccccattccggggctgttccccgaggaggaagggaaggggctctgtgtgccccccaggaggaagaggccctgagtcctgggatcagacaccccttcacgtgtatccccacacaaatgcaagctcaccaaggtcccctctcagtccccttccctacaccctgaccggccactgccgcacacccacccagagcacgccacccgccatgggagtgtgctcaggagtcgcgggcagcgtggacatctgtcccagagggggcagaatctccaatagaggactgagcactgctaaaaaaaaaaaaaaaggaaaaggaggtgcgtaaaaaaaaaagtcgac

SEQ ID NO: 12173 - DNA, 1072 bp, Homo sapiens
ttttggatatttcaaaaattattttcacacatgattatcatacagtattacaatgtattatgtgcaaaattccatttaaaaaatcatttacaaaagtacaacacagtatgtgctgagtgttctagttcaacaaaagccaaggctaaaaaaggtacaaggtacaaagccaaccaaatgagatgactatgcatctttacacagtacaataacatgtttttgtaactacctgtgttacgtggatacaagaccctcatagtttgtgcacctgcaaactggttttatttaacataagtttaatttcactgcaggttctgataatgtagattgatttttttgtgcattttcaaattcttctccattatatagcatcttatttaactcaacaaaagccacattatacattacttggtttctggtcccaataatttgatgctgttaagttttaatttgtatggaaaagggagaaaagtgttcttcttgatttttattttcctcaaggggctttcaaaattgtttctacaagcaaatcacacatggaatagattttgccaaacctcactgcatatttacagtattttaagcataggtggttccttctatctctttttctacatcttttgaagagcctgaaccagcagactgcactcctcagtcctttgttagagttcatatttctctctctacctctctctacattcatttctctccttattctcagcatcatttgtttaaaaaacaaaacagcaaaacaccactaaacgtgaacaagagaacagtacatccgatttccaaaggcattctgtggccagtgtcaggaatacgttgctttaagaaatccagcagtctctccccacaaagttgccaaaacatccagttacagaagagagactttaaaaatgcaatactctcaaatccagcaagagatttatttttgaatattaaatgttaaaatcacatgcataattatagaatattttaaagttacaaaaatattttaaaaccaatcctgacagtttacctgcaactgctataaaaatttctatgaaatatataaaaacatgaaggctctttg

SEQ ID NO: 12174 - DNA, 506 bp, Homo sapiens
aacgcagttcccggcaacccacttgaacccgagtgttccgatccagtccagtgttactgaaatgcctgcctccatttctggcttgattcaacgagctgttgctgctggggtgtgctggaacaggtttaaccagctcttcagtcaagcaaatcctctactcaccatgcttcctcctgccattcatttctatctccttccccttgcatgcatcctaatgaaaagctgtttggcttttaaaaatgatgccacagaaatcctttattcacatgtggttaaacctgttccagcacaccccagcagcaacagcacgttgaatcaagccagaaatggaggcaggcatttcagtaacactggactggatcggaacactcgggttcaagtgggttgccgggaactgcgttccaccaaatacatctctgatgggccagttgcaccagcattcagccctctgaagggagctggtgtgtgctgggcgagtgcttgcccctgccagtgctccctaactg

SEQ ID NO: 12175 - DNA, 1141 bp, Homo sapiens
tttttttttttttttttaaataacatctttaattaaagtttttgcaaagtagaatattaaacttaaaataggtcttagtacatcaaaatactaagttctctaattgtattccaagatggtctttaaaacataatatcccatatatcacagaagagcaaccttgatctgcaatgaattttacaaacataataaatatatttacgccattacacataacagtatgtacaacagcagttgacaatagtagctcagaacagcaaaaaggattagccccgcccccccaagtcatagtcctgatgtagactggactgattaaggaaccttgactgaaagagtagttactaactcaatgtgtagtaacttcccttaaaagagaaaagtttttttgttcctcaaaataaacaaaaatgttagtttggtgtgttcttcattaaaccatagacaatgacaaaagacaagagtaaggcaggcttaaaaagggaacaatataaacataataattttcatagcataatagaggactaaaatgcgaagctatttaacaaactcatgaggaaacaagtaaagcaactattttttaactaaagaattcaaaatctgctatagctgattctgacaggtaggtgagagaaagacatgaaataaaatgaaaatgtacaaagatggatcaacaaactattacattgcacaaaagcttaaaaaaaagaaagttcaagatgaaataatcggaaaaacaggaattttctcaagtagaagaaaatgctaagtcataaagagaactcccaagaggaaattatgtctgttttcctatacaaggggtatttaccctctgataagaatggtgacattattgctatgagaatcaaaaatagtatactcttagagggagacaactcttttcattcctccataaaagccaggaaaaaaaaaatctgtgactttcattatagcaaaagaaaatattcatataaaagctatatgttatttcctaaaaccagaatctattatgctcattaagcacacattttaattactacacactgctcaagtcttgatgtaatcttagaacaagaaagtggctttgcttttaaaagaggcaacagtgtaaatgtgacattatgatggcattttaattaacaga

SEQ ID NO: 12176 - DNA, 478 bp, Homo sapiens
aaaatgtgccagttccacttggtaataacgttgggaaaatgcaggtttatgaatgatgtggacttttagaggatcaaatcaataaattggattttttattttttgagggcagctgcatcactgttttaaataaagaatcttacataagaatgttgacaacattcacagtaagccattggaagaaaattgatctgcatgtcctagaccaatgattacaaggtgtctgtgggtctgtggtttagggggcccagccattcattccttttccccttggcactcatgagagagatgccaagttcagtgtggatttttcttggtgctctatggagaaatggagtctgtgtgcttactgaagagtcccaaaaaccagagaccattttcatttactgccatcataaatattctccaccattcaagatgcctgtgtacacggctatttgggaaacttaagtgttggaggaggcaggggctgaaggtg

SEQ ID NO: 12177 - DNA, 426 bp, Homo sapiens
aataaaagaaaaaatgtatcttaatttgaaatggcatttaaaataaacatatcagtaagtttctatatgtatcaaaactgaaaaaatagtgttccaggctaacatacttttttaatttttattgaaagttgttcaaatataatatattttttgagaggcagtgttaatgatctaggaaaccctgggctgatagagtagaaaggaatatggctagaataacattgccaaacattaggctttatgttttgttatgtttgtgttttcgttgtataattatgaacatgcacaagtttctgcatgaaaagatattaatatattaatcacatgtatgtgccttttggttacatgcattaaatctaacagagttaaattatttcagtggctcttttggcctcttactaggggggatagtcttgtttctagctt

SEQ ID NO: 12178 - DNA, 420 bp, Homo sapiens
gaaaattaaaatagctttcccctattaagctaatggcacacaaaactttaagtggacctccacttccagtggttggtttaggttgcagttgtgaaaatatgctgccaacatttaaaaacttgtttcatatgtatatatgtatacacatatatgaatatgtatgtatatatacatatatgagaacatgtgtgtacacatatatgaatatgtatatatgtgtatgtatgtatatatgtatatgaaatgagagccacatctaaagatttcttaaatcaagtttggttcagcttccttagaactgtggctgtactttttgaggagtacctcattagtactatatttttaatgcatgcaaatcataatagctccaaatgaaccacagttttttcccaatggaggatttttttttaattcttgtac

SEQ ID NO: 12179 - DNA, 799 bp, Homo sapiens
tggtaataagatttaattttccagtagcctgcatgaattgttccccacataaaactgtacagttagtgactgaattgtatacttaagtcccagtattttacattagtgagactgaaattagaggtaaatttctttaacaagtgtaaggcttacctatttataaagaattattctgttagtgtttaagaaaaacagatctagagacaatccagtaggctgcattgtaaacattatgattataaatctcttagtactgccattattattgacagttttgtaaagacttgtaaaaagtccagtttctcaggaatatgaaaattatcttcagaaacctggttggggcctttctccaattcctccagccagctgaaatactgccaagctcacttcatgtgcaaggtgatctgcactttcttgtgagtctgcttctgcatatactcggacgacatcttctgtaccagagggccggacaaaagctcgagaaagcttgtacttcttcaccaggtcattgattgcctcctgtaatcctgggggtgtaactgcttgtctttcagcatcggtagtgctaataactctcctgtctgcaacctaagtgcaagcatttcatatttgttactctattacacttcctttcagaagcttaacctgttaaacatacacttctacgaaaagtgccagactaaatataaaattacattaaaacttctttctccaaggtcagggtaattaatttcaacatttgtgcaacttttctctttttcttcagtctataaagaattacctttgggaaaaaatattt

SEQ ID NO: 12180 - DNA, 220 bp, Homo sapiens
catgcatctcattactgtcaaccaggtgatagtcatgtaacgctcctaccgtgtgcatgtgtgaatttacagcttgtcatcgtgtcatccctttaaccaacatgtgttttgttggtatcaaatgtgtcaggtttaattgacattttaaaatgtcttcaaaaagatcacactatgattcagcattgaaacgaaaagttattgtgtatgcagaaaagcatgg

SEQ ID NO: 12181 - DNA, 1047 bp, Homo sapiens
gcccagggctctcggatgcagggagcctgggcccaaacagcagcttccggagtcggaaggagctgaggaagaagactgactgaaggagcttgcagcttttccgcctcggcaaccggacccagcagcaagcaggacgggcggcgctctgctactggtcccgttaagccagagtagcccaagccctgaagtcactgctcatccggaatggaaatcccgccgaccaactacccagcctccaagggcggccttggtggcacagaactacatcaactaccagcaggggaccccgcacagggtgtttgaggtgcagaaggtcaaacaagccagcatggaaggatattccaggaagaaggacataagtatcaccttaaatttgctgttgaagaaattatacaaaaacaagttaaggtgaactgcacagctgaagtactttacccttcaacgggacaagaaactgcaccagaagtcaacttcacatttgaaggagaaactggaaagaatccagatgaagaagacaacacattttatcaaagacttaagtccatgaaggaaccgctagaagcacaaaatattccagacaattttggaaatgtatctccagaaatgacgctcgttctacatttagcctgggttgcctgtggttatataatatggcaaaattctactgaagacacatggtataaaatggtaaaaattcaaactgtcaagcaagtgcaaagaaatgatgactttattgaattagactacaccattctacttcataatatagcatctcagttccatggaatccatgacagcaccaactccatctttacctttcacctcatgcatctttgcaattctgccagtgtagtaaaggactcgttctgttaatgtagttttcccagaatcaatgtgagctgagattccaatatttcgtattttttcattaggaatcacccctgatgaagaccatcggcaggccttccaattaacctgcttcctctgccagcctagggaggcgggggcccttccgctgccccagagccgcgacgggctgcggctctc

SEQ ID NO: 12182 - DNA, 480 bp, Homo sapiens
acctcacaggactgttgtgaggcttggcaagttttgtctaaaaacatctttttggcttggaaagggatctgggaagccaggtattaattgcagggatagttccaagtctgtcctgtcttcatctctgtgtcccatctctacaacccacatacagacacacacactctctctctctttctttccatcccaccccccttggaattatttagtctttgcaatattagaaaccttgactctgatgcttaaagcttcttgtccatggcttttgtttgatggttttcaatagaggtgactgagattgtagggggggcatttttggttgcccccatgcgtgggggcactactaagaatgctaaacttagtccccacaacaaagaatcatcctgtcccatgtcaacattatacccatggagaaacactggcatggatttgcactaggatgtatatgggcaaagctgtcttccccaagtggaacctcag

SEQ ID NO: 12183 - DNA, 1254 bp, Homo sapiens
  misc_feature (1)...(1254): n = a,t,c or g
tttttttcacttgggccattttggaacccatttatattgtgggtgttaacnctgggcttcatctagccccatactagcctctgagactgcctcagaccgtctgaacattcatggcttccttgggccaagtgtagctgtccagtgtaaaggagtcatagtctggagtgtagaccagggatcttacaaaagcctccttgtccttaggctctgggtagtaggaagccaggttgtgtttgtacgcgtagtcgagaactttgatggcaattctcaaagacacgtctcggatggtgctgagtggtggatagagtctcccctgggacagatgctgctcagagacttcctgggcaatttggctctgctgtcaggaggaagatctcatctgggatgtgccggatcccgccgggcgatgactcccagttgccaaccccggggaacacgtaagcattgtttcccctgcccaggaatgaaggtcttgccatcttccagagtcacactcttaaaaggacttccactggcaaaaatccctcggccctcggtgacccggtagcacttctcagccgtgcactcggccttgctggtggggttgctcagggcaaagatgatagggcgctcgtggaaggaggccatgtccctcagaatctgctccgtgaaggcttctgcgatggcagcaacacctatgatggctgtgggcttcacagcctcactacctcttcagggagtttgactcaggatgggtcttgggcaaacatctccttttcatggttcaggtggctcctccccttgacaatgagccctttagagtccaccatccagatctttcttgtggcctctgccttcggtacaccttctttctctagggccatgacaaggaggtgggcaatgccccatagctgcctcgcctgcaccttggaaaacaaacacgtgattggaaagcttgttcttggtgattcgcagagcagccaagatccctgccacagcaagcggaggctgtgccttggatgtcatcattgaacatgcagtacttgttacggtatttgttgagcaggcggaaggcattggcattggcgaagtcttcaaattggatgaggcaatttattccaaacttgtctgtcacagcctgcatgaactcatccagcaagtcatcgtatgccttcccgtgcacgcgctggtgtttcaggccgatgtacagagggtctctgagcagctcctcattgttggtgccgacgtccagcagcacagggaggcacagggcgc

SEQ ID NO: 12184 - DNA, 1127 bp, Homo sapiens
ccgagaaggaggtccagcagtggtacaaaggcttcatcaaggactgccccagtgggcagctggatgcggcaggcttccagaagatctacaagcaattcttcccgttcggagaccccaccaagtttgccacatttgttttcaacgtctttgatgaaaacaaggacgggcgaattgagttctccgagttcatccaggcgctgtcggtgacctcacggggaaccctggatgagaagctacggtgggccttcaagctctacgacttggacaatgatggctacatcaccaggaatgagatgctggacattgtggatgccatttaccagatggtggggaataccgtggagctcccagaggaggagaacactcctgagaagagggtggaccggatctttgccatgatggataagaatgccgacgggaagctgaccctgcaggagttccaggagggttccaaggcagacccgtccattgtgcaggcgctgtccctctacgacgggctggtatagtcccaggctggagctggatgcctgggaaccactcacctccttctgtgccatgaggccacctcagccctgacaccaaccccgtgcgtccacccagccttcttccgcatccacacacagccggctgcccttgacccgggaggccccggctctcctctcccctgtcctgcacccatcccccgcctgaagccaccggtccaattgccagcaacctctgcttgtccggaaaacgacaacacgaaatggaaaaggctacagccctctgcataaaccaaggacttggctgcctcgcaggcagcctccgttcctccggctctcttgcgcgtgtgcttttgttttttattttgaacagacgttttaaaagaaaaaaaaacaactaccttctgtcctagaagacacagactgacagatggggtgaaggcctggggacctcagagaactctgccttgccctcgtccctcgtccttcggcagccggagaggctgtgggtgggccgagggtgtctaggggttctgcctggtcaacgttatttgtcgtcccatcttttggcagcaaaaccacctgcgtggctaggatgattaattatgaggatgatgattttttttgtgaaaaaaaaaaaaaaaa

SEQ ID NO: 12185 - DNA, 386 bp, Homo sapiens
atgaaccgcctctggaggaacacgtgcagtcaacaaatgaaagtctacagctggtaaaccatgaagcaaattctgtggcagtggatgttattcctcatgttgacaacccaacctttgaagaagacgaaactcctaatcaagagactgctgttcgagaaattaaatcttaaaatctgtgtaaatagaaaacttgaaccattagtaataacagaactgccaatcagggcctagtttctattaataaattggataaatttaataaaataagagtgatactgaaagtgctcagatgactaatattatgctatagttaaatggcttaaaatatttaacctgttaacttttttccacaaactcattataatatttttcataggcaagtttcc

SEQ ID NO: 12186 - DNA, 504 bp, Homo sapiens
ttttttttttttttaaatgaatttaatctctctctagaaacagtgcactgattttacaaatgtccacatttggttttcagtttaccaagatgatgccagtatagctagtgagatgcagcaccccatcctcagccccctcgcctctggaagagacaccagactgcaaagggcaccgcgtacagaagctaacggaacttgaatgacaagacaaaaagagcagaatcagttagtgtgacacaacattctaacatgcctgattcttacatcaaatatggtaactttggggttggtagggggagacaaacaaggagaatccacttgggaacaatttgatgaagtttgcaaatcagcactttacccccaaattaacaacagcttgtatggaaaaaaaaatgctcttttaaaagtatatggtttggacaggtatatttggtttcccctggagtttttggtaaaaaagtatcaaaaccttgggcttaaatatatatatatatatatatatat

SEQ ID NO: 12187 - DNA, 885 bp, Homo sapiens
gcgactagaagaaaaagagagggagatgcagcagctgctgagccagccccaacacgagcgagagaaggaagtcgtcctgctacggaggagcatggcagaaggggagcggcccgggccgccagtgacgtcctgtgccgctccttggccaacgagacccatcagctgcggaggacgtgaccgccaccgcccacatgtgtcagcatctggccaagtgtctggatgaacgacagcatgcacaaaggaatgtgggggagagaagtcctgaccagtcggaacacacagatgggcacacctctgtccagagtgttattgagaagttgcaggaagaaaatcgactgttaaaacagaaggtgactcacgttgaagacctcaatgccaagtggcagcgctacaacgccagcagggacgaatacgtgagggggctccatgcgcagctcagggggctgcagatcccccacgagcccgagctgatgaggaaggagatctcccggctcaacagacagttggaagagaaaataaatgactgtgccgaagtgaagcaggagctggcggcctccaggacggcccgggatgctgcgttggagcgggtgcagatgctggaacagcaggtgtctgtccctcgggctccggacggcactgaccagatgtctgctggccggtggtggccgaaatcatgggacaggctgggctgaaggcttggtggcactgagtgggcagtggtcacggtgggggtgggagaagcctgggggggcgcttcctccttccttgagcagaaatgtgtgtctcgcctctcttcagattctcgcttacaaggatgacttcatgtcagaaagggccgatcgggaacgggctcaaagtaggattcaagaactggaggaaaaggtc

SEQ ID NO: 12188 - DNA, 489 bp, Homo sapiens
  misc_feature (1)...(489): n = a,t,c or g
cttaggaacgggttgctaagctggtgtttttgctccaagacatggctgcagcttcccagggaggagcccagggncatctccaacactcagcctttccctccggacccttttaaaagattcaacagcaccgtctctctccacttccatcctagaatgcagaatctgcaaagtgccttttgtaaagtttcttaagggacccatcccagccaaaatgaatcccagggaagaaaaagtaaaaataattacagaggagttcattgaaaatgatgaggatgcagacatgggaagacagaataagaactcaaaggttcgaagacagccaagaaagaaacagccaccaactgctgtccccaaggaaatggtgtccgaaaaatcccaccttggcaacccccaggagcctgtgcaggaggagcccaagacccgcctcctgagtatgacagtccggagaggcccacggagcttncctccaattccttcaacttncagaac

SEQ ID NO: 12189 - DNA, 340 bp, Homo sapiens
ggtttgggtcaggtttattagattgttatgaatcccagcttttcctcctaaagcaggcccacacaatgagatctgcaaatccagaaacctaacaaaggcattaagttccaaaagcctgtttcctcctacaaaattcccattatcagtactgtgatttctgcttttcagtgttgaccccaagccatgttcctgagtcatggctctgagtggcccagcattaataaggcccagcgtgcaagggcttgttgacagaactctgaaccgctttcaggcagctgattagaaaaaactggcgagtctccaagttgagtgatttagaggccttctgggggtcagaaca

SEQ ID NO: 12190 - DNA, 1430 bp, Homo sapiens
gccgccggcggagaacaggagcatggagggcgggctggggcgtgctgtgtgcttgctgaccggggcctcccgcggcttcggccggacgctggccccgctcctggcctcgctgctgtcgcccggctccgtgcttgtccttagcgcccgcaacgacgaggcactgcgccagctggaggccgagctgggcgccgagcggtctggcctgcgcgtggtgcgggtgcccgccgacctgggcgccgaggccggcttgcagcagctgctcggcgccctgcgcgagctcccccggcccaaggggctgcagcgactgctgcttatcaacaacgcgggctctcttggggatgtgtccaaaggcttcgtggacctgagtgactccactcaagtgaacaactacatgggcactgaacttgacctccatgctctgcctgacttccagcgtcctgaaggccttcccggacagtcctggcctcaacagaaccgtggttaacatctcgtccctctgtgccctgcaacctttcaaaggctgggcgctgtactgtgcaggaaaggctgctcgtgatatgctgttccaggtcctggcgctggaggaacctaatgtgagggtgctgaactatgccccaggtcctctggacacagacatgcagcagttggcccgggagacctccgtggacccagacatgcgaaaagggctgcaggagctgaaggcaaaggggaagctggtggattgcaaggtgtcagcccagaaactgctgagcttactggaaaaggacgagttcaagtctggagcccacgtggacttctatgacaaataagcccatgtttttggcttcctgaacctttttgcccccacttttagacataccccagagccctgtggctccccacaccctgccataggggcagtcctgccttacacatagaagcattcatgcctgctgccctgccctcaggcacagccagctgtgagctcccaggtcattggccttaccagttgtcaggagtctgtgctgtgcaccctgggttataaggaggcttaggagagaggttatgggtattggtgtctctatccccaggaatagaacttaaggggtgggaagaacaggaaaagaagctggaacacagaagagaggaggttgtgtctcttgctcatagcaagcctgtgggtagaggaaagagtgatctggtgtcgaataggaggacccatgtagattcgcagatggcctggatgggaggaagggcagacggtacatgtcccagcccacatagatgccccttgctgagggtagcaggaccttctgttgaactttgtgtcctcactctgatgtctccttccttcagaatctaccacccgtcccccaggctgggagaaggggctcctgggtgtctgtatacagcccaaaggcagatacaaataaaatacagattgtcctttc

SEQ ID NO: 12191 - DNA, 452 bp, Homo sapiens
gactttcggcacatgcgctgttcgcctctcctcccgggagtcttctgcctactcccagaagaggagggaagcacagtatgaagactttggagactcaaccgttagctccggactgctgtccttcagaccaggacccagctccagcccatccttctccccacgcttccccgatgaataaaaatgcggactctgaactgatgccaccgcctcccgaaaggggggatccgccccggttgtccccagatcctgtggctggctcagctgtgtcccaggagctaggggagggggacccagtttctctctccactcccctgggaaacagagtttggttcccctagtgagttgagtccctcgaatcgaggagcaagaactttctgaaaatacaagccttcctgcagaagaagcaaacgggagcctttctgaagaagaagcgaacgggccagagttggggt

SEQ ID NO: 12192 - DNA, 390 bp, Homo sapiens
agagttttcagattgctcttgggaaccatgccgaaagtagtgtctcggtcagtagtctgctctgacactcgggaccgggaggaatatgacgacggcgagaagcccctccatgtttactactgtttgtgcggccagatggtcctagtgctggactgccagttagagaaattgcccatgaggccccgggaccggtcccgtgtgattgatgctgccaaacatgcccataagttttgtaacacagaagatgaggagactatgtatctgcggagacctgaaggcattgaacgacagtacaggaagaaatgtgcaaagtgtggactgccgctcttcttaccaatcccagccaaagaaatgctcctgttaccttcattgtggatggagcagtagtca

SEQ ID NO: 12193 - DNA, 379 bp, Homo sapiens
cggacgcgtgggatgaaattttccaaaagcctttccagacactgatgtttttggttagagattggagtttcccttatgaatatagctatggactccaaggaggaatggcatttttggataagcgtttacaggtgaaggaacatcaacatgaagaaattcagaatgttcgaaatcacattcactcatgtttctccgatgtcacctgctttctcttaccacatccaggactccaggtggccacaagccctgactttgatgggaaattaaaagatattgctggtgaattcaaagagcagttacaggcactgataccgtatgtattaaacccatctaagttaatggaaaaggagatcaatggctcaaaggtcacctgtcgggg

SEQ ID NO: 12194 - DNA, 964 bp, Homo sapiens
tttttttttttttttttttaaaatttattatttattatttctttttgctcttgtttcgtttctcttccttgagcttctttttggagactttgggtctattggcctttctgtataggtgatacccaatgaggcccaggagggctggcaccatggccatccctaccagaggcaaaatgcccttcaccagctttagccagtagttggctcggattagtgcaatcagctccacgtcatactgcaccactgcatccgctgggacagatggtggaaatccccgttttccataggccaagtgagaaggaatgattgcccttcgcttctctcccacacacatgtcgagaagactctgctccagacctggaatcacctgcttttggccaagttctataaccagagggtctctggtcagggaggtgtcaataatacgtccatctaccaagcttcccgtgtagtgtatgtgaagcgtgtctccaaaagcagcgggctcggcacatggttctgggggctccaccagggtctccacttggagggtccggacgggactttcggtttcgagcccagcctcagcccggcacaccgccgcactgagcagcagcagcagcagcagatggagcgggaggagtgaggggcgcagggtcatgactgggcgcggggcagggagccggggcaccaggacaggctgttcgggtggcggcagccaggacagcgttcccgcggcgcccaggccagactggacggtacggggcgggtcgcgatgctagagctcctcctcctgcagcccttcctccaccttgtccccacctccgaaagggagtaggccgaggggcgccctctgtaccctccaagatccgaagggcgcaggttctcacgcatccgttagacgttctgtcatataacgtgggtcgggccaaacaatagcacccatttacgattacctactgtgtgtcaggagttagtctctaat

SEQ ID NO: 12195 - DNA, 217 bp, Homo sapiens
ctgaacaagaggatttcctcacatcatttccttgtgtctggacatcaggggtaacaactgtacttactttacaggaagaaattttaaaactgaaaactacctgggatcatagtgtttctgtgattttatttaattgtgtatagtaattatccagtgccagaaaaaccgtcacttgcaaaatactttgcactcaaaatggttttttacaatgcttcta

SEQ ID NO: 12196 - DNA, 1381 bp, Homo sapiens
cggcggcggcggcggcagcggctcggaggcagccgttgggctcgcggcgagcggcacggggtcgagtcagtgcgttcgcgcgagttggaatcgaagctcttaaaatcggcaagatgacttggacttcgagacaggagatgcaggggcctcagccaccttcccaatgcagtgctcagcattacgtaagaatggctttgtggtgctcaaaggccggccatgtaagatcgtcgagatgtctacttcgaagactggcaagcacggccacgccaaggtccatctggttggtattgacatctttactgggaagaaatatgaagatatctgcccgtcaactcataatatggatgtcccaacatcaaaaggaatgacttccagctgattggcatccaggatgggtaccctatcactgctccaggacagcggggaggtacgagaggaccttcgtctccctgagggagaccttggcaaggagattgagcagaagtacgactgtggagaagagatcctgatcacggtgctgtctgccatgacagaggaggcagctgttgcaatcaaggccatggcaaaataactggctcccagggtggcggtggtggcagcagtgatcctctgaacctgcagaggccccctccccgagcctggcctggctctggcccggtcctaagctggactcctcctacacaatttatttgacgttttattttggttttccccaccccctcaatctgtcggggagcccctgcccttcacctagctcccttggccaggagcgagcgaagccgtggccttggtgaagctgccctcctcttctcccctcacactacagccctggtgggggagaagggggtgggtgctgcttgtggtttagtctttttttttttttttttttttaattcaatctggaatcagaaagcggtggattctggcaaatggtccttgtgccctccccactcatccctggtctggtcccctgttgcccatagccctttaccctgagcaccaccccaacagactggggaccagccccctcgcctgcctgtgtctctccccaaacccctttagatggggagggaagaggaggagaggggaggggacctgccccctcctcaggcatctgggagggccctgcccccatgggctttacccttccctgcgggctctctccccgacacatttgttaaaatcaaacctgaataaaactacaagtttaatatgaaaaaaaaaaaaaaagaaagaaagacgtgtaaaatgccaagaactctaggaaacagggacaaaaacacttcaaagagaaagttcatgcacttgtttctgaccacccagggcacccttcagcacacgctgtctggagtggcctgaagcaaggagtgtcttggtcgac

SEQ ID NO: 12197 - DNA, 508 bp, Homo sapiens
ttttttgtaataatctttcattttatagaaaaatgtaattatgcaatggttatcaggaaagttaattcagtaataaatatgtaggctagggaatggtttacaaatattcaaccaatacccacaaaatcctgtatgatttacacaactgttcaagcaaacataagaaaactctggttcaatttctattaactatcaaaaggacaaaatgctcttctatctcaaaccaggtctgagtgacagcttttcaatataataaagacacacacctgcactcacacacacacaataaagacacagtatctcttctcattctaaaacacttcctcttttagtccgtatacacttcgaataatcttgtgtagtaaatttttgctgcaactgacaatgttcaaagtaaatctctcccggtttggtgttctaagaagccaacagccacagcaggatgagcattaatactacttccagaatctataaaatcccaatgctattgccaggcaagtaaacaccg

SEQ ID NO: 12198 - DNA, 1597 bp, Homo sapiens
  misc_feature (1)...(1597): n = a,t,c or g
tgacgcgctcctaccaccctgggcagccgagcagagtcgtccccagcggtcatccctccctgcctccctgactttgcaacaccgcgttccgggaggaccggcctcggcgagggaggaggcgggggagctgcgaacacccagacccaaaccctgacatgctctggggcggagaggaggaagccaggagctgagcgcgccgcgtgggctgcttcgccctccggctccgagcgccgggctccgggcgccctgccctgcgcctggggcagcagccttgctggtcttgggggcgccccccgcttcccgccccgggggtttcgcggccggcaggaccatgctgctgaaagagtaccggatcttgcatgccgctcaccgtagacgagtacaaaatttggacagctgtacatgatcagcaaacacagccatgaacagagtgaccggggagaaggggtggaggtcgtccagaatgagccctttgaggaccctcaccatggcaatgggcagttcaccgagaagcgggtgtatctcaacagcaaactgcctagttgggctagagctgttgtccccaaaatattttatgtgacagagaaggcttggaactattatccctacacaattacagaatacacatgttcctttctgccgaaattctccattcatatagaaaccaagtatgaggacaacaaaggaagcaatgacaccattttcgacaatgaagccaaagacgtggagagagaagtttgctttattgatattgcctgcgatgaaattccagagcgctactacaaagaatctgaggatcctaagcacttcaagtcagagaagacaggacggggacagttgagggaaggctggagagatagtcatcagcctatcatgtgctcctacaagctggtgactgtgaagtttgaggtctgggggcttcagaccagagtggaacaatttgtacacaaggtggtccgagacattctgctgattggacatagacaggcttttgcatgggttgatgagtggtatgatatgacaatggatgatgttcgggaatacgagaaaaacatgcatgaacaaaccaacataaaagtttgcaatcagcattcctcccctgtggatgacatagagagtcatgcccaaacaagtacatgacaatggatgaagtccgagaatttgaacgagccactcaggaagccaccaacaagaaaatcggcattttcccacctgcaatttctatctccagcatccccctgctgccttcttccgtccgcagtgcgccttctagtgctccatccacccctctctccacagacgcacccgaatttctgtccgttcccaaagatcggccccggaaaaagtctgccccagaaactctcacacttccagaccctgagaaaaaagccaccctgaatttacccggcatgcactcttcagataagccatgtcggcccaaatctgagtaactttatataaatatctcatggggttttatattttcatttgttgttgttgtttttttttaaggaatcttctgataggggaaaaagactgctttgtcattcaaacatgnttccttcgacctttcagtggtgcatgtggactcagtaaa

SEQ ID NO: 12199 - DNA, 888 bp, Homo sapiens
  misc_feature (1)...(888): n = a,t,c or g
ctggcccagagccttcgggggacttccaaggaagctgcttcagacccctctgactctccaaaccttcccacaccagggagctggtgggagcagttgacccaggcctcccgggtctatgcctctgggggcactgagggctttcctctttcccgatgggcaccggggcgtcatgggactgcagctgaagaaggtgcacaggagagacccctgcccacagatgagatggcaccaggcaggggcctctggttgggaagactatttggagtgcctgggggccccgcagaaaatgagaatggagccctaaagtccaggagaccatctagctggctgcccccgacagtgagtgtgttggctcttgtgaagcggggggcacctcccgagatgccttctcctcaggagcttgaggcctcagcacccaggatggtgcaaacccatagggcagtgcgggctctctgtgatcacactgctgcaagacctgaccagttgagcttccggcgtggggaagtgctgcgtgtcatcaccacagtggatgaggactggctccgctgtgggcgggatggcatggagggtctggtgcctgtggggtatacctcccttgttctgtagccctgggaccctttcctgcgtatgtgtctccttcctgtcacctgggaatggaatggccagtgaacaccatcccagaagcattttccctctgcaaaatgacgtttcttcccacgtctgtttctgctaatatttaaaataaactttccttcttccctcctatacccacctgtaaggtgaaatctgctcttcttccaaatatataaaaaaggaattgccctccaggtaatccctttcctttttcccgtctatataagggaatgtnttccttcctatctatctgca

SEQ ID NO: 12200 - DNA, 1437 bp, Homo sapiens
  misc_feature (1)...(1437): n = a,t,c or g
gcttcgctgcccgcccagaagatgaatccggcctcggcgccccctccgctcccgccgcctgggcagcaagtgatccacgtcacgcaggacctagacacagacctcgaagccctcttcaactctgtcatgaatccgaagcctagctcgtggcggaagaagatcctgccggagtctttctttaaggagcctgattcgggctcgcactcgcgccagtccagcaccgactcgtcgggcggccacccggggcctcgacttggctgggggtgcccagcattgtccgctcgcactcgtcgcccgcgtccctgcagctgggcaccggcgcgggtgctcgggtagccccgngcagcagcacgcgcacctccgccagcagtcctacgacgtgaccgacgagctgccacttnccccgggctgggagatgaccttcaacgncactggccagaggtacttcctcaatcacatagaaaaaatcaccacatggcaagaccctaggaaggcgatgaatcagcctctgaatcatatgaacctccaccctgccgtcagttccacaccagtgcctcagaggtccatggcagtatcccagccaaatctcgtgatgaatcaccaacaccagcagcagatggcccccagtaccctgagccagcagaaccaccccactcagaacccacccgcagggctcatgagtatgcccaatgcgctgaccactcagcagcagcagcagcagaaactgcggcttcagagaatccagatggagagagaaaggattcgaatgcgccaagaggagctcatgaggcaggaagctgcctctgtcgacagctccccatggaagctgagactcttgccccagttcaggctgctgtcaacccacccacgatgaccccagacatgagatccatcactaataatagctcagatcctttcctcaatggagggccatatcattcgagggagcagagcactgacagtggcctggggttagggtgctacagtgtccccacaactccggaggacttcctcagcaatgtggatgagatggatacaggagaaaacgcaggacaaacacccatgaatatcaatccccaacagacccgtttccctgatttccttgactgtcttccaggaacaaacgttgacttaggaactttggaatctgaagacctgatccccctcttcaatgatgtagagtctgctctgaacaaaagtgagccctttctaacctggctgtaatcactaccattgtaacttggatgtagccatgaccttacatttcctgggcctcttggaaaaagtgatggagcagagcaagtctgcaggtgcaccacttcccgcctccatgactcgtgctccctcctttttatgttgccagtttaatcattgcctggttttgattgagagtaacttaagttaaacataaataaatattctattttcattttctgc

SEQ ID NO: 12201 - DNA, 818 bp, Homo sapiens
cgatccgagacgtggctccctgggcggcagaaccatgttggacttcgcgatcttcgccgttaccttcttgctggcgttggtgggagccgtgctctacctctatccggcttccagacaagctgcaggaattccagggattactccaactgaagaaaaagatggtaatcttccagatattgtgaatagtggaagtttgcatgagttcctggttaatttgcatgagagatatgggcctgtggtctccttctggtttggcaggcgcctcgtggttagtttgggcactgttgatgtactgaagcagcatatcaatcccaataagacattggacccttttgaaaccatgctgaagtcattattaaggtatcaatctggtggtggcagtgtgagtgaaaaccacatgaggaaaaaattgtatgaaaatggtgtgactgattctctgaagagtaactttgccctcctcctaaagctttcagaagaattattagataatggctctcctacccagagacccagcaccgtgcccctcagccagcatatgcttggttttgctatgaagtctgttacacagatggtaatgggtagtacatttgaagatgatcaggaagtcattcgcttccagaagaatcatgggcacagtttgggtctgagattggaaaaggctttctagatgggtcacttgataaaaacatgactcggaaaaaacaatatgaagatgccctcatgcaactggagtctgttttaaggaccatcataaagaacgaaaggaggacttcagtcacatatttcatgactcctagtccagggaccttaatgaccac

SEQ ID NO: 12202 - DNA, 524 bp, Homo sapiens
ggtagcctcctggaggagaatttcggtgacagtctacaatcctgcctgctacaaatacaaagcccagaccaatatcccaacaaaaacttgctgccagttcttcattttgaaaaagtggtttgttcaacattaaaaaagaatgcaaaacgaaatcctaaagtagatcgggagatgctgaaggaaattatagccagaggaaattttagactgcagaatataattggcagaaaaatgggcctagaatgtgtagatattctcagcgaactctttcgaaggggactcagacatgtcttagcaactattttagcacaactcagtgacatggacttaatcaatgtgtctaaagtgagcacaacttggaagaagatcctagaagatgataagggggcattccagttgtacagtaaagcaatacaaagagttaccgaaaacaacaataaattttcaccctcatgcttcaaccagagaatatgttatgttcagaaccccactggcttctgttcagaaatcagcagcccagactt

SEQ ID NO: 12203 - DNA, 1211 bp, Homo sapiens
  misc_feature (1)...(1211): n = a,t,c or g
cttttttcttcaatttaattgaagttacttagaaaaataatcaggcttgaatggcttttcctggaggaaggttcatgaacattttcacgcttttgttggcaatgtggaattcagctttctttaacagtacagcaagatacagggagcgttttctacaacaggctctctactgcatacaaatatgtaaaaaaagaaaatcacactccacaaagatgtgacattacatgtccatatgccatactgagcatgctcataagaaagtagtatgggcagctccttctggacctaacaaagtgtagcagactgaaatttgcctgttatcagccaagggttaagcggattctagaaggccttgttgcctgtagggttctaactggttgtgatggaaaaaggttggaggaaatgctggtggtgggaactcgggggagtgatgtggtcagtcctgctgacatagaggtgggcaaggaagggatttggtcactgggattgcacagaatggcgnnnnnnnnnnnnnnnnnnnnnnnnnnnnnnnnnnnnnnnnnnngggaggactggctaggaaagcaagcagagtgcctctgcttcttctgccaactctatctcagcactgatccagaccccaccagccaagcatttgtgggacccgcacactttgctctggagctttctagtagcctggattaatcgacccctgtgcttcatgcctttgccaccaggagaaccagtgcaactgaagtttccactgcctgctgctctcctgtggcatccacatcctgaataggcaggagggtgcagcccacctggtgcacagggaggaggaggaacgtcccctctgagataccacaggtcagcagaccacctcttcccagaccagctggggagggcagggaggcggggtctggaggagctgcgggaatcatctagagctttccaaccaaagggataaagtaagcaggaatgtccttgcaaatactgccctggctgtacctggtctttaaaacacagcagcacctttgagaagtggctgggagatgggacgcctgcctgtacttttctccagctaagcatgcatagaaagcagtttcaaatattcctctttaaaaaacacaaactttcattttccaggcacacttcacaagtggatttctttaaccaaggacacagaatactttctacattctgcaaaaacagttgaatccattttttttaaa

SEQ ID NO: 12204 - DNA, 601 bp, Homo sapiens
gacgcacacggcaccaaactgtttgatttaattttggatgagatcgttcttgcagcaagatgttaataagacaaaatctagactaaatgtgttaaatgggcttgccaacaatatggatgatttgaagataaacaccgatattactggtgctaaagaagaactcctagatgacaacaattttatctcagacaaagagagcggagttcataagccaaaagattgtcaaacatcatttcagaaaaataatacgttgactctgcctgaagaactgtcaaaggacaaatctgaaaacgccttaagtggaggccagtctagtctatttatacatgctggtgctcctactgtttctagtgaaaactttatcttgcctaaaggagctgctgttaatggaccagtttcacactcctccttaactaagacttccaatatgaataaaggcagtgtttcattaaccactggacagcctgtggatcagccaacaacagaatcttgttcaactttgaaggtagcagctgatcttcagctgtctacaccacagaaagcaagtcaacaccaagttttatttttgttatcagatgtagcacatgctaagaatcccacg

SEQ ID NO: 12205 - DNA, 658 bp, Homo sapiens
agctaatgtataaatatttctaaaggccattaatagtaacaaaataagtaggggaaaaaatggaccttctgtataaaaaccccttagcttttttttttcacaagttataagtggaataagttaataactgagctcgtaagtgtatctcataactataagagctacatgaagaaaataggaataacacacctggtatttaaacacaatcttcaaaattcttgcaacattaaacatagtaaaatgccagaatataaaatgaggtgtgctaatggtcacaggattgaggccagcattacagtttggggtgatttttcttttatttgctccctcactttgtttcctagatgctagtaggggtatctgggttgcttgagataccattttgcaattgccccttctctttctgcctaccatcttctcaggccctgatgagcttattggtaggcaactgggctgctttaatgttgaacttgtacttctttagaaactgaagtggaatcattgaaaactttcaataaagctttaaagttccatttacttttgaagcacagctaagctcctctgaaggcagctggtttgttgcaaacttaaaattgtactgaaaagttgccactttttatttagtaagaaaacaaacattctggctcactagagttca

SEQ ID NO: 12206 - DNA, 1035 bp, Homo sapiens
gctgatgattttgcagttggtactgcagtagatgatggcgcggaaagtgcgacactgaagtcgctgcttgtcatagcctgtggtccgtttccactggcaaatacttggaaattcattcttcgagcattgtggaccacaagcttctctctgggtggaaaattattgccactgccagtatcatagggaacacacacacacacacacacgaacagaaggattcaaaaagcagacactggagaggagtaggggccaatttcaaacagaaaacccagtaaagggctggagaggagtaggggccaatttcaaacagaaaacccagcaaaggagttagaggagaacagctccaactgtgcaaagtggagaccgactctccactctccagtggcaacctcacattctggtactgtgcaaagcggagaccgactcttcactctcctcacattctggttacgttggccctggtagacctttatccctttgcctctgtaacggtgataccataatcataaccgtgccacatctcagcatatcagaggcccatggagtaaaaatagatgaaaagacctctcaagctagtttggaaaaatagagggtttagataaactgactatttaatctcctacttaaacctgttaggcagaatatctgggagaacactgggcgtaagatgactgctaacaggcataaccccttgctctaaccagcctagggccagtatgtttttgatggaaaagacaactgtcaaatactacaacgacaaaaaggaagggaaaacatgagcagctctagaaaacgtaagattcaaaactctgaacaacaacaacaacaacaacaaaactatggacaacacacctagccaggaggcctgaccactcactcactcctaagcacactctacacatacacactgactttcccacacacacaacagtcaggtagatgcccaaaggagggcaaatccaaatatctgctctctttggaattttcacggcaaatctgaatttaggcaaaagtgaagacctccctggggtcttc

SEQ ID NO: 12207 - DNA, 295 bp, Homo sapiens
ctacactccagccaaagcaacaagagcaaaaacttcgtctcaaaaacaaaacaaaaaaagagtattcattgtgaggacaaacaatacaaatacgaagagggttgtagtacctttacttgtatcacagatacttttgtacccattttgcactagaggaaaaccatgaagcagttgctcaaatgttgttcaacaccagaaaatttatattggagaaaagcactgtaaatgtaatgcatttgtgaaaacattttttaaaaaactacagcttagaaaataccagaggcctcatactaaa

SEQ ID NO: 12208 - DNA, 655 bp, Homo sapiens
ctgaagacagctggcaagtctgaaccttccagcaagttgcgaaagcaacttaaaaagcagcaagactctttagatgtcgtggactcttcggtctcctctttatgtctgtctaacacggcatcatctcatgggaccagaaaactatttcagatttattccaaatctccattctaccgagctgcctcaggtaatgaggccctgggaatggaaggaccattgggccagaccaaattcctggaagacaagcctcagttcatcagcagaggaaccttcaacccggaaaagggcaaacaaaaattaaagaatgtgaaaaactcacctcagaaaaccaaagagaccccagaggggacagtcatgtctggccgcagaaaaactgtggacccagactgcacctccaaccaacagctagcactctttgggaaataatgaatttatggtctgaaccggcagatgtgtgtccctccgtggctacagagtggtaaacaaatcttcacctttggggctgcgtttcatcacctcgtccacaatagtcaatcctaattgtggtcctgcctcttttctaagcatatggctaagactgtatgtggtgaattcctgggcctcctgcatgaagcagaaagcctgctggggatggtgccagctgtgccttggcctt

SEQ ID NO: 12209 - DNA, 215 bp, Homo sapiens
  misc_feature (1)...(215): n = a,t,c or g
atacccgtcaccacccctggtccttttactgtgccatggcaggcagtctcggcttgggccctcatggccacacagaccttctactccacaggccaccagcctgtctttccanccatccattggcatgcagccttcggtgggattcccagaggtcaatggctcctgtacttggctgctgctttgctagngggagccaacacctttgcctcccacct

SEQ ID NO: 12210 - DNA, 1058 bp, Homo sapiens
tttttttttttttttttttctcctttcctcaacagttttattgccttttaagaaaatttttgtaaaatataaatacaaaggcagagaatttacttacaaagttaaaacacagatttcaaacataaacacacgattcagaaaattttagttttatgtacatttccaagcaacctcaacatattatgttagttttcaatattttacagggtacagaaaaaaatagctcaaagtcttctttaaataagagcataaaatgtttaaacatataaacaatccggtttgatgcgtgaaaactaatttcacagcttttaaattaggatataaaagtttcatacaattagttgttgtgtgtggatatggtttgaatttatattacacactactgggattacatccaatagcatttacctggcccgagcaggtactctggtaaacaaaacaaagttatatcaccaagtgcctttccccgaattcgctccctcaaaccaaccacacagttctgaccactctacagtcatggcctgtcatcagagctttgtatgaaattaagtcaaagtgtggagctccttttactcatttttttttctccttaaaaaagaaaagaaacaaatgttccaagtaaaaacaaacgtatcccaaagcatgtgtgcattgaaaagtaaagaaacattataacaacttcataaaaactgacttaaaagtttaaaaggaaaaaaacatgtttctaagtccttctgactggagtaatttctcttatataaagaagagatattttcatatgtaatagtgtcctttctttacagaaatagttgtattatgacacatatgcacaaggattaacactataacacactgtacaggctgggtccagcttgctcaccagtagttgtctgaggccagatcactggggtggagccactctacagaggagcccagcagagtctgaatttcgttcgtgaattccaccagatctaacagctccttactttcagggttgaaggcttccaggtctttggagcaagagaacaagagacttgcagaaacctgccgataaaatc

SEQ ID NO: 12211 - DNA, 1027 bp, Homo sapiens
tacatattagaactcaatgaagaattatttaaaagagaggaaaggcagtgcagggctggaggtcctggagggtggcggcgggtcgtcctaactagcaggctgaaaggtgctggaggggatgccttcactcagaggaagttcacagccacctgccttggaacatgtacctgttcatcttttcgtaatgttagtattcattttgctatcttcctgttgccatttccaaacagtgtcagtatgtttttgttaaatacgaacattttaaaacatatcgtatctgtaagccctatttgggtgtcttcatttcatgcccgcactgcaccataatgagtaccacacaaagcccagaggatgacacttcctccagaggtctcactgcacatggagaggttagccctggcattaagggtccttggaatctctcagcagtcatagtcagtcagatgcaccaagggcagctgagtcaatctcctttttgtaacaacaggccgttcctgcggttctcagtgctgccaacctgggcatactgaagagcctcaaccaatactggctctcagggtactttcctttttaaaagaagttcaacttttgctattcttatgccccataacttttaatttgcacaagatcagccatgcccactcactgaattctattatattacccacacctctggaaattcacaaagtctgaattcagatctatgcataaggatgcaaacggattagcaataattgctggcactgccatcaacacctcctgtcgatctcacctgatctgaggataaatgaaggcaaagaatgtggccccagcccctggattggagtggaggcaaggagggtggcgagctgtcttcagcagtcggcctcacctctctgctcctgtatcaacaagtgccatttcatccccacttccaatccccaacatttataccccgtgaatcaattcttcttcagcatgccagttgctggagacagcaccatttacatacaggcatctatagcagttatcttccagggtggaagca

SEQ ID NO: 12212 - DNA, 1233 bp, Homo sapiens
  misc_feature (1)...(1233): n = a,t,c or g
ggacgcgcagcgaactgctctcgatgctgttggaggccaaatgtggcaaaccaaccccaggcccacccagagcgagcaaacgctgagacctgaaaggacatggatgagaagaggagcccgcttcctgtacatatatttaagtgacaaacacggtcaaaagcttaagggacaggttttatggttgcttgtgtaataaagcatgtccttcgtatgtcacagtttggggcaacggaagtcttttagtgatggctaatgggtctgggcagcatcccttcatgaatttttttttaatccaatatccgttgatttgattgtgattagagaaccttggacattttgctgctaaagaatcttttttcccctctcccccttcctgaccctacttgcactgctgtggatttttttaagagaagcaaaaacaaaagtaaactcctttccctggccctccaaacatatattctgtgagataactgtgcctgctaccaagtgttaatcctgggatcgtatttttatatcatattcacatatttgtttttttaattggtgttagatgacatgattaataaaaaaggcaagatattttcagaatttgaatttcagttttttttttcttttgaaatgtccctttaagatttttttattctaaacaaaataaagaaaatcctgctgctctggtccttgtgataagcctctcttcggcatctgaggagcagctgcagcaaaatctaggggtgtaagtgtatcaggacttatgtgacttatattttggggagatgagggttgggttttttttttaatgctacgtgacagtttgaaaccttcacagttatcctctgggggtaaatcaattcttcaacccttgggtgtgtgagtttgaggcagggtcatttgtgtgatgtgtttggccttaccaaagcaaaagagggtgcaagaatgtgggagtatgtctgccggtttcaacacacacagacaaacacagccacacgcgcacacaagtataagactttttgtattactgctccctacttaacatacttgaattctcaaatttcctttggggtaaaaaaaaaaaaaggatttgaaaccataaagtgttctgaagaaattaagtctataaaaagcatactttcttttttcttttccttttttccctccacagacaatgtcctctgttcaattcctaacgcaaactacaataaatggtgacacacggttcagaaaaaaaaannaaaa

SEQ ID NO: 12213 - DNA, 582 bp, Homo sapiens
ttttcctttagcattcagaatgacaccatattcttaaatatactccttccctgaagcgtgtttgtgtgtgatgccatatttctttttcaggtaaatgtagtcttccttataaaaatgaaattaaacctatgctctcaattcttttatattctaacaataaataaaaaagaaaagattactgactgtgcattgtacctgtatttatagtttatggttatcaggaagctctgtaagaaagaaaaggtcagcctcccaggcaaaccagtagtggaggttttacatttgtttgcacatctcagtatatttctgttgaggtaaagtttgcacagtcatctgacttctgatcaagcattagattttaacttgtttagattttgtcttaaacaccagtaatatggctcttgtttatcagctaatcttgaatttattctgtggtaaatcttttgagttgttgagtatatttgagattgattggattcaacctcttgttgaactgaaaacttaattttttctctgtatttttgttacaaagccactgatacggtgcacaattgtaattaagtatgttgcagttgtaaatat

SEQ ID NO: 12214 - DNA, 1333 bp, Homo sapiens
ttttttttttgatttttgattttttaatggcagcactctcataactacattcacggaccaaccaaagccatctccaagcctagaaaggatacatactacacgcagcgaaaatgccaaccactgatccagaattttcaagatggcacctttccccaaacttctataccattcattaaacatagactgcaaactgctagcctgtagaccaaattcaacctctaagtattatttgcttaggtgcctaagcatctttaaaaatttgatttagttggcaatacactgggaggtttcacataaatatctaggtttccagcttctctgaagaaatgagaaaatcccttcccacaatggcaaaaaccagctggagctaacagctgttagacagcatgctgctgcccgctactgccttacacccagccagcttcatgtgtgcatgttatctgcctgccattcacatcggttctccttgctcagcaaatgtcccacctcaacctcacactcaatacccttatacaggttccctaatcagagttcagtagggcacccacactatagctgggcaatccctggatgctgtgatatttgttaaccattatgttctttccaaccacgggaacctttccttaagagctcaagagcttcactgttggataaaaacagttcctgatcccggattctgacctttagttttccttttccagtcactgccccagtctgcctggccctgggctctgttccatattggcaatgagagcccacggcagggaaacttccagcaggcttttccacagtgcagccaaactatcagtaaatagactttgttctccattaaaagccctgtagcagctgagttgctttaccttatcccacctggctcttacgcagtctgttccaagtgagaagttagcagagtcctgtaaacaaagaacagttcaggggccaacctgcgctcccaggtgccaggatgctctcagggtcttcactgtgctcccaggtgccagggtgctcccatggtcttcactgtgctcccagacacttggcttcattgttctcattttgatcctcatttggcatctctaaacgcaggcggtgcagggaatgcacaaagaagcgaggaagtttgcagaccaagttgagttcctccttcccggaccccagggcaggcaggatcagctgccgggcgtgcaggtgaagggggatgtagcgggccttcgactgttctagccccagcttcttcagggtgcccacagacagcttctggggggccaacctattccagtctgagtacttgtgatcaccaaggattggacaatccaatccaaaagacaagtga

SEQ ID NO: 12215 - DNA, 450 bp, Homo sapiens
  misc_feature (1)...(450): n = a,t,c or g
tgcaacatgtaattaacaatattgttatctgtaccaacgataaaaccgtggtacggaatgctactgggagttaaattgctgtttaataggcacaaaacctttaaatgcaggaattctgaatcttgtggtctatttgagaaagctatgaaccatctctttagataaatttaaaagatagatatgtcagtctgatttggtttgtctgacagattgatggctctcaaacataacttgatccaggaataaagccttacaaatggggggcggctttcttttcgtctggccttatcacctgaattagtctcagttcaggggtctggttattttcannnnnnnnnnnnnnnnnnnnnnnnnnnnnnnnncattgtgtaccacagtgcccagctgagggatctgtgccttaagtgaggttagttttgcttccttcataccagtctcatcaaatgaaaa

SEQ ID NO: 12216 - DNA, 706 bp, Homo sapiens
ttttctagatccaaaagaactcaggcagagaccatgaaactaaagcggatccagaaggagttgcaggctttagatgacatggtgtcagctgacattggaattctcaggaaccggattgatcaggccagcttagactattcatacgctcggaagcgtttgacagggctgaagcagagtacattgcagcaaagctaggatatacagcgcaagactgagataaaagagcaacttcactgaacacctttgtacgatcatacagcaaaatgagctccgaaaggccaagaagttggaggagttgatgcaacaactagatgtagaagccgatgaagagactttggagcttgaggtggaggtcgagagattgctacacgaacaagaagtagaatcaaggagaccagtggttcgtttagagaggccatttcagcctgcggaggagagtgtgacattagaatttgctaaagagaacagaaagtgtcaagaacaagctgtttccccaaaggtagatgaccagtgtggaaattccagtagcatcccctttcttagtccaaactgcccaaatcaagaaggtaatgacatttcagctgctttggccacatgaagttctggtattcttttgagctaatatggtattgagtaaagtatactttttgcagtagatcatgccctgacctccaataaaaacctctttaaaacaaaaaaaaaaaaa

SEQ ID NO: 12217 - DNA, 1042 bp, Homo sapiens
  misc_feature (1)...(1042): n = a,t,c or g
aggaaagttaaaaaaaaaaatcagtaataggaaacatttcaaagcaatggaattcaaaaaactggtctcacagcttaaaaagggacacaactgggatttaaaaagggtctggtaattcaggttctgccaaccttttgagaaatgtggcccctgacggcccttgtagctgcttctgctcaggctcaagggcagcctcctgctgtaaggaatcaaagcttagataactgtccttactcaatttggtatttaaaagacgtcatcacattgtagtcctcttccaagtccagaacagtctcaacaatattatgatcatcaaaagcctgtttgaggctggccaggggtcagcatctgnggcnttctgagggctcttgtccatgagcagggcccaggcttcctctttgaagggtgaatcttggcaatgaccacacatgtggttcaattcgttttcaaattctatttttccagccaattcttcaatagttcggatgcttgtatggtcaatcatatcaagcagatcctttgtgacctcttggctagaattgttgagtggcatgtttgagtcagccttcaaatctctctccatatctttccttaaattatcttttctccagttttccccctctcctgcagttctccaagactctctttcaggtgccaaaatggaggaatgcatcaatacattttccttgcttggttagaggttttctctcggggcacagagcatgtggttttgcatttaccggggcatggtttgttgcaaaggcagggttctcattctcaggagcacatgggacagcagcaaaaggagcagcagaagagcaggctgccagaggatgtcttctgcagaggagcctgtgccacgggccagcgagaaggagagcggcgcggcgctcagttccagcctctgctggcctgtgcactcctgggaataactaactccttcaaaggcccggtcaatggctgcagtcagttcctttctgcatcttcttagtttttcagacatttctcctaaaagcgaccatgtctttatgtaatgcattgg

SEQ ID NO: 12218 - DNA, 325 bp, Homo sapiens
  misc_feature (1)...(325): n = a,t,c or g
cggacgcgtggggtgcactgggacagaaacgacacaaacttaattcctaatggaagtagcataactgtcaaccagactaacatgagagactatgtttctaagtatatcaattacattttcaacgactctgtaaaggcgggttatgaacaatttcggagaggattttataaaatgtgcgacgaagacattatcaaattattccaccccgaagaactgatggatgtgattgttgggaaatacagattatgattgggaaaacatttgaaaagtatgcacgttatgaaccagggntataaccagttcacatcccgcccctnggtgatgg

SEQ ID NO: 12219 - DNA, 1429 bp, Homo sapiens
gcccaacaatgatttgaaacaattgatgtcagaagagatctgatacccataaagcacttctgtttaaaagctccaaccaggctcatgcccagctttccagagtcccatgatttccatttaagaccatgtggatactttaggatacggccctgaccccacattgccacagaagagggggtaagagtagaaccaaacaagttagcagttttctccacacattgagtctcatctgaaatactactgaggtgcaaaatgtgtgaatctcagctaatgtgcacagaaatacaattttttttgagagacatttgcttaaacgtggtaaagaactcttgttttatggactccttgcttcatgttcattttgtctgtttttcttttggcttttgacaatagctcatcctttttgagtgtgagtttaattatggccatattaaaaagtccatcataaacaaagactcctcctcatggtatgaatatgctccatatgcccataatggtgcataacggacttagaaatcccaatgagtcttagggttgaaatttccaatgacctgagcaaggcagctccctatagcttctggataacattttacacccagagttcaggcttaaacagacctatcaacacaattatttccggattgtctgtctagaaaacggcaatgcctcaaaggaatataaataagggtggggggacatatgcttccagcctggtcctttctccatgtggtaaaaaaacaatggaatggctgtgttaattttttttttaatcttttctggcctttactatgtttggtaatggaaataagtcagggaaaacaaaatgaacaggtctcatcacttaattaatactggtttttcttctttatacttagtaatttcctagttttttaaatgataaacctattttgacaatcactaacatcaatacattttatcgtaagtcccatataagatatttaacattctccaactttcggctcagctggttacagcaccacatttccagtccaggagatgttttcacaaacagaaggagcgattcacagcattaataagcagacttggaaagacagattttattggctatggaggaagttgtatctttcttctcaatctaattttcagtccaattttggttttgagaatctatctctatcagaggggatcttaatttctgactactgagtacttccaatttataaaagagctgacttttaaaaaattctaacatctttcccaaactgtttagaaatatgccatatttgaaagacggaatactgtttgttcccaagaccaacacaagaaaaggaggtcctcatcttcactttcctgtactcttcctctgaggctaataactcaactgtacatagcttttggagtgggagcaagataagaatctctttaaaaagagcattttaaaaatgtc

SEQ ID NO: 12220 - DNA, 425 bp, Homo sapiens
gggacttgaccaactgcagctggacaatgacgtgcttcgacaacaggtggaagatcttaaaaacaagaatctgctgcttcgagctcagttgcggcaccacggattagaggtcgtcatcaagaatgacagcaactaactatggggattcaggggctttgggcccaagaactgcagatagcccaggagcaacagcctaatcccgtgcccctttccttcactgccccacttctggcatgggacagggggaagttcagaaggtgtgtccttgaactgaggccctgtgatatggcggcctgcagtggtgtgaaacacacaatgtggacgtgcactgacagccttgcccacccccaccatgcagcccctgggcccttgtgctcctctcgcacaatgcatgtgctgctccatgctggatactggacacacta

SEQ ID NO: 12221 - DNA, 512 bp, Homo sapiens
gaaaaaaagggcagcaaatgaccaagggcgccccttctggcccgtgcttggcttgagtaactgtctctctttccccacccccatcacagggctttcagtttggcaaaggaaaagcagataaaaacagaacattccatatgtttctttctccatcggccaaaaacattttgacacaatgtttgtgaaacacctttggagaggtgcacttctgaatgctgcctctgccgtaaatcctggggcaagggatcagcctcttcccaggaaccatcgccttctataaaccgtgaactcaagcaggcattttttttttcttaccgaaaggctgctattgtgcaagggcacataatgggtctgttgctcttattggcttccaaatgtgcatggcaaagagagagatgtgggcctagagcagatatattcagcaaggtgacagtttcccataacaattctaacacttcttatcttatgtgagaataaaatatttaagggttgaaccttaaaaaaaaaaaaaa

SEQ ID NO: 12222 - DNA, 688 bp, Homo sapiens
tcatcatgttaatagtgtatgtccgattctggtggctgtgaaataatgaatacagtcactggtaagggagaacctagaacccagtaggtgtatattttcaggaaactgagctcacagagatgtgtattagaatccaagtggaacttctgcctctaaagaccttgcaagaaaagagatgccctgaaaatgaaaggttgcacctcatttaatgaagcttaaccctatgtagaaagtctctttcgggggcagaggctttctctgggtgccaagccatatatattagggaatagtagattgttaatttcgttttttccctcccagtgcattttaaaaacagcactggctggggcattctcattctctgatggagccatcaatgagatttaacttagtcaacctgtgctagcaacattctgaaattccttcaaagaaggcagtcctttgggaaggtgtttttttttttttttttttttttgactctaatcaacattccttttgttggtgacatttgtgattttcagtaatctgagtttttgatggccttttaaacaagactccagtatgtgaaggttaattgctgtgctccacagatcttgtctattggcccctgtagaaagttaacctttgttgttttccttttataatttgcttattgcacaattgctttagggtaagtgaattagtatta

SEQ ID NO: 12223 - DNA, 876 bp, Homo sapiens
ttttttttttttttatgttttctttacaattacaatttattgaatgactaatgtacacattattaagtgaaattttacaagcaactagaacttatcacaaaactgctaaagaaacatccaaagcctgaattgtacaccaaatctctaggattaaatcttgattcccataatttaaaaaaacttgtgcaaattgcaatcactgagtgattatggaaaggcaaagtatatacagtaatgtgagagaaactcaaaccaagtaagggtaaaaatgaaatgattaacaccaccagaggaggaagctactatcaaaataaaaccatacttcctaataaaggtaaggccatcataaccccagaaaatgcttcatactttagataattaaaaacacattataaccaaaagcagatagtaacattgagtatgctgatttcaaaaagaagatgggtctagataccaggacagctctttttagtgccttccttaaaaagggcaaaactttttagagccatgtaattgtttatagccatggcctggcttcaggcatctcataagtgaggcttcagaaagtccttgaagagtatatggcagtgaaactgggctcccatctttaccataaagatgttcttcttgagaataagtgcatatagggagtgatcgcttatgacatcatttcaatgattctggaggccctataaaggggactggctcgaattagagcagttgctttcctatccatattccgccgaatttcaagccatgaggcacacacccgtttggcctccgaccagccggccgggtttaagggttcccccggataacttcccggggctcccaaagtgaaagctccttctggctggtaccggaaaaaaattgcgt

SEQ ID NO: 12224 - DNA, 962 bp, Homo sapiens
  misc_feature (1)...(962): n = a,t,c or g
gcaatgtacagcaacagagggtaccttttgggtttatagtatttacattctcttttagggtaggaggaggccaattttacctttaatttcacatgggttaggaattttaaaggcaaggttcattacccaaaggatagggtgtttggtaatgttgaaggagttagtctggcttcatgttttacatcttcaactaaaatcccatactatctgcttggatttggagagccaaaaaataaagctgattgtcatgtgattaaatatctgatcaacaggtatgaatataacttaaatcagcatatttttgccatggtaataaattgtcctataaactatttatatatttttgttcttcataattatcactaataagcatcagtttgttgtttttaaaaggatatttaagtgagcattttctagttcatatgaaaataaccatagtacaggatgatttctgtccacacaaaggttaaaattaggattgcacagttaattttcacttattatttatgggtactattatgtgggtgatgcctttttcttttaagcccagtacatatattatgcctgcctaagttctgaactggggctgtatttcagtagttgtagaattatttgatatttagttttgatagctaatgtttaattgtttggatctgcacagtttggtttttgcacaaaagtcatttaaaaaaatctgagtaattgtcaaatattaaaagaaagatattcttcctgtaaggaatacagtttttagtcaaagtgggccattacatcctctttttaatttacataatacagatacttgaggaaagttgttgtgggtgttgtatgccaaggaaaattctttttattgggtgccctatattgtaaccaattatttttaatggcattgtattttggaaggtaacgggtcnggttaaattttcncccgcngtgtaacnggaaacacattaccggttata

SEQ ID NO: 12225 - DNA, 727 bp, Homo sapiens
ttttttttttttttcagttttgatccatgtttaatgaaaaagaagttacatgaatagaaatggacatataacaaagagttcaatttgagaaaatgtggtgataggtagaacaaggagaaattgtttcaattctgaatttactcgcatattcctattagctgttactgatctaaaacatctccttaaatccaaaacaaaacaatagttacaagttcactgatgttttcatgggcactcacccaagtaatgtccaaacaatatttttccatgtcccccctcccccagaacacacacaggcaaaggcagagatgtttactgtgaggtcacatggcatgaagcaaatgcagccttatctgtttattattacaacagccagttagcattggcaaatgtgctttggttacaaacatggtttctgctaataatttcatgaagaagcttttaggatatgtgaccatttattcttagtataatcaatcattgaaggataaaaatcagagtataaaagtttatactctggcaaatataaatacatgcagagaagtttctgacagtttaaatttgagcatatttgaaatattaaaggcatgaaatttaaaaatacacatacgtgaaactacggtgaacatgttatgggtttgtcccatggtttaactctgctcagcccacgattcttagctgggtcagtcaatagtctatttttatcattttctaccctgttgtacag

SEQ ID NO: 12226 - DNA, 503 bp, Homo sapiens
ttttttttttttttctcatgcaagaacaagtttctattcccaaaccacccccatccccatcaatgctcagctctcttcctgcccccatgccttccctctgctcaacagagagctggaggcaggagggcgactcagtttgccagacatgctgctgcaggtccccagaccccagggaggctggcaagggacacaaacactttgatgttgccactcctcctcaaggaatgctcctgccctcccaacacccccaagaaacacctaggccgtggacggcacagagcaaactgcttcatgttctaggggcctatctggagcttctgtccagggcctctgactgcagccctcaacggacatcagtcgggtagcaggcgacccagctccgcctcatccagccggttggtggccatgatgtgctccagctgctgccggtagcgtgccaagtcctgcatgaagtggggcacccgggtattatccagcaccccatggggccgcaggtggtccac

SEQ ID NO: 12227 - DNA, 1447 bp, Homo sapiens
ttttttttttacattttggtgtgcattttatttttgactggaatcatatccatatgaagggaaattgtgaaagtatcctttactcttttgaaagcttggcctttgccttactgtgtcaaaggaaagcaaaactaagccagtaatgatggagatgtccctgtttccatatgcacactgacaggcgaggagctgcctaggaaatgctttttgattgatgaacagaggagggtctacacacattaaatacaaatggaaacacatcagcacacacaagtcattagcctggtcctctggcatccactggcatgcatctttccaaagtatcacttattcagtggtagcagcactatgtctcgttatgccttttatcagcaaatacctttttattccagaatggaaaacaaactaggaattaaatacatccaatattgatgctttatttccataagtcaccaataagagaatgaatttaattttaatacatttatttttgtgtgattcttaataaaacactttcaaaacattctgtacatttcaagccactcagaaccgcattacatttctacaaatgtgatttgttgggatgaggtgccaagatgtctctgtacaaagatgtacaatatgtacaatcactgtaagtgcaagctgtgcaaagcagagtctagaacactaattcatgccaaggcttacaaaaacatttcaacacataagactaaagcttgaaacagcgttgtggttttttccctgggcaaatgattattttataaacaagtatatgtatatgtcatacagaaagaagagtttgactcctcagctcagtcagtaccatgcagctgactggatacattacagggctgctctcctaggcctctttcttcaaggcgccattttgccacactcaacagttgtctcatcactgagtggctgccactgctgcctttggctgaaccacagcaacactaggagacttaaatttcgggagataaaggccaaatttgttttcgatgcctgcaaacgtggctgtggcgagtctgtatccaccgatgtgatcagggttggcaggaggaaggtctgcaatgcgtgacttaggtgttggttctgaaccagcgggtttgaggcctccaaaatcaatgtaaaaccaccgctgaagaagttcataagtgaccaaggtaacaccaaactggggagaggatcgaaacactcgagctgcagtccctttccaaaatgctgagggcccttcttcccggagaatcttcctgaaacagtcgatgacaccactgtatgtcgtctggccagcgcgggcagccacctgcagtcttgtcttgatgacatcagcaggggtcaccagagatgcagctgggacaccctgccatggctccagctgcaagaagatttaaacctcccacgtgtccattttcatcagccagaagtagtttgcaatgagcat

SEQ ID NO: 12228 - DNA, 447 bp, Homo sapiens
  misc_feature (1)...(447): n = a,t,c or g
gccaagtcctgaattgaaaactgtaggcttccttgcacagatgttgcagcccagccctcaggagtaaagtgcccgctgactgctggcgccacctctgtctcgctccctgtcagtgctgctggcacgtgggacgcggcaggtgacagccgtctctcagcatgttttagaagcttgcctcacagacttccatgcctctccattcagccgatgacttcagggtgtcaaactgttttaatttttcaaacaaatggaacagaagccattgtggttcatcctgattacttgaacgttgcacttggtggaccgtgcctggggagcgctcgcatgccccctggcttcagaagtcatgtcagtgtctctgtagacaaactccactgtacatcttggattaatcttctgattcattgntcattttctcaagactttttgtggaattctctgataaag

SEQ ID NO: 12229 - DNA, 1290 bp, Homo sapiens
gaggatgctggcgctgagaagtgatgactcggaacacaagtacagctccagcccactggagtgggtcaccctggacaccaatattgcctactggctgcaccccagggaccagcgctcagatccacctacttggaaacatagtgatctgggtttcgggcagcctcgctctggccatctacgccctgctgtccttgtggtacctgctccgacggcgaagaaatgtccatgacctccctcaggatgcctggctgcgctgggtgctggctggggcgctgtgtgccggtggctgggcagtgaactacctccccgttcttcctgatggagaagacattctccttttaccactacctgccggcactcaccttccaaatccttctgctccctgtggtcctgcagcacatcagcgaccacctgtgcaggtcccagctccagaggagcatcttcagcgccctggtggtggcctggtactcctccgcgtgccacgtgtccaacacgctgcgcccactcacctacggggacaagtcactctcgccacatgaactcaaggcccttcgctggaaagacagctgggacatcttgatccgaaaacactagaacaagagtgtggcaaagaacacccgtgctggggtcgggacgaggttgaagggtcttggtcaatgtacgtaatgagcagggtgggccccacgctgggaggacacgggctgggctgagcagggcctctagtggaacacatgggggtctcattgaaaagctctctgatgagcacctccttttgtgcaaagttaattttttctcgacaataaagatattccgtgtcttcacccctgaactaagacacagggagtatttcagaggccagcgtaggagtcatcgacaacgaaaagccgagaacccagggccagcagtggagcctcagcagaccagggcctggtccttgctaattgctgcagggtggagtttgatctggcagacccgatcctccttcatgaacacccagcaacctgagcaagtcccagccctgccctcagcgagcccggcaggcgtcctgggacagctcagtgttggagggccacctgaaccacgagccagggctggggcttgcatgtcattgtctatgacagcgtcaagactgcccttggcaccgtgctgtgtggaaaccctcccctctgagactccactgagacgtggctgagtgaaatcttcctcgtcagtggtcaaggtgtgtcatccatacagctccatgcctttgtcttttttaaatgtaattaaaaaaggaaccaactggcaaaa

SEQ ID NO: 12230 - DNA, 444 bp, Homo sapiens
gtcttcaaacgcccttgtgttcagaatttgccacagttcagtgtatatatggcctagcagtgacataaacaccattcctggagaactgactgatgcttctgcttgtaagaacatactgcgctttattcaatttgagccagaagaagatataaaaagaaaattcatgagaaagaaggacaaaaagttatcagacatgcatcaaatagtaaatatagatcttatgctggaaatgtcaacctccctggcagctgtaacgcccatcattgaaagggaaagcggaggacaccattatgttaatatgactttacctgtcgatgcagttatatctgttgctccagaagaaacatgggggaaaagttcgtaaactcctggttgatgcaattcataatcaactaactgacatggaaaaatgtattttgaaatatatgaaaggaacatctattg

SEQ ID NO: 12231 - DNA, 1026 bp, Homo sapiens
ttttttttttttttttaattgaattcatgtttaataattacaggcaccgtgcccccccttccccctgcccaggcaacagcaggggtggtacaggggctggggcatatgcccccagcagcgaggacggcagtcccgagagtgattttcagaaaataaaaaaaaggaccccaggggcaggcgttggtgcccctccccaccccaagacacaccaaatttcaaaattttcaagactttatatataatatatctctgtgccccagggggaggagagggacacctggcggcatcctggaggggggcccaggcagccccaagccatcctgcctcttcagccactttattagttcagacacatcacactacaggcacccacttgccaccgccgctgctgccgcccccctgcagtccaggcggctagccggagccatctgtgtgtccatggggctccaggtccccggccccaccagccctcagttgtggtcagactcctcctctgcttcacggagccacttgaagaaggctgtgacagatttaagggccacacccttgccctgctgctcagcggggtccttgctactctcccaactgtagaaggcatcctccttcaccacgtcctcgtcatacagtgcgtcaaagaacatccgcagcaggttgggagctgttctaaggtcactacaagggcctggaggcgtagagcgcctgtagctccttctgctcgtcacacaggtatttctgcagcagcttcgctcggcgctttcagcactgcaacgtccactcggaggggagtctcaaaaataattgcagaatagcagacagccgtcatgagggctcgaactaacgtgttggatactatctgctgctcactcaggttggcctctatccagtcgaacacccgctggttactgctgccctccttcagcagcttctccagctgcctgttcagctcctcggaggggagttgccctctggccaggggtttccgactcctctcccagggtatactccaccttctgttcagcgacgaat

SEQ ID NO: 12232 - DNA, 143 bp, Homo sapiens
  misc_feature (1)...(143): n = a,t,c or g
cggacgcgtgggtccagctgctcctgggacctgggtatttgagaggtttttcccttgggaggggcaaacaaagtggcagtgggggaccaggggtgttcccttgncttgaggaaattgggaagagctntttttttccccntgtt

SEQ ID NO: 12233 - DNA, 726 bp, Homo sapiens
tttttttttttttttttcactatgtacaaaaacattttaattgaaatacctgtataaaaaaatatgatctccagacatctcacttttgaactgaaagaacccccatctgcgatgcctgcacacaccgcattcacacaaacacaggtactgaataaattaaacgctcaggctctggccccaccccagctttcagagcccacaagcagactgtacaaagtcaataatttaaaacccaaaccctgggcacagtgcctggaagtgtcagggtcacccactccccttaagttagccactatacatgttcatcttctgacaggcggggccaggacagacgccaggcacaggaatcagggcctggggtccctggaccacagccaccccctcccctgcctccccactgtcccctggggcttgggagaggcagactgctcagaggaaataacctcaacaaataaattaaacaataaatagccccggtgggccgagggcacctccagggggtcacaccataaataacagagttggcggcgggtacggctcgcgtgggcgggcgggcgcggaggccaggacttgcattgtgtgtgcaggacgtgcccagacgcacagccgcaggactgagggcgggaggtgggcttgggaccctgcgccggcggaaagagctccgggtgggcaggcagatgggaaggccgcctccggacacagcagcacagaggggcgtcctcgtgc

SEQ ID NO: 12234 - DNA, 499 bp, Homo sapiens
cgtaattctaagaatgtattagtgagatggagggggcataatctgactactgtcaaagcttttcagactttatacaaaggaagagattaaccatgtctgattaggtatccaaagatcattgctctctgtcttctctcaattttagacctagtggcaataactacaaaattcctgaattacaactggtgttaccaaaacatcctaccataataacttttgtttttttgaaggtgccaaatcaatcattcaggagtttccagagatcacaattttaactactgaagttcatcctgttgcacctacacattttggacagaaatactttggaacagactaagttatttaagtaaaataattgtcttatgtaatattacaatcatgttttgattttctatttgttttactgattcacttgagggtggcagagaaaaatgtgttaaaatgctttttagttttggaagtgggtatatttgaggttatatctcatttagttatttgt

SEQ ID NO: 12235 - DNA, 662 bp, Homo sapiens
tgatgcagtcagaatgctcctgagagtccataactgtttgagaatttgctgatgttatcctgacagaagtttcagcagattttgcaaacaagtatcagagaataagtctttgattgataatttttctatttatttctgccaaggcgactgaaaacacgaaagccttttcatcagacaggttagcatagatgtcaatttccttttcctgtttctctctttcttcctcatgttttttggcagatgcacttttaggtcttcctcttcctcgtctgatatgatctgaatggctgttacttcgagacctctttctgttttctaaatctttatttactgtagaatttatcttctctctcctaactctctctgttcgcctcctcttggcctcatgcttgttttctgtagaaggtggtgatttctctgagtgttttgcatttaaaagttttctgctaataaatatgtaaccacaaggacatgatttacatgcaacaggaacctgttggtcgcactcggggcatgatttggtggccatcttcactttcttggctcgagttgcagacatgctcctctcccttagcggcggcagcagcgacggctcgggtcctcccctcacacttcggcacgcccgcctccgcccgcccagtccccgcgggcccctcgtgccg

SEQ ID NO: 12236 - DNA, 657 bp, Homo sapiens
  misc_feature (1)...(657): n = a,t,c or g
ttttatttgtgttataagatgtgtacaccttcatggtttattgtggtttnccttaagttttatccttattaggatgaagttcatgcatttctacactactcttaactaaggctcaagagacaataaaaacatagaagtaattttttaataaaaggaaataaaataatcaagtactctgagtattttcctccattctcttatccagaattttaaggcctctgaaaaataatgaaataataaaaatagtggttttgagatctaaatttattaatattttggattccttttctcagccaaaagctactatctgaattaagcttttcagtttaaaagcctggaagaccatccttagaagacattaaaaaattacttctgatacacacactcctaataatttagatagatatgaaaacaatctcaaataaagatcaaaaaataaagtccctgtaaaaataactttggttgctcccacccacacgtcatatgatgatttaaactgcaatcatgaattttgaaaaaatagacgtatcttatctataaaaacactaccatacaaacttgaaactaaaatgttatctgaagtgacacagatgttctaaatctcaaggatactgaaaaatacattttttattcgtaaaataaaatcggacgcgtggg

SEQ ID NO: 12237 - DNA, 4666 bp, Homo sapiens
gttggaaacggcactgctgagtgaggttgaggggtgtctcggtatgtgcgccttggatctggtgtaggcgaggtcacgcctctcttcagacagcccgagccttcccggcctggcgcgtttagttcggaactgcgggacgccggtgggctagggcaaggtgtgtgccctcttcctgattctggagaaaaatgccggtccggaagcaagatacccagagagcattgcaccttttggaggaatatcgttcaaaactaagccaaactgaagacagacagctcagaagttccatagaacgggttattaacatatttcagagcaacctctttcaggctttaatagatattcaagaattttatgaagtgaccttactggataatccaaaatgtatagatcgttcaaagccgtctgaaccaattcaacctgtgaatacttgggagatttccagccttccaaggctctactgtgacttcagagacactgccaaggcagccttagccctagtgtagagaaatacaggtatcaggatgaagatacacctcctcaagagcatatttccccacaaatcacaaatgaagtgataggtccagaattggttcatgtctcagagaagaacttatcagagattgagaatgtccatggatttgtttctcattctcatatttcaccaataaagccaacagaagctgttcttccctctcctcccactgtccctgtgatccctgtcctgccagtccctgctgagaatactgtcatcctacccaccataccacaggcaaatcctcccccagtactgggtcaacacagatagcttggaaacaccaacttacgttaatggcacagatgcagattatgaatatgaagaaatcacacttgaaaggggaaattcagggcttggtttcagcattgccaggaggtacggacaacccacacattggagatgactccaagtattttcattaccaaaattatcacagggggagcagccgcccaagatggaagattgcgggtcaatgactgtatattacaagtaaatgaagtagatgttcgtgatgtaacacatagcaaagcagttgaagcgttgaaagaagcagggtctattgtacgcttgtatgtaaaaagaaggaaaccagtgtcagaaaaaataatggaaataaagctcattaaaggtcctaaaggtcttgggtttagcattgctggaggtgttggaaatcagcatattcctggggataatagcatctatgtaaccaaaataattgaaggaggtgcagcacataaggatggcaaacttcagattggagataaacttttagcagtgaataacgtatgtttagaagaagttactcatgaagaagcagtaactgccttaaagaacacatctgattttgtttatttgaaagtggcaaaacccacaagtatgtatatgaatgatggctatgcaccacctgatatcaccaactcttcttctcagcctgttgataaccatgttagcccatcttccttcttgggccagacaccagcatctccagccagatactccccagtttctaaagcagtacttggagatgatgaaattacaagggaacctagaaaagttgttcttcatcgtggctcaacgggccttggtttcaacattgtaggaggagaagatggagaaggaatatttatttcctttatcttagccggaggacctgctgatctaagtggagagctcagaaaaggagatcgtattatatcggtaaacagtgttgacctcagagctgctagtcatgagcaggcagcagctgcattgaaaaatgctggccaggctgtcacaattgttgcacaatatcgacctgaagaatacagtcgttttgaagctaaaatacatgatttacgggagcagatgatgaatagtagtattagttcagggtcaggttctcttcgaactagccagaagcgatccctctatgtcagagccctttttgattatgacaagactaaagacagtgggcttcccagtcagggactgaacttcaaatttggagatatcctccatgttattaatgcttctgatgatgaatggtggcaagccaggcaggttacaccagatggtgagagcgatgaggtcggagtgattcccagtaaacgcagagttgagaagaaagaacgagcccgattaaaaacagtgaaattcaattctaaaacgagagataaagggcagtcattcaatgacaagcgtaaaaagaacctcttttcccgaaaattccccttctacaagaacaaggaccagagtgagcaggaaacaagtgatgctgaccagcatgtaacttctaatgccagcgatagtgaaagtagttaccgtggtcaagaagaatacgtcttatcttatgaaccagtgaatcaacaagaagttaattatactcgaccagtgatcatattgggacctatgaaagacaggataaatgatgacttgatctcagaatttcctgacaaatttggatcctgtgttcctcatacaactagaccaaaacgagattatgaggtagatggaagagattatcattttgtgacttcaagagagcagatggaaaaagatatccaggaacataaattcattgaagctggccagtataacaatcatctatatggaacaagtgttcagtctgtacgagaagtagcaggaaagggcaaacactgtatccttgatgtgtctggaaatgccataaagagattacagattgcacagctttaccctatctccatttttattaaacccaaatccatggaaaatatcatggaaatgaataagcgtctaacagaagaacaagccagaaaaacatttgagagagccatgaaactggaacaggagtttactgaacatttcacagctattgtacagggggatacgctggaagacatttacaaccaagtgaaacagatcatagaagaacaatctggttcttacatctgggttccggcaaaagaaaagctatgaaaactcatgtttctctgtttctcttttccacaattccattttctttggcatctctttgccctttcctctggagtctttcttgagtactgatttcatgttgaattgtatcccacacatcatggtctgcagcttctttttcacatgtagtgtctccttcaagttacatcgtgtgtattatttaatgtcactattggttagtggccatttttcagaactgaagatggaatggcctgaccagctattaagaatgtggggagacgcagaaattgtggtaaaattccttaatgtttaagggaaagtaactttaagagatttttggaaaagctttatatacattcttttcaaatttcagtacaaatgaaaaagtggttttaatcagtgatttagtagactttgagcaactgtgcacgcttcagtttaatagcatggtttggccagtgtattactctcaagtccttttctcaatcaacttctatcatcaaagcaattgtttcattatagataaataaggacattttttaatttaaaaattcatgtctgagttgactttcataagggatttcattttttcctcaacattcttaaagccttttagtatttgacggttcttttttcccaggacatttgctaggaataacaacgtttcaatgtttttaatctacttgagcaacactatcgtgtcttacaaaagttgttcatatgtaaatgatcatcacatttcgtgaattgaggccatgttcaggtgctaaggaagttcgccttttacacagaagattgagaaaatttcctagatataaatacagataaatcagacgttacagtggtgacgtagtaaccatcatggcaatggaaaggagtccaattcatagcctaaaacttcaaatgtattcttaggagtcagattttactgaatattttacccacaatagctgcctattttgttataataaaatatatataaatatatatataaaactttctttaaactgtaactatgggaattattttctttacatagttgcgcacacacacaaacatatatatatatttaaaatatattttgtttcttttgccacctactcctaactttttgtttggtttttaaattaaatattaattgaatagacttatcttaatcatgtgaactgaaaatgggggcatggtggtcatgaggaggaaacatttagggaaattagattataagtaaaagtgtgggcatattctcctcttttctacaaaggttttcaaatggttcctgaggttttttgttgttgtccgtgttgttactgttgttcttgtcatcaggtttgattttggtccttgccctttccttctagttctccttttattaataggaaggcaggcaaaagccccatttatgtgtgtgttttcccctcagacagctttcatccactgctctgcactagaattgcacaaatcttcatggtgagcaattttaagaaatgttagtgaaaggtagaaattatttcacaaatcagtttctctggtccttcatattaataataatatttggcttcccattgctctttggagttgtttattaaatatgtgtttttgacaacctcctcattagtttcttaaatgagtactggtttgtaaagaattatcaacattatccattccatttatgaagaagaggagaacagctaataaactgtattgtaaaatcca

SEQ ID NO: 12238 - DNA, 804 bp, Homo sapiens
gcggccgcagcgcatggtgggccatgctcttggagcactacggcctggcgggcagccctcgccgctgccgcgccccgccccccaggaggccgcaccctgcgccagggcccggagacagcaacatcttctggggcctgcagatatccgacattcacctgagcaggtttcgagatccaggcagagcggtagacttagagaaattctgttctgaaactattgacatcattcaaccagctctcgtcctagcaacaggagacctgacagatgccaaaacaaaggaacagttgggatccaggcagcatgaggtagaatggcaaacctaccagggtattctgaagaagacaagagtcatggaaaaaaccaagtggctggatatcaaaggaaatcatgaaaaagatggaggagctcttattactggccaaggaaagcagtcggagcaaccatacaatttggtttggacactttacaacatccactattctttctccatcaccaggaatccggtcaataatgagttcggctatagcttatttgtgtggacatctccatacacttggtggactgatgcctgttttgcacactcgtcacttccagggcactttggaacttgaggtgggagactggaaggataataggaggtaccggatttttgcttttgatcacgacctctttagctttgcagatttgatctttgggaagtggcctgtggttcttatcaccaatcctaaatcactcctttatagttgtggtgaacatgaaccactagaaagacttcttcactcaacccacattagattggtaaca

SEQ ID NO: 12239 - DNA, 466 bp, Homo sapiens
caaccctccagggttgtggtttgtatttttgcctttaagcattatctcctttccaccaagaagcctacttaggtttaacacatgaaagcagtgtctaaaaattagatcggtcctaaattggaatgggatgtcttccttgcatgtcccataccagggaatttttttaacacacagtgtagagcctttgccagagatgttgaaagggagattaaaggcttgagggatgaatttgatcatcattcttaaagtcccttccaatcctgtgattctctgattccctgagtctcgtttattattggacatgcctagcccatcaccagtgacgtgcccgcatattgctggcttcccttggataacggaggagcctatcaccacatgcctttggttgtcttcccatcataatcaagtgagttgctttcctgggactttttcccacctaggagccctggctagggtttgggttttt

SEQ ID NO: 12240 - DNA, 300 bp, Homo sapiens
ctttactgaggctactgaggcacagcagccccgtctagaggcctccccgagaggcacttcctgaggagtctggtggattttaagctgctttttaaacaaccttctccttagcatagacactgacactgaagggaaagaaagcaaatggtctgttcttagtgggaaggcaacttgctttcagggggaacgagtttggggaaagaggactggtagaagacacgactaagaaagtgagtaggagtccagacgtgtgtgattcatcctttaggcctctgtgtgtgatgggttgacttgtgtctc

SEQ ID NO: 12241 - DNA, 445 bp, Homo sapiens
ctttaataaaaaatgttttcagaaatagataagtgaaagctgagtgtttctttgataggttcccctgtactataggagtgataattgcagctattgcaatagtagtaattgttaaatggatactaatgaatagcatagcatagtgggtaagagtttatatagcacaggctctagaatcagattaagtaggttcaaataccagttctgccagtaactggttttagaaccttgggcaagttaaagaatgtctcccagcctcagtttccctatttgtaaaatggaaataatggtagctacctcaaacctcattacgaattcaatgagttaaacttgaaaagacttattacagtagctggcacataaagacttgatagtagtttatatggatgctatctcatattagcatatatggaattaatagtgtatcactatactttttttttct

SEQ ID NO: 12242 - DNA, 1465 bp, Homo sapiens
gaattcctccagagtcccaggggttgttgaaagtggaagatgtggccctgaccctcacccctgaatggacacagcaggattcatctcaggggaatctctgtagagatgaaaagcaggagaaccatggcagcctggtctccctgggtgatgaaaaacagactaagagcagggacttgcctccagctgaggagcttccagaaaaggagcatgggaagatatcgtgccacctgagagaagacattgcccagattcctacatgtgcagaagctggtgaacaggagggcaggctacaaagaaagcagaaaaatgccacaggagggaggcggcacatctgccatgaatgtggaaagagttttgctcaaagctcaggcctgagtaaacacaggagaatccacactggtgagaaaccctacgaatgtgaagagtgtgcaaagcctttcattgggagctctgcccttgtcattcatcagagagtccacactggtgagaagccatatgagtgtgaagaatgtggtaaggccttcagtcatagctcagaccttatcaagcatcagagaacccacactggggagaagccctatgagtgtgatgactgtgggaagaccttcagccagagctgcagcctccttgaacatcacagaatccacactggggagaagccgtatcagtgcagtatgtgtggcaaagcctttagggacagttcacatctcctgagacatcagaggatccatactggggataaaaatgttcaggaacctgagacagggagaggctggaaagtaggatggaaagccagttggaaaatgttgaaactcccatgtccttataaatgtaatgagtgtgaaagaagtttcactcagaatacaggcctcattgaacatcaaaaaatccacactggtgagaaaccctatcagtgtaatgcgtgtggaaaaggcttcacccgaatttcataccttgttcaacatcagagaagccatgtagggaaaaacatcctatcacagtgacccatgccatacatgccagagttggtgctcatttgtcactgatctgaagccactccccctggagtctcaactatagaaattgtggggtgggctttatttaccactacacattatcaggtgttagaaaatgtagactgggttagacaaattatcttctaagttctagaaggggtttgtaatcaaaacatatttagtaggaggctacgggagagttgtctagaagaggaagacctgaaactgtttgttctctcccactagaattaaatggatgtttagactggctacttgccctaaaccagcacttggtgatgtctactgggttgatggttgtgatttgggggctgcttctctgagcattctttttgactgtaatgaatcctccagagttggtcagattcataaagtcttatatccccctctgtgccttttctgcaggtgctaataaatgtttattgaatgta

SEQ ID NO: 12243 - DNA, 1618 bp, Homo sapiens
ctcgccagcctgggctccgcgcacccaccgatctgggcgcccacaagcggccggcatccgtgtcgagcagcgctgccgtggagcacgagcagcgtgaggcggcacaaggagaaacaaccgccgccgcctgcgcaccggggcccggccgacagcctgtccaccgctgccggggccgccgagctgagcgcggaaggtgcgggcaagagccgcgggtctggagagcaggactgggtcaacaggcccaagaccgtgcgcgacacgctgctgggcgctgcaccagcacggccactcggggcccttcgagagcaagtttaagaaggagccggccctgactgcaggcaggttgttgggtttcgaggccaacggggccaacgggtctaaagcagttgcaagaacagcaaggaaaaggaagccctctccagaaccagaaggtgaagtcgggccccctaagatcaacggagaggcccagccgtggctgtccacatccacagaggggctcaagatccccatgactcctacatcctcttttgtgtctccgccaccacccactgcctcacctcattccaaccggaccacaccgcctgaagcggcccagaatgggccagtcccccatgggcagccctgatcttagtagcagacaatgcagggggcagtcatgcctcaaaagatgccaaccaggttcactccactaccaggaggaatagcaacagtccgccctctccgtcctctatgaaccaaagaaggctgggccccagagaggtggggggccagggagcaggcaacacaggaggactggagccagtgcaccctgccagcctcccggactcctctctggcaaccagtgccccgctgtgctgcaccctctgccacgagcggctggaggacacccattttgtgcagtgcccgtccgtcccttcgcacaagttctgcttcccttgctccagacaaagcatcaaacagcagggagctagtggagaggtctattgtcccagtggggaaaaatgccctcttgtgggctccaatgtcccctgggcctttatgcaaggggaaattgcaaccatccttgctggagatgtgaaagtgaaaaaagagagagactcgtgacttttccggtttcagaaaaacccaatgattacccttaattaaaactgcttgaattgtatatatatctccatatatatatatatccaagacaagggaaatgtagacttcataaacatggctgtataattttgattttttttgaatacattgtgtttctatattttttttgacgacaaaaggtatgtacttataaagacatttttttcttttgttaacgttattagcatatctttgtgctttattatcctggtgacagttaccgttctatgtaggctgtgacttgctgctgcttttttagagcacttggcaaatcagaaatgcttctagctgtatttgtatgcacttattttaaaaagaaaaaaatgtctttataagtacataccttttgttaaccgttattagcatatctttgtgctttattatcctggtgacagttaccgttctatgtaggctgtgacttgcgctgcttttttagagcacttgggcaaatcagaaatgcttctagctgtatttg

SEQ ID NO: 12244 - DNA, 451 bp, Homo sapiens
  misc_feature (1)...(451): n = a,t,c or g
gccgggtctgcaagctaggtgccagcggggaaagtttccctgcttcttatcgtctgctttaacgccttaaatagcccgctgaaggctgcagcaggtgctaggtagcagcctcccggccctcgggaaaggcggggtggggaggcgagagcagcttagcctcctcgacctcccttcctggtgacggacgaacagttcccgtagaatttcgcttcaccgagtgaccttgagcccagggcgacggtcagcttgttaattcctggctgcaggaactttgtgagaattttaatgcatggaaaagctgtccatgttccaactgctgtacatccaaaagtctcagtgtaatagcaggaccaaaatattctgtcaatcagctgaccatatacttaatgactcctaaaatctcgtggacttctaagaaagcgccatggcctgtgctgctgtatgantcccc

SEQ ID NO: 12245 - DNA, 1320 bp, Homo sapiens
aaatctgtcacaaggcaaaattttattttttcaagttacaaaaataggagcatgtcaaaaatacagtctagtccttatacgagtagttccagccatttaaaagttatacagagtttggaaaaagcagtttatatacaagtcttaaaacacaacaatcatgaacaatgcacaccgttcaatgtagttattgctagttatatgcagcttttagttaccattgttcttctctgtaagggaaaggacagcatttggacattctgattgttgctgctgaagctgtggttttggaaaatcaatccaaaataagaataagctcactatgagtagaataaaacgtgtaagtttcaatcagtactacaagaaagcatggtttaaatttgagttccatacaattctacataactctattttgttactataacagaaatacagtgtatagttttgggcaagagtaaatgaattactggttttataattaagtgaaaagaaacagtttttggttgcaatgtagaaacaaagctggcatatctagcttacaaacattaaaaaatggaaaagatatttaatgtttaagcaaaagctgaacctaggttatttacctttagaaattaagagataaagttaagcattttgttcttttgaggattatcatgaagatttgctattctctattttctttttaaaaagaagagttatcccacatagcgggaacatattttgaaacagatctatttgctcaatgtcatatggaagaacaaatcacaaaattaaataattctacctttaaataattaaagataatgcagttgacagtacaaagcactgggaaaaaatcacttatttgggggatgtgtgatacataagaaactttgggcctaaagttcacatggaagactggaagacttaaaatttaagggtgtcaccaaaagataacaatggctttgactccaactctcatgttagaccctgttaaaaggttaggtttattgctgttattttaccccagtaagttattgaataaatggagatatacattggtgataagtatgaggtgaagtaaaaagatctaaaaatattagtcttagaacaaaaatgacactcatgatcacttggcaaggatacttatttacttagtgatttaaatcctaaaaataagctacatttttaggaggtagaaaacaagtaccaatagtttaccatttggccaccctccttacttttggcttcagccttggatttctatttctcattccctattctcctgttaaagctattagttctactaccattcattacctaaatgtatagacctggagctgc

SEQ ID NO: 12246 - DNA, 871 bp, Homo sapiens
ttctgttttttctggtggcagggggtggcgttttaaacttgggggcttggaggggctgaggtcaaagggcagcgggtctttcactggctagaaagggaatagaaaggctgaaggaaaaccatatctggataaagtttaagttcactgagcatgacctaagactactgggagaaagttaatttccagcactcattttaccaaacctatgtaaccctgatcagggatccctgagttagctccagagctggaacagacagggcaaagggactgagcctccaaccctgagcagtggccaggcactcgacatgacaagctggaagagcctgaagaacgagctctcagaggagaaagaagggaaagagcctccacgactcctccagacgctcagtccagggccgccagggtcagccaccctccccgctgtctctatctgtggccctgccaccagtcactcaacccgactttttggtctagagtaagagcagcagctgtaccccaatggcacagcaaagcaaatccccctacaggcaccatgcaaggccagcacaggcagctcagtgaaggcaacagactccagtgcaggtccacaagggcccccctgcgggagcgcctgtctgcaggatgcggggcagagggaactgaattggaagccaaaggaagagggcagctgggagcaggagcccctagcccttttcagaatagggcaaaggtactcagaacttctgactctgaggaagaggtacaagacctcctttcactgcagaagtatcccaggacttaagccatgggaagaattcacaaccttgaagtcagaagtgaaataaactgtgtggtgtccaatgaaggaggatgcctccagagcagaaggaaa

SEQ ID NO: 12247 - DNA, 370 bp, Homo sapiens
  misc_feature (1)...(370): n = a,t,c or g
aaacgttgatagagagcttgtcagattgtgcttcctccttacctataaaaaagattgctggtagtaattataacacttttttggactctgaactcagtatgttaaatgggacaaaagttctttcagacagtgccgtgggcattgacctgggtagtactggtgatacaacagaagcattgcacgaactaagaactgccgaagagttcaaaacagaagagcaagatgcctcagggagtatagaatttggtgtatcttttcctgatagggaatcatcatctatggaaacatccatcgacccaaaagccactgaacttttccccccgaggggattactgcnttgagganacttggagtctatggttaacnatga

SEQ ID NO: 12248 - DNA, 694 bp, Homo sapiens
cttggtttaaataatccatttgtattgggtcttagtaagaatactactactagtaactattatcaagcaactactgtgtcatgtacttttcacacattcttttaattaaaaactctccactaacccttacagttcagtattatccttgttttacagatgaagaaaagccaaagagaagttatataactggcaagtttctctggctccccgcctgcaccactgctcaccagattgcatgaagagggaggcagctgtaacacctcatcccgttgatctccagggaactcagatacttgtttccacgtccaggaaaccgcaaactaagctctttgaagcatcagcaaaccttgctaagtgacacgtgaatgccatttggatacatattctaatctttcaagtagaaaggacagtcagactgcctcatctgtaacatccaagggatctgagaacagacattcagtccaggtgttgaacatcaacatcattataggaaaatggtcaaagagaacaatggcacacgttaagagaacatattaatagggcaagatgtatagtaaactaagttttcaagaagtattttatcatttttatgctctctactaaaagctgaccaccgcagagtggatacacattgctacatacagcaactctacagtggacagcttttagtagtaagcacaaaaatggctttatg

SEQ ID NO: 12249 - DNA, 489 bp, Homo sapiens
aagaatccttgaaaaccatgttgagaaccaggcttcttaaagacccctggagagcccacttgaaggaattttaaatagatgaagaaatgcgtaaaccaaatttgccatgttagaaatttcatccatgatagttcatggaaaagacgatgaaaggccagtagttgtaaggatgaagaggagggagtgcccaaaatgtttaggcattaagttagcaggacccgattattgatcagttggggaatgggtaggaacagtgatcttaggttcctggcatgggtgataaggtagattgtggtaccacccagttgaggttgtgaatccaggaggaaggggcgggatttcagttttagacatggtgaattgagattcctgtaggttatccagatagggattctaaatggctacttggtgtgaaatgtggagaatggacctgggttagagacccagactcattgagtggaatgagaatgacagcattttacagggcac

SEQ ID NO: 12250 - DNA, 809 bp, Homo sapiens
tttcataggtaaaatttttatttatgaatgtgtggacacatgactttggatccagccagccagtgacataaataaacttgagcaaaagtttcaagctagaggatatatatgtatagaaaattatatatttgtgtgtgtgtgtaaggcctcttggaacagtgccacaaacctggacaccaaccaacagaatactcccgtcctttgaaatttccattaagagcacaatgggggtaattataccaggatgctccaatcgctctttccatcttgtgcactcacatgcccgccaaacatgaaatgttcgccttctcccttccaatgtgatggttgttgaacttatctttagtgtcatttgataagcctttgtgctcacagagagacatcccactgacccagccactggtcattgtctataccagttcacatcaaagcaggcgcactttgtcaggtttccactcgaatatccatttcgcatctgaagtacagtatcgaaagtgactagatcatttgagcttttttcttcagctgctgccttcctcccccacggtgtttctgctcacgctaacataatttggcatcgtcgacgtgacacgatggtggtttttctaaaaaattataatacatacatcgtcaatgttttgtgatagcgaccctccagaagatttaatttgtaaattgaagaaaggtggtctttttcctctactgaatcataaccaaggtagagtgcccctcaaaatccaagtaatgcgcatacagtaataggtcattcaatgtcaaaaggcataaaaaagatgagcaaaatcttcaca

SEQ ID NO: 12251 - DNA, 336 bp, Homo sapiens
  misc_feature (1)...(336): n = a,t,c or g
atcatggccagtcaataattatataaaggagttcaaatactatagctgtcagttgatgaatttgttatgtagtaaaatgtatgactttgtatgggtttctncagccctttttctgccactagcaaccagaatagcactttaccttttggttggctagataagtggctgactacctgtttttctcactgtggtgtgattggctaaacaatctcgcattaaaaattcaaatgtaaattgaattcacatgaaaaatcatgtttggttgtaaacctccaatgttttgattctctaatcatgttttcgtcacatgctgagtaaaagtgccttacaatgtaa

SEQ ID NO: 12252 - DNA, 410 bp, Homo sapiens
tgtttttcaggttaattacccaaagcctcatccatcctcaaggtttttaaattttatttttttaaaataaattgtgcattgtatttgtgaatttttaaaatattactgttttatttaaatgccatgctgagcaattgttctctgtacatggtaaccaaaacttagagatttcgatcaattttgatcaatgtttagtaaaccaaaacatgtactgtgtacaacggaaataatatggcatattagccaggcatgatggttgcccaagacagttaaattaagctcaattctgtattttattagggctctgttatgtccttcatctgaaatgtacacatttttggtgtatgcttggtactggagattcatatatgcaaatattctcatgcaagaagttccacagtaacaacagc

SEQ ID NO: 12253 - DNA, 1298 bp, Homo sapiens
  misc_feature (1)...(1298): n = a,t,c or g
ggaaaggaacaagtgactctgatgtttacaaagcacctatgaaaccctgtacacacctagttcataatcctcataatttatcaacaaacacgaaaaagtgtcttacttgagagtgagtgtgtgtgtgtgcgtgtgcacgtgcacacattgtgcantnttggtatgtatggaaataaacttataaatggggacgtattggagaaggaaatacatagacctacaactttgagcaaatagcagtgatgttttaggaactgaaatgtcacacttaaagtcttcagcccagctacttccctatttttgtggggagaagagggcctgattagaactgttctggttgtgtttggcgggaggggaataatttttgttcagtccttcttagtgaccaaactttaatttttaagaataatatattgacttactgaactgaagcattctgagttgaaaggagctccagagggtggagttctgtgttgctcacatgttaaaatcttgctcaccttcagagcagagggaatacctatcttcagatatccgtccattttcatctcttaattgtagtcaaaagtatgacttgagagtgttgctctggtattctgggttctgaagtctggtattctggtattctgggttcaaaagtatgacttgagagtgttgctctggtattctgagagttgctctgtattctgggttctgaagattatttgaaaaataactcctactacattgaaatgcagacttaaaaatttaaacattggattaggcagtcaaaaaaaccaagcaagcataaaaggtcaataagttgtaatcttgatagtaaaggtggaaaacttattataaatggaaagaaagttttatttccttttttgtttgatgggcagtatgcattatttatacccaaagttcttttaaaaaatatttccatcaaccatttttatttaaaataaacatttgagggaagttaccaaggcagcttttttcctcaaaagtaacctgttcctctttggaatagcacattttaggggcatggttaatacctgagatttttactcagtaaatcctgatggttactgtgtgtaaaatatctttaagtaggattgaaggcctctgtggggggaataaaatattaccaaagtctataaaaaataaattttacatgttctcttttatggacagagagcagcactgggttctgttattttttaaaatggaattaattggatttcntggatagggtgttttaatatttcttcccctcaccggccngattcttagggtaggggaaccccttccttttt

SEQ ID NO: 12254 - DNA, 568 bp, Homo sapiens
  misc_feature (1)...(568): n = a,t,c or g
gtgagacccattcatgacacactagaaatgtgtacattcttttgttttccatcacgggtataggtcttctgccatgaacgagaactatcacggaaattcctgaaaacaagatttgtaaattcgatttgaccctcccaaattcagggctgctctttgcagtggtccctggcccagcaggtggccggcgtggctcctgttggctcatgccagtgttgtgctggaccctcgagtatgtgactgtcacccttgtccaagactggtttttaccagtcttgattgggtcatttgggatgctttggatactataaggaaaatgccacgattaccatataaataccacaacaatcttgttggacatttcttgtgttntcttgacaatgggacccggagattaggntttcttnnaaatccngcaantttatatntagnggatcaanttgggnttancagttactgcnaannnnggttccntttttncnnnnnnnnnnnnnnccccccnnnntcnnnnnnnnnnnntnccgntnccnccnannnnnntccngnnncncnnnnnntnnccgnntnnctt

SEQ ID NO: 12255 - DNA, 4471 bp, Homo sapiens
tacccggagttttcccttttatttacaaagcagtaaaccaaattcctgtgtgaacataaatatccaatataatataatattgcgtatgccatttccccccacaaatatgacttcaattgggggccagttgttctgacttaagccaaaaattagtttcatctatatgaacatatgatggtaagtaacctatttattaccttaaaatgtttccccacataaaggaaatggtagagagtaaggggaaaagagaaataagagatgtgataaaacctattccaccatctttatcttcatccacagcatgtcctagacattcagtgcctgggccagtctctatagtaaacttgggctgatctggaaacgtctccacttagctctgtaaggatgggcacccttcagggtgcttcagaggaaacttactgaattcaacccaagtgtcctgaaaggaaattgaagaagttactcaaagagctgaactttaaaacaaggagtagctgagggtgaggcatatcctatcttgactttctgagcactctggtaccatggaatgtctgtacactgaccttcgccaaagccaagaaagccctggtaggagtcacagcagccatgggtgagctgaaaggcttttcctgacttcctggggtctcaggaatagccagaggtgaaaagatttgccttttttactacataattgcacaaaccatggtatctatttcctgatccagatttccaaaggcttttctgaaaactacaagatataccccttgtggactgtgtgaaaataaatttatctttatgtatttgaacagtagccatagatgtgcctcttctctacagattttcctgtcacacacatacacatataaacacacacatacacacacagagtctgtgtggtgggccaaacatgccaaaaataaatactctcacttctctaaattatttatagaactcatctgatttttaaaatatgttaataaataatctaaatgggggagggagttgaagtgttttttttttttttttacttatgttgatggatagccacaaagcataatcatcttatttacaaaaaacaaatgccccaaaacccaaaaaagcccccccagcaaccaaacatcttctgtaaatatagtttttaaatgatgagtaaggtactgtgccattggcccccatttggttatgtgcatcatgttagtcagcagtagccattccacgaattcctcatgggtagtgcaaccagttaaaaagtgtataaaacattatacatagaaaaactctcacatcctttggatgtttgcagttcatcataactttgtggttacctttccgcaacataaatttaaaaaaaaaatcacacacacacatacactcacacagacccatatatagaaacccattcatccagtcatacaccatccagagtgtagtgcatgggactgaattccatgaggcacgaagggggtgatcccatcctcagggtagtccatcatcttcaaggcttaatgccactcgcttggatttgacgacaggcagctcggaaagagggttcttcgggagttggtgcagctgtgaccttggttcccccggcaagacaaaaagctccttgagggcaggggctgggtcttccggttctctggtctccccaagacagggctctgcccacagtgggcgatcaaagctgctgattgctgcaggatagacatggccaatctgagcagttctccctatatggagctcatcttcatcttcttcttctgttgttttcctgtagactgggttgtcaaaattcatgcttttggtgttccttccgcttccagtttctccagatcaggtatccactcatgcacaggagggctatcaccactatgggcacgatgatcccgataacagcggcagtgactgttgagcccatcttactgtcttcatttgcatagtgctgggagtggttgctggttgcagggcttagggtagacgggctgatgctgggagccctggggacactaactgagcttgggactgcagctgtcaggcttggtgtctctgtgctgtggttctggtaggtggatctgtggacggtggtcccgggggctcttgtggtggcaggtactgtcctcgtcatggtagaagctaacgtcgtagttgaggtagattgaggtgctcggtagcacctcttcatgtctggacccagccacattgtgtcaggacaggcacatgtgtacttgggagagtggctggagatctgaggagcaggaaggcacaggtattcacagcctccattaggctggacactcagctcacaggcatctggagctcttggctgcttcagctcatggaagatgacaatgtcatgtgggttgttgaggttctcagccaggatggagatttccaggccattgagccgatttgcactgaaaatggcctcgttctccaggtctgtccagaacaccttgtcctcaaacacagctatcccaaaagggtggctcaggaagtcagtggaggagatcagcgtctttctgttgcctccactgaagtcaatgctggacagttggtgtagcttggagtctacccagtacaagcgctggctcagcagatccagggtgattccgttgggccattcaatattgtctgacaccagtgtttgccggtccacaccgttgagcccagatttctcaatcttggcctggtccccccagtcagaccaatacatgaaccctcgcagggggtcaacagcgatggcccggggttcactgaggttacggctgaagagagtgcgtcggcggccaccatcaactgtggccactgagatggtcttattgcccgagtcagtccagtagatgtgcttgtggacccagtccactgccaggccctctggagagtgcaactgctcgtcaatgaggacctcctgctctttcgggtcactggccttgtccatgtaggcgctatagatcttacggtaggagaggtcacaccagtagatgcgattggtggcaacttccacatctagtgccacgacattcttgagcatggggatgaggcgtgaatagttccgcttcaccaggtcgatcctccgcacctcgtaccggttggtgaagattagggatgggctctttccaccagcagccttgcagttcttggtcagtaggtccatctcgtagccagggtagcactcacacttaaaatagcccttgtaattgacacagatctggctgcaggcatctgggtccttgcactcatcaatgtcgccacaggtcttctggtccaggagctggaagcctgctgggcacgtgcattcaaagccaatcttgaggtcagtgcagatgtgtgagcagccgccattgttgtgcagacactcgttcagcccctgtaggcagccagcttcatcactcccatctggacagtcctgctcctggttgcagtgcttgattgcaaggacacatgtcccatccccacactggaactcgtccccacggcaggtgcccagtgggcagtcggcctcgtccgatttgtctttgcagtcgcggtcgccgtcgcagcgccagcccaggtgcacgcactcgccgctgcggcaggcgaactgggagacggtggcgcaggcggcgggcgcggacgtggccccggggcccgggcggccgcagagctcggctgcctcgtccgagcggtcctcgcagtcaaactggcggtcgcagacccagcgctccgggatgcaggcgccgccgccatcgccgccgcagcggaactcgcggggcccgcaggccgggtctgcacagccgcgctcatcgctgccgtcaccacagtcgtcatcgccgtcgcacacgaacacggcggccaggcacgagcggttgccgcactggaactcgtgcggggcgcacaaggtagcacagccggcctcatccgctccaccctcgcagtccttctccccgtcgcagcgccacgaggcaggtacacacttgtggctggtgggtccacagctcagcttctctgcaggacacacctgcttggtgcaagtggcctcggactcatcggagccatcaggacactcctcctcgccgtcacacttccaccgttcgtggatgcagtggccgttgtcacaggtgaagtcactgtctgcacaggtcttcttggggcagtcgtcctcgtcgctgtggtctaagcagtcatcgtcctcgtcgcatctccacacagaggggatgcagcgctcgttccggcactggaattggtccttttcgcactccttggccggcccttggccgccgagcagcggatcagccgctgccgccgcaagatgctggagccgcagcagcagcagcagcagcagcagcagcagcagcgccagaagccggagagggcccggctcggggaggcccatggcgggcccggggctccggccgccgcgccccgcgctccccgcgccgccgccgccgcgtctcagccctccgagtccttgccgcggcgccggggttgccgctgc

SEQ ID NO: 12256 - DNA, 412 bp, Homo sapiens
  misc_feature (1)...(412): n = a,t,c or g
taggtatgatctctaaagtaaaaaaaaaaaaaaaaaaaaaaactttttatagaaagctcataaataatcatgtcattttgcaattttgttaccaaaatttcccccaagagttttcaaatattagttctgcaatgtggctatgaaatatgcactgaaatataccttttaatttgagaaccagtggttagaataagctgtgatataaagtattttcagtgtacttttaaaggaactataaggccctccagcataaacgctaaaagaatagatggtagcacaggccatgagggctgggggagagaagcagagtgaaccttaggaaagatgggctcagctatttgggagcactgggatatttttactggaagttattttactgagggcaccnttcactgtttttggactgttacct

SEQ ID NO: 12257 - DNA, 733 bp, Homo sapiens
ggtatttccctggaggatacgcagaaggaactggaacacatggtccgaaagattctaaacctgcgtgtatttgaggatgagagtgggaagcactggtcgaagagtgtgatggacaaacagtacgagattctgtgtgtcagccagtttaccctccagtgtgtcctgaagggaaacaagcctgatttccacctagcaatgcccacggagcaggcagagggcttctacaacagcttcctggagcagctgcgtaaaacatacaggccggagcttatcaaagatggcaagtttggggcctacatgcaggtgcacattcagaatgatgggcctgtgaccatagagctggaatcgccagctcccggcactgctacctctgacccaaagcagctgtcaaagctcgaaaaacagcagcagaggaaagaaaagaccagagctaagggaccttctgaatcaagcaaggaaagaaacactccccgaaaagaagaccgcagtgccagcagcgggggttgagggcgacgtgtcctctgaacgggagccgtagctcaggaggcagaattcagtgtgttatcattgggcagaactggatcctgaaaaattcaagatgctaagcacctacactactttaagaatttggaactgaaacatgaagaggaagagaccaagaaataaaacctcccactttgtctgtacatactggcctctgtgattacatagatcagccattaaaataaaacaa

SEQ ID NO: 12258 - DNA, 445 bp, Homo sapiens
tttttttttcagattctaacaagaatacttttattatacacgtatcatacacacaacaattatttggggaacatttacaggcagagagttcaattccaaatctccatttcacccacacacactgtactgcacactcaccttagggttcagcccaacaggaacgagacaaagttattgctttctgaacagagagtttcaattaaatagaatcttccaagccaagaacagagcccagcatcctcttaattcttaataccctgtatatatatgaataaaaccttatgatgtgttatagattaccccatcaccattaaaagttaatattaaaattggatcccatgtctcaaaaaagtcgtaagaagtgcaccagtatttacagaccccattaaattacgcataaataaaatctgtacactcaacgcactgtttcttaaaatacagaacc

SEQ ID NO: 12259 - DNA, 438 bp, Homo sapiens
atctctatttgagaatagacccttactaggaagaacgttttttcctcagtgcatttgtgctagaaattttcaagagtctaatagtctttgccagtcattcagcagcaaattttcagcattaagctgttcctgttcagtaataaaaccggtcactgatgggaaaactgccaatatagaaaaataaaaatctcttttccactccattgtcgtataggcatgtaaacagcctctttttgatactggaggaacacttgatggagtgtgagccacctaagatctcggtttgccaaaattcatttctaattaaccttactaattatactactttgttaggattttcacattcttggcttaatcattttcattcctaaagaaaaatatcttggcctaaacctcagttattacatgtaatttgatgaggtatttggtatttgttcc

SEQ ID NO: 12260 - DNA, 635 bp, Homo sapiens
caggcgagagactctttcaatgtaatctctgtgggaagcgcttcatgcagcttattagcctccaatttcaccagcgaacccacactggcgagaggccctacacgtgtgacgtctgccagaagcagttcacccagaagtcctacttgaagtgtcacaagagaagccacacaggggagaagcccttcgaatgtaaagactgcaagaaagttttcacctacagggggagcctgaaggagcaccagcgcatccccactccgggagagaaaccccctacaaatggtccccaagtgccccaagagccttcaagtcgggctgaaattggttaaagacgcccacccagaaaacacatcccagaagctacttcctcagtgattgcataatccggtctatgccttctgcacccaagaagaagtgaatgatatttttcatcaatgttatcagatgacatttgacacatgcaagggcgtctgacacacagagggagtgccctagatatgaattgccaggatgtttgagtaaatatgtgtcctccccactgagctttgttttctgtttcattatgtccattgttttcttataggtttattttggtttgtgttgctgttcttccaataaacgatcatcttattagtttt

SEQ ID NO: 12261 - DNA, 534 bp, Homo sapiens
ataatgtctgcttccagccagtgagaaacatctagccatacctttcttatgcaagccattgagttatcaggactgtgaattaacactgtatgaataaatttctgtacaccttattgtttggccagaaggccaccaagtgtacttatatgtaatccttaaattttaaagtagctgtaatttttaaatatttctaaacttttcttaaaccactaaaattaagctcttactacttagtcaactatcctcagctgtattcgtactcaattgtcagtatggcacagattactgtattaaaatattctcctttcgtcttcatatttaccttctgaggtaattttttaacttaatgtgttactacaaagatttgcagatctttaatcaagcactatgttaatactgtaatatcagaatactatgttgcattatttaaaatgttcaaattgaatagattaaaaagtttttaaatgctattgcatcatatatttgctatcacccctaggcatgcatacatcagtaatcactaaggtgcagggg

SEQ ID NO: 12262 - DNA, 284 bp, Homo sapiens
gagaaacagacacatccagaacgtggaatattgcataagaaagctgccctggattcttcaaaatattattatgatgaaaaagagaggggagtgaaaattgttcaagctgtcttgagtctgctgtgagtttattataccattctctgcttttgtgtatgtatgaaaatttcgatatgaaaggtataaaacatggatgaggaggcttgtttttaaaagataatactagagagccgttaggtactaagaaccagaaatagactcacataaatggccaattgattttt

SEQ ID NO: 12263 - DNA, 453 bp, Homo sapiens
ccacgcgtccggctgccgtgcggtacttgtcatggagctggcactgcggcgctctcccgtcccgcggtggttgctgctgctgccgctgctgctgggcctgaacgcaggagctgtcattgactggcccacagaggagggcaaggaagtatgggattatgtgacggtccgcaaggatgcctacatgttctggtggctctattatgccaccaactcctgcaagaacttctcagaactgcccctggtcatgtggcttcagggcggtccaggcggttctagcactggatttggaaactttgaggaaattgggccccttgacagtgatctcaaaccacggaaaaccacctggctccaggctgccagtctcctatttgtggataatcccgtgggcactgggttcagttatgtgaatggtagtggtgcctatgccaaggacctggctatggtggcttcaaa

SEQ ID NO: 12264 - DNA, 1009 bp, Homo sapiens
  misc_feature (1)...(1009): n = a,t,c or g
ctgaaaataagcctgttgtgaagccgcctgttgcagattccctggcaaacccccttcagttaacacctatgaacagtctggccacctctgtattcagcatagctattcctgttgatggtgatgaagacaggaatccttcaactgctttctaccaagcgttccatttgaacacgttaaaggaatcaaagagcctctgggatagaattttttttagaattcagcatcggaggaggaatgtgacataataatgatcgaaagccgaaagtttaaaagttgtgatgccctcacatggttggagggttattctagcttctaaggactgaatgttgtccacaagagtgtcatcaggtcataaattgtgcatctgggggaggtgttgtagccattgacaacaaaatagaacaagcaatggatctggtgaaaagccatttgatgtatgcagtaagagaagaagtggaagttttaaaggaacaaataaaagaattagttgaaagaaactctttacttgaacgagaaaatgcactgttaaaatctctttcaagcaatgatcaattatcccaactcccaacccaacaggccaatcctggtagcacttctcaacagcaagcagtgatagcacagcctccgcagccaacgcaacctccacagcagccgaatgtctcctcagcataaagctttcttaagcctcattaagaaaaaaactgaaagcaatctatccttgtgtgccactggtgttctttccactttatacgaaagcaagtagccatgctttggttgtgtgtttggccttttcagtattaggacaatcattctacaagagcttttcctctcttctgaggatgttcatggcaggcgctggtttggatgtccagtttctatgttcattcagttacacaagggaggattantaggnggggggttttntttaaaaggcggagccaaagtcntggcatttttacccgggggtgncggcntgagtgggggggtctttttaaggagttttttgggt

SEQ ID NO: 12265 - DNA, 398 bp, Homo sapiens
tcctttatcatgttaattttcatctaaaaaaaaactatcactgaaaacttttttaagtataatcaaatgagttcaactgtcacgttaagatgccttgaattcttttgattttctagttccaatttctagctttaatatcttcaaatcacctgccaagtggtgtgtgtttttacacctctctggccctttagttttctgctgggaaacccagaacgccagtccagacaccgaggagccgaggaaacaggacagcaggcagggggctgcggagagcagcacagtcacggacactgcctccttctccatgccacccgcggtttccacagttaaatactggtccacatgacatgtgaacacatggctcctataatggttaggaggaaggtgattcatgtggt

SEQ ID NO: 12266 - DNA, 1104 bp, Homo sapiens
acagcatatagttaatttgagtagagtcaaattaatcttactttagaatttgattactaagtattagcatggataataatgcttcttttgcttaaatgtaaaaattaggccgttttactaggtgtactttgtcttaatcatattcctatttttttatacagctgtgcaaccatattgcttctgggaaaaaatgtcaatatgtgggaaactgttcctttgctcatagtcctgaggaaagagaagtttggacttacatgaaggagaatgggatacaagatatggagcaattttacgaactatggctcaagagtcaaaaaaatgaaaaaagtgaagacatagccagtcagtcaaacaaggaaaatggaaaacaaattcacatgccaacagattatgctgaagttacagtggactttcactgctggatgtgtgggaaaaactgcaacagtgagaagcagtggcagggccacatctcctccgagaagcacaaagagaaggttttccacaccgaggacgaccagtactgctggcagcaccgcttcccaacaggctatttcagtatttgtgataggtatatgaatgggcacctgcccagaaggaaacagctgtaaatttgcacatggaaatgccgaacttcatgaatgggaagaaagaagagatgccctaaagatgaagctcaacaaagcacgaaaagatcacttaattggcccaaatgataatgactttgggaaaatatagttttttgtttaaagatttaaactaatatgctggcttttatgtatgatacctaatcagagcattgaccagaaaaattgaaagtgttctgaggcacatagcagaggagctgcagatttcctgcttgtattggcgtatatcgttcctcctgagcagcaacccacagtaggtaggaaaatgggctgtttcacaggcctgggccacgctctcacggaaccactggcatcagatggtgaagtgactgctacccggttgccatctgttgaacagacttttggatgaagtgtgttggggaagaggataaggttatatctaaggacaactctttgagttggtccttcatataagaatcgtgacggtaaagagaataaa

SEQ ID NO: 12267 - DNA, 467 bp, Homo sapiens
ggagtcaggaacatatcagatttatagataagatgttaatggggtcaggagcttttgtaaagaaaatctctctttctcctttttcaaccactgattctgcatatgaatggaaaatgcccaaaaaatcctccttaggtagtatgccattttcatcagattttgaggattttgactacagctcttgggatgcaatgtgctatctggatcctagcaaagctgttgaagaagatgactttgtggtggggttctggaatccatcagaagaaaactgtggtgttgacacgggaaagcagtccatttcttacgacttgcacactgagcagtgtattgctgacaaaagcatagcggactgtgtggaagccctgctgggctgctatttaaccagctgtggggagagggctgctcacttttcctctgttcactggggctgaaggtgctcccggtaattaaaaggactgatcgggaaa

SEQ ID NO: 12268 - DNA, 831 bp, Homo sapiens
cgccgcggggccacctgagggagtcgcctccgcgggacgcacaagacctgaccggactgcgccgcccgaggcgtcgcgccttgtcagcgagggcgccgagcaacttcgttcagaatgaccgaagaagcatgccgaacacggagtcagaaacgagcgcttgaacgggacccaacagaggacgatgtggagagcaagaaaataaaaatggagagaggattgttggcttcagatttaaacactgacggagacatgagggtgacacctgagccgggagcaggtccaacccaaggattgctgagggcaacagaggccacggccatggccatgggcagaggcgaagggctggtgggcgatgggcccgtggacatgcgcacctcacacagtgacatgaagtccgagaggagacccccctcacctgacgtgattgtgctctccgacaacgagcagccctccgagccccgagagtgaatgggctgaccacggtggccttgaaggagactagcacccgaggccctcatgaaaagcagtcctgaagaacgagaaaggatgatcaagcagctgaaggaagaattgaggttagaagaagcaaaactcgtgttgttgaaaaagttgccggcagagtcaaatacaaaaggaagccacctgcccagaagcccacaggttctgttgggagcaccgtgaccacccctcccccgcttgttcggggcactcagaacattcctgctggcaagccatcactccagacctcttcagctcggatgcccggcagtgtcatacccccgcccctggtccgaggtgggcagcaggcgtcctcaaagcttggggccacag

SEQ ID NO: 12269 - DNA, 726 bp, Homo sapiens
tttttgtaaatgaattcagtcaagtttattaaacttgctgtgtgctcagcaccgccctaggcagtaacatgaaaaacattacaaaagaagatctcaacaagggaaaaatatattctgtactatattaatttccaatcatttacatgttgctttttaaagtgttcttaggtcactttggggtatgtggtctccttctttctccatgttcccctaaagcttccacactgttgaattatgtgcctgtggcgaccatcctccaggaagggcaccttcctgctgatgaggcaaccatgggttggtcagggctggggtcccgtggtggaggagacatgctgagagaaaaaccatcaaccccgagagctcaggacactcacagtgaatcccagaaggccaaacgtggggaagccacaaagagggctctgggcccctcactcaccccctcccctaggggatgtgcttaaagtgctaacgccgtaggaaaatgatgcatagctacaagccgtcctgggtgctactagactcatcgcctgcctcttcctccctaacttgtgctaatactgggcgatggcacaggccaatagaaaagtctagtgcccagtgaagtagtagagaaggtccaacgtgtaacctagaattcccaagaggaggtggggacagaagagaagaagtgaagggcagagacgtgtgcagcaaaaaggacgtttgtgcttggccggtaccgcatgg

SEQ ID NO: 12270 - DNA, 1030 bp, Homo sapiens
tttttttttccaagccaactcataaattctttaatctttttaacaaaatatacaaccccaaacatcgtactatggttgaaattaattgggaaaggaggaggtagaggaaaggatacatatgggtttgtggaacagggaatgagttcaatctcaagacaagtttcagagatcttctaccccttcacaacacaaatggctgctaaacaatttaatacaaagtgttattggatcacaatacaatgaacaaaggccatttcaaaaataaaagtgatctcaaaagcatatctgctcctggcaatgaaccatgaataagccttaccgatttgtcgtcttctaaaagtaagcctgccagatattcttccatgtttatttccaaacaggtttgtgggttagcaggacaatgcatctcaagaaaggcaacagagtaagggaagtacaggagttgacatgccaataaggggtgtaaacagtaaacaaaagagctactcacgctgcatttcaaacaatgttaaggcaggcccatccaaatggaagcctaagagatgaacaattcttccaagttttccatttcagcaagctttctggtgtttttcccagagatgcatcaactgcccaggaaattgggtaggaatacaacacagcaactggagaggtcagctgcctccatcctcccccacatttcagaaatggcagagtcaaagccaaaatacaatcaaagcacactatgtggtgagccagttagacatgtgattttaatgacaaagtgggagaaaataaattggccaaaaaaattaacaaaatacatttttacagatatatatatatatatataagttgttatcgatttgtctggtgttttaaggggaaagggaaaaggaaaggaggtaaattttttagcttccatgaacatttactttaagatgctgactgcatctcttggtgtaggttccagatgagataacaaactagtcttggatcatctgggcatctgatttctagaagccaatgattcactcacaagtagctctag

SEQ ID NO: 12271 - DNA, 288 bp, Homo sapiens
agaaacatgaaaatgggccaccacaggatatgtttgattcccccaaggaaaatgaaaaagccttcagtaaaactgatgaatggatagatataagtgtctctgacaggagtgaatgtacaaaacatacttctgggaataatttggtttcaccagatacagactacagagctggttcttcgtttgaactctctccatctgatagctctgatggaacatacatgtgggatgaagaaggcttggaacccattggaaatgtccatccagttgggagctatgagtcctctgaaa

SEQ ID NO: 12272 - DNA, 858 bp, Homo sapiens
tccaaatatgtactgatatcagacaaaaagtaaatatctgcaaatatctgaggctgtctcaatttagacaataagaattttattcacatgactactgaagttaactgttgattcaaataagatgttctatgttgattaatgccattactccacaaatagtccctttttccaaagctacgttcaaatttcgtatggcatgcatttcacaatgaggacccggattcagggagtaggttagaaagcctatgatgagtcatgacaagctgactttgactaatagtcatcccattaaaaaaatgaaagccacaaacatggacagaaaccagtcatagaatattttaggatataatgcatagaatgattccctcaaacaaatcagtcctccagaagcacaggatgaaaaggatgtttgggaaatattttctgtaaggtcaccatattaaaaattatcctatacctatctttatttttttcagtcttcccaacaaagaatctgctatataatttctattaacagctctaaaagatggggaaaatattttatcctcaggcagacactttcagtttctttttcttggctttcagcactggaggcagagaaattttaaaggctgtctcgcacgtagtacaaatggggctgaaattgcagaatattgacaaacacacagaacagacataaccaatttcaatgagatttcgatgacagaagcaagcagccctgtagtcaacatgaaccgggggtgggaggattaactgagatctctgatcttgatcgggaagaaacacccacagcaaatactgcagaagagaaggcatctgaggcaaacccagacacaacacaaccaacaactcacaacc

SEQ ID NO: 12273 - DNA, 1471 bp, Homo sapiens
ctgtaacataaatgatgagcatgtcaacaaaatgaactcagatagagtccagatgtggtattaatcaagaagagctatgaccggaccaaacgtcagcgtcgtagaaactggaaattgaaagagcttgcaagagagagagaaaacatggatacagatgatgaaaggcaataccaagattttcttgaagatcttgaagaagatgaggcaattcgaaaaaatgtcaacatttacagagattcagccatccctgtggaaagtgacaccgatgatgaaggagcacctcgaattagtctggctgagatgcttgaagaccttcatatttcccaagatgccactggtgaagaaggtgcatcaatgctgacataatgagatgttgtagactgtttccatacatgggcttaagaagttggacagagttaccttaagtgtctctactatctttgcctccagatttcaagaggagaaatttagttttaaacctgaataaacatgtttgttttcagtgctcactcaaaccactaaaacagatggatagctttgaggttttagataaggaaagattatggagaatgtagttgttactgatttttgggcaattttacatttgggaattttatccactgtggcttttttatatgaggcactgtagtattttccacatagtatagtactctgggatgttaaaagctcaaaaattgtgattccttgaacgttcactaaatcttcaagcaaaaacacatttttacattatttttacgttgattattttagtgaaagaccatatgaagaagcatttttaatattaacttgttacatactttgatccactttacatcatttttatgttgttgaggtagggaaatttgggttcagtttatcactggacattcaggaggcaagtcaatcttttttatttcccttataaaattaactcttcaaaagccgttaaacagagagttatcttaatttttattgcagtaggaggaaatatatttaaaatatttgtagatttatagcaaatagagactcgttatttaaaggttaaataacaatttgttcttttgttgtttttgccagtttagggcagtagctgcttttgtcataaatatcttcctaccacatcaaaaatgctgcttttaaaatttttgtttataaattgagaaggaattttctctctataagtttctgtcattgaacagatcaccattaaaaagaatattagaatccagcatgaagataatggctaataaaaatgaggtacatactttataaaaccattaatcagatttgaatgaggaatgcttcccacatccttgaaagaaaaactgtggcttacgttttgaagtattctgagaatgaagtattaagatccaatttctataagcaagatcagacttgttaagtatgccgcaagtaagagctaattcattcattccatgtgtgccactaaataaagagattgagcaagtga

SEQ ID NO: 12274 - DNA, 776 bp, Homo sapiens
ttactagttgaaaagtcacttgtgaaagcttcttatttaattgctttccaaactgctgcaagcaagaagccattctccattgctgaagaattaattaaaccatatttagtagaaatgtgttcagaagttttgggttcaagtgctggagacaaaatgaaaactattccactttctaatgttacaattcaacacaggattgatgaactatctgcagacattgaagaccagctgattcaaaaggtcagagagtcaaagtggtttgcccttcagatagatgagtcatcagaaatctcaaatatcacacttcttttgtgctatattcgtttcattgattatgattgtcgtgatgtaaaagaagaattattattttgcattgaaatgcctactcaaataactggctttgaaatatttgaactaataaataaatatattgatagtaaatctctgaattggaaacattgtgttggtctctgtaccgatggggctgcaagcatgactggcaggtattctggtttaaaagcaaaaattcaagaagttgccatgaatacagcggcatttacacattgttttattcaccgtgaacgtttagtggcagaaaagttgtctccatgtttacataaaattcttttgcagtcagcacaaattttaagttttataaagagcaatgcattaaattcacgtatgttaacaattttgtgtgaagagatgggatctgagcatgtgagtttaccgcttcatgctgaagtacgttggatatcaagagggagaatgttaaa

SEQ ID NO: 12275 - DNA, 451 bp, Homo sapiens
ggccggagccgagggcgccgctgggcggcagtcggagctggagcccgtggtatcgatggtcgacgtccttgaggaggacgaggagctggagaatgaggcgtgcgctgtcctgggcggcagcgagctccgagaagtgctcctactctcagggctcagtaaagagacaagcactatatgcctgtagtacctgcaccccagagggagaagaaccagcaggaatttgtttagcttgcagttatgaatgtcatggaagtcacaaactatttgagctatacacaaaaagaaattttcgttgtgattgtggaaacagcaagtttaaaaatttggaatgcaaattacttcctgacaaagcaaaggtaaattctggcaataagtacaatgacaacttttttgattgtactgcatttgcaagagaccttatcctgatcctgaagacgagattccagatgag

SEQ ID NO: 12276 - DNA, 430 bp, Homo sapiens
cacccaaaacagatacagtttcagcttctggattctctctctctgtagtctccattctcaaaatgtccaatgtattcattttatctttttccacgtggttcttttcaactgaagtttttgaatgtgaattcttgctctctgactctgttttgccttgtgaaagaactgatttcttcccagcccttgacaaattgggtttaggtctttggaagcgacctctcaacattggtttaacattttctgtttgatcaatttccagtgaattattttttaggtcaacatttctttcttctatacaactaccctcagcattattcacctcacacaatgctctaattccaacttcgaatgaaggcaaatctgaagtgcttgattctgaagactcagttgctactgatgtggcatcttgttgattacttaatgaaaggat

SEQ ID NO: 12277 - DNA, 275 bp, Homo sapiens
tctcggacagcgcccagactgaggcctgctaccacatgctgagccggccccagccgccacccgaccccctcctgctccagcgtctgccacggcccagctccctgtcagacaagacccagctccacagcaggtggctggactcgtcgcggtgtctcatgcagcagggcatcaaggctggggacgcactctggctgcgcttcaagtactacagcttcttcgatttggatcccaagacagaccccgtgcggctgacacagctgtatgagcaggccccg

SEQ ID NO: 12278 - DNA, 125 bp, Homo sapiens
  misc_feature (1)...(125): n = a,t,c or g
ttgacttctcgtgggattgatgctgagaaggtgaatctggttgtaaatctggatgtaccattggattgggagacatacatgcatnggattgggagagctggccgttttggtaaaaaaaaaaaaaa

SEQ ID NO: 12279 - DNA, 444 bp, Homo sapiens
ctgcccttcaccataaagacattgctctgtctttggttgctgcaagtgatggagctacagtctgtgttaccacaaggggagatatttacttacttgcagactatcagtgcaagaagatggcttctaaacagttgaacttgaaaaaagttcttgtgtctgggggtcatatggaatacaaggttgatcctgaacatttgaaagaaaatgggggtcaaaaaaatttgcattcttgcaatggatggagctggaagggtgttttgctggagatcagtcaacagttctctgaagcagtgtcgatgggcctatccacgtcaggtcttcatttctgatattgctttaaatagaaatgaaattctatttgttacgcaagatggagaaggatttagagggagatggtttgaagagaaaagaaagagttctgaaaagaaagagattttatccacc

SEQ ID NO: 12280 - DNA, 996 bp, Homo sapiens
cggacgcgtggggcagaagatacgatcgtctgcctttataggcctcagatactgaagattatttttggtagaagcaccgtgtaggctttttctgcaatgagcagcagctgactgaattttcataagaaacttggactgcaggacttaatctgtagtctttagacaacagttgctttcataaagactagttcttatcaaccttgaatgactacagattattttgtgaaggaggatgaagtaatgtgtgttcttgtaaaattaaattttatctttatttcttctaaaaatctgtataccaggaactgaaaatctttgaacagatattaaaatctacgtaagtatacaaactagttgagggatacactgtttgcttttataaaataactttgattacatgaatataataaattatgtgcatataaatgtgtgctatatgctttcctttaaatatgtttgaaaagatgtttgaaacttgattatactatttataattggcacagtactttgaattatgccagtactacattgtaaaacagagttgtattttttgatatttaacaatgcttaacactttaaatgccacttctgaggaatggacctgggtgttaacacacttggaatatgtgtggatgccaaacttttttaaaaatacaatataaattatgcttatttattattttctttagtttaatcttggtcatgttttggtgtgtatttttaatttttttcttaaattaacactttggcatgaacattactgcaggtttttgatgaatataatgaatgtatggaattcaattgaatttgcatggtcttcggaattttttctgtgtgtataaatttagctgctattaacagaagagagaactttctgtgagtagccatgtgtgttgatcagatacagtttttctgagatcttcaattaatctcactttaaaaatgaccaaaacatgtctttcttgaattaactttgaataaaagtttgtatattaaaaa

SEQ ID NO: 12281 - DNA, 299 bp, Homo sapiens
ttttaaactttaccgtggaaactttcaaacatgagcaaaataagaggataatacagttcagcccccagcaaccataaacatatgcctaatcttgtttcatcaattactacagacctgctgaattattataaagcaaaactatatcattttatctgtaaatactttagtatatatttccaagagataatgattctttaaaaaaacataaccacaaccccaccattatcacacctacaaaatgaacaataattcattaacatgaaatgtctagtcagtgtttgaaacatcccggatgtctc

SEQ ID NO: 12282 - DNA, 1041 bp, Homo sapiens
ttttaaaatgaggttacctgctttatttggataccaaggttcccttcagacagcattaaaataaagacaagtaagactacacagataaaatccagtataattcaaatccaacaatgaaaaatttcccccatattgttgcaaaattctttctactcgaaatcgctttgctacaataataaaaagcatacattacatataaaagataccagtgtactaaaaagtgacagaagtggactagcaaatccttcaaagcacattatataaatgactagcatttaaaaacattttttcctataaaatgtaggtcatatacatttataaattggcggttttatttctaaagcagtgatgtgtgtgttcaaatagctgtcctgtacagtataatatctactccacttggaaactataataggtttgtctttctttgtattgaagttgaataaattcatctgatcagctgagaaaccaagcttgaaaaataagtatctaaaaatcaatgtagaaagtttagaattattgaaatgtagttatgaaatatgaagagaactatctatttcacaatggagctgaagtcacctcaaaacttacgggcttgaatctaaaacagaaacaaatattaaaatccaaagcaaatcacaaagttaggtagcagtacagaagcaggaaaaaaaaccacatcccttccttcagtgtgatgggcactaagttttgcggtcttcctccatcttgcagaagagtggtaaggccattcaatgcttagtgaaagtgagtacagatgaagtcagatttagcctgtctcccctgcaacttcaattatgctgtgtaaacagtgttacgttccaataggaggaacaatggaatttgcttataaaaactgattaaagataatcattattaaatgaaataaggataattaataactctgaaatgtttttagaactttcctgatgctacttgtaaagttagcactgctatgtattattgcttacatacagtacaacatcatatgccttctaacataaagcagtactgtgatttgtt

SEQ ID NO: 12283 - DNA, 664 bp, Homo sapiens
caaaaaggaaagtttttaatggaaagttgagccagaactaaaccagggagctgtctgaaatcatagcaccccatccgggtggcggggagatcaactccgagctgtttttccgaggcagtgaggaacggtgccggctctgcacggagctgaggacaggacagaccttgctttgagaaggagctgccggccggggccacgctccacagccgccgcgcgacagtggagccaagggttagggcaccaggaggggccaggtggcgtcggcagcatctgtccccagaatcaggcagaatccacttcccaaacagagccccacgcaggttcaccatgaacctcagggtcagggaatgagccaggcacgggggcatgggcagagagggccacggggcagggcccactgagggaacatcagtggccctccagtcaggttctgtgggtttgggaagcccatcgtgaaaggggctgacctttgcccctttttacttggcattggttttgaaaccagctgtttcccaaactctgcttcccaagggcaaccgttgcttgttcacacgctcagcctgtctgggggagcggcctctagcttcagccagggcgggtacacaccctgggcacagggtcctcagcccccgggaaatgaagctcccagggctggcgcccacct

SEQ ID NO: 12284 - DNA, 755 bp, Homo sapiens
agtttctcctggcggcgctggtcctgtctctcattctgccgaggagcagccagtacatcaagtggatcgtctctgcggggcttgcccaggtcagcgagttttcctttgtcctggggagccgggcgcgaagagcgggcgtcatctctcgggaggtgtacctccttatactgagtgtgaccacgctcagcctcttgctcgccccggtgctgtggagagctgcaatcacgaggtgtgtgcccagaccggagagacggtccagcctctgatggctcggagatgatggaccgtggaagggaagcgtctgtggggagtgagcgcttagatggccagcagctgctccttctgggaagctcgcaccttggcaacagaacagccctctagcagagcgtcagtgcagtcgtgttatcccggcttttacagaatattcttgtcctattttagaattttccggagtagtttatttgcagtctgttgattatgtgcagtagacccgggacactgcgttttaccgatcaccttgaatgtggtgcctggatgtgccttttttttttttccctgaaattattattaattttctattgtgagttcatcagttcatagtttttttagtaaagaagcaaaattaaaaggcttttaaaaatgtacaacttcagaattataatctgttagtcaaatatttgttattaaacatttctgtaatatgaagttgtaatcctggccgtgagcttggaagcttacttttgattcttaaagcc

SEQ ID NO: 12285 - DNA, 388 bp, Homo sapiens
gtaaaaagaggcattaatgtatgtactcacaagttagacctatttcgctgttaaaataggtctggtcttgtcataggtcataggaattgtgtagtttgagttgctgcgagaaggagtcaagaacttagacttgaatgggaaggccaactggtgagggaagtggggtattatctactcaaatgttctaagctaatacaaaacaattacctggcaagcatccccctctgcccttcttgagattctgaatgaacttagaatcagatcaatggtgagacccagttatgtaactttcctttgaagttctaaaggataattgaaaataaagtagtatggcatgtttaacagtaaggagtgacactaaaatttgatataacagtatgttgcaact

SEQ ID NO: 12286 - DNA, 1065 bp, Homo sapiens
tgctttttaataattttattttttttctaattttgttaatttcccatagcaccttggcgatgttgaaaacaaatacaaatacaaggatgtactcattttaacattttatgcatgagcatgtgtcacaccaattttgggggtaacagttttgacaacaggaacaaatctaagcaatcgacaaaacagaagccggataactggctctgacccccacccccaacatttaagagatgcaaaggacacctgaattaggttaaaaaaatcaagttgatatggatatttcaacagtgttctgtgctgcaaaactgaaaataaaaccatttaatacacagcccattaatatctgagttacgcttttaggaactgtcaactcgaagattcataaaaagttgtcagcttttaaaaataaactttaagttatctaataatcaggtgaatttcaaaggaggatttactcacaacttgaaaataaattctctttcaacttcttaaaatatcctcattcagctaatgaaaagggaaacatatatgtatcttttcggaagctcagactagcatatgcccaaaagcctaaagttaaattaatggccaccaaaattgtaaggaaatataaaaaattaggaaaaaatccatcatatattatagttaataatttataaaagcccctcagaaggaatacactgttctcttttgagttttatcttttctgtaaaaacaaaattggtacttttaaaatatggttaatatatatattgccagcctaaataccagagacttaaccccagtgttgttcaactgtgtcaaagtaaaaccagtggacatttaagccaagagactaattattaaggccataactaagaaaactagagaagtgttcattaacttttaaatactattttacgttccagcaacattctttttgttcttctttaccctagtgaagatgctaacattccatcattaagcctttccaaagcaaacctgtttatttaaaaaagaaaaaggaatgtgaaataatattcaagctatcttaattttaggaaacaaaaataaatcatgaattct

SEQ ID NO: 12287 - DNA, 119 bp, Homo sapiens
taaagcttgtaatgatcagtaggctgaggtgggcaaatcacaaggtcaagagttttttagatggggtgagcacagaccaattcctgttttatttactgatttaaaattttgagaccgct

SEQ ID NO: 12288 - DNA, 494 bp, Homo sapiens
  misc_feature (1)...(494): n = a,t,c or g
atgcggcgggaccaggtgacagacacgtgccgagccaacagcgccacaagccgtaagcggagggtgctgacccccaacgacctgaagcacttggtggtggatgaggaccacgagctcatctactgctacgtgcccaaggtggcctgcaccaactggaagcggctcatgatggtcctnaccgggcgggggaagtacagcgaccccatggagatcccggccaacgaggcacacgtctccgccaacctgaagaccctgaaccagtacagcatcccagaaatcaaccaccgcttgaaaagctacatgaagttcctgtttgtccgggagcccttcgagaggctagtgtccgcctaccgcaacaagttcacccagaagtacaacatctccttccacaagcggtacgggcaccaagatcatcaaacgccagcggaagaacgccacccaggaggccctgcgcaaaggggacgatgtcaaatttcgaggagtttgtgggctat

SEQ ID NO: 12289 - DNA, 597 bp, Homo sapiens
ggagggaaccattagcagcctgaggagctggctggctgggagcctcggggaccgcccagccttgctcccagctcacccacaagatgtggacagctcttgtgctcatttggattttctccttgtccttatctgaaagccatgcggcatccaacgatccacgcaactttgtccctaacaaaatgtggaagggattagtcaagaggaatgcatctgtggaaacagttgataataaaacgtctgagggatgtaaccatggcagcagcttctcctgtcacattgaccaaagggacttcggcagcccacctcaactctatggaagtcacaacagaggacacaagcaggacagatgtgagtgaaccagcaacttcaggaggtgcagctgatggtgtgacctccattgctcccacggctgtgcctcgtagtacgactgcggcctccattacgactgcggcctccagtatgactgtggcctccagtgctcccacgactgcagcctccagtacaactgtggcctccattgctcccacgactacagcctccagtatgactgcggcctccagcactcccatgacacttgcactccccgcgcccacgtgc

SEQ ID NO: 12290 - DNA, 160 bp, Homo sapiens
ctggcttttgccacgcacttttgggaatgggcaggagacctgcttcctctctccagaggttgcattttcccaagcttgaacgcttcatgtgcctactctgcaggactgaggagtttgctctgtggtgtgaaaacctaaggaatggggggcgggtgcttgc

SEQ ID NO: 12291 - DNA, 492 bp, Homo sapiens
agcagaagttctggaagttgagaaagaagagaatgctgaaaatgatgaagatggatgggaaagtaccagtctcagtgaggaggaggatgctgatggtgaatggattgatgtgcaacactcttccgatgaagaacagcaagaaatctccaagaagctgaacagcatgcccatggaggagcggaaggccaaagctgcagccatcagcactagccgagttttaactcaggaagacttccagaaaatccgcatggcccaaatgagaaaagaacttgatgctgcccccgggaaatcccagaagaggaaatacattgaaatagacagtgatgaagagcccaggggtgaattactttctcttcgggacattgaacgccttcataaaaagccaaggtcttgacaaagagacaagacttaggcaactgcaatgggctgggaaagacagaccgaaaagaatttgtgaggaagaaaaccaaaacaaatccattttccagttcg

SEQ ID NO: 12292 - DNA, 507 bp, Homo sapiens
aatttataatattctgagaaaactggaagcatgcataaagcccctctgctgtgcactgaagtatgggtgccttgaggaaaagcagttacacagttgagttgcaagctgaattggctgtgttcaaggcatgcccctttagaattgaaagaactagcagattacggtatttagacttgaatatttggctgatattttctggaaattaatggaatgagcctctcacctcaagggaaacaactgatagtgttgccagtgataaagctttcaagcaaaaattggaatttccgaaaatctgtactccaccatgagctttattgttggggatattaacaaatgtgatttgtataatgaaatgcatttcatttggaagaattcaatgaaccatttttccaagtgaccagtacgtgatgttacaaaatcatgcatgtgctcaaagattgattcaaaagtgtaaaaaaagcacgtggatattcatataataacactctccgagtgcaataaaaaaaa

SEQ ID NO: 12293 - DNA, 876 bp, Homo sapiens
tttttttttttttaaatcaagaactgcatgtgggtttattttacatctgagaaaacagtggatttaattgtgtgaaccaaaatgtactgtacaatattaatgatagaacatcaaaatgtataattaatagtgcattgcttgctttgtttttatgtatttattttgtctgacagtccctctgagtacatgcatctggagagatgcaggtgccagtaaaagtcctctatttaaatcaagctgcaggaactaaattttattcaaaaattgtggttttacattatatacacagaaatttaatataaaatgacaatataaaaagttaaaagagaaagcatacagccagaaggtacaaagaaagttgaagagattaaaatggtacgatatgtaacatacaggagtttttaagctgatgctggcaatttacaaggaaaggactccaacgtttgccccattttttttcatttaccaatgcagcacgctatagaaaggtcagcttgtaccaaagcttacatttgtaaataactataaactgcaatattttacaggaaaaaagaaatagcatttttacacatttttaaataatagcttgcatacttttttttttgccgaaagtggcatttttcagcatccagagggtttgggcatagtggcgagtggggtatctgttgttgttgttttttgttttagacatgtagaggtgtggcttccgaaccccgtgagtcctagacagctttctatcttcccacagctgcatgcatgtttcctcacaaaccagttctgcatataaaagctcattttttaattattaaataagttttgtgtctgacacagcttttgatctgaatgaaatgcctttaagcctttttttctttttct

SEQ ID NO: 12294 - DNA, 703 bp, Homo sapiens
cgcaccctcttcctgcctggcccgtgcaggtcttcctcgctagcgtccgcaccatcttcctccctggtatctttaacgtcttcctccccggccagtgtcgggtcttcctcgctggtgtccacaccatcctcctcacaagcctctcccacgccttccccttcattgctgctgtcctcgggctggtacatgaaactgacaccagcagcctttgctgccaagccggctgctttattccttttaatatgctgtttctttttcagtttcctttttttatttttgcttattgtggtgccatctgtgtgctgtcgctgagatttctcctgtaacagactctgctgtttctctaattctgcttgttctataagaacattattgggatttttaaattttttctttgatttatgcttcctaattcttcttctctttggctggtcatgaggatcctgatcttctgtgtcatccccgctggaggcgttctcggggctcccacagctgctgggctccggccaacaggggacgtagccctcaggaggcccgctggcagtgtagagccgtcgggcagtcggggtctcagagccagtgtctgtcaaaggctcagcatgtttctggctcactttctcagaggtcactttctttggtggattttggacggccagcgtctggggttccctctttccttggccacttggaacaggaggaaaaa

SEQ ID NO: 12295 - DNA, 413 bp, Homo sapiens
cttagagaaatatcctttccttaaaaagaaaataacttttatatttagagtacatagggcatgatgtggatttattagtctggtagataaaatgaaaaaccactcaggtaagaacactcactcatggcagtttttaagcatgaaaattgttttctgaaagtatcatcacttttcctttttaaagaaggctgctaattggattttggtagttcttacctcaagaaaacttgaattatttgggggaaagtaggctcaaaagagaatatatctttcacattcacattcagaacccagcaacctggagtccaattttcagtattttaactacctcaataatgctatgaatgtaagatattgggatagagatcccaacttgaaacaacagccagtgcctgtggtaacttaatgtcttg

SEQ ID NO: 12296 - DNA, 891 bp, Homo sapiens
ggtttaccacaatcatatattttggactctgcctcatgagtactgtgcaatgcctcaggttgcacctgaccttatatgctgaactacagaaggcacatttaattttattcaagggtgatttgaattacaggaagttgacaggtgacagaaaatgggagttttctgttccatttcatcaggctctgaatggcttccatcctgcaccactctgtaccataagaacattaaaagctgaaattcaggttggtctgcagcctgggcaaggggaacagctcctggcctctgagcccagctggtggaccactggaaaatatggaatatttcagtacgatggtcccctttgacttgatttaggagctctcagttgcatagaaagatctggtgagcaccttttcatccccagaaaaggagcacgtgaattgagtcgcctggcggctctgtacgcgctcagggaagcttagcttcttggtgcccatctacgtgcactggatgatttttcttttgaacattttgccccactacactgttttgggggatagctgggttaagcaagttaaagatatttacatttatattggaattttagccactttttttcaggttaaatatataatttcaagtgcttttaatgaacttatttttaattggctagggagcaaaaaataagtgagttctgcttttagttagttaaccttgttcttttcttaaatagtacactgcatggtatgtaatattccaggaagcatgggattttattttgcttgattttgggcacatgaaataatagctctaggaaaatgcgcatcttaatgactctttgtaaagagaggcatttcttacaactgtgatgtttgcttacataaaagttacctcataagttaattctaactt

SEQ ID NO: 12297 - DNA, 312 bp, Homo sapiens
cggacgcgtgggcggacgcgtgggggtaaaagtaacatgttatttttctgtcaagccctttttgtacttgccgtttattacatattttagatttattttttattttcgaaacatccaaaaaggaatgctaattagtgaaatggaagaatttccatttcaacaccttaggaaaaaaaaaactgacttgacatacctaagaaaaggccaagttgatttacttaggcagtctcttcatttgtgatacgtaaagtacgttgttacctagataaaagtaggtttgatttcttggaagcaatcacttaagcttccatt

SEQ ID NO: 12298 - DNA, 638 bp, Homo sapiens
gaattaggtataattgagatggcaataaatatgcccgtattagaaagaggaaacaaagctacatccggcttatgattttgttgagtcacttctcccgaggcagcctttccaatgcctggtcccttcccctgagagcaggtggactgctggtggtggctttctttcctgcagagaggcactttagacccatacctgctgtgagctgaattgatgttctcatcctgtgaaccttctcccactttaacctaatttatctttacttgtttaaagataaggaaacccaagatgtactttatttgcaaactcaaagcaaatggcgaggccacctgtgacccagtaaccagaaaagaaaccatgccatttgtgtaagtagagacacttcttgttgaggtaggcaaggctcttgtgagcgatttttttcccctagtgagacctaacaaaagacaagctatatcatttctgcctgaaattatctgcttgaaaagatcaaaatatcaggatacttagctcttcacaaatatgaagtcattatcacatttcactgagccagaaatcactgttaacagacacacaaaggactcactgggtgggacaggaaaggggaaacccgggtcttccagaatcacagggttggcccc

SEQ ID NO: 12299 - DNA, 405 bp, Homo sapiens
tgctatccttcaacaagtgtttgtggtggattatgttgttcagtcccaaatgtgtggagattgccatagagtagaagctaaggatttctggaaggctgtgattcaagtgaggcaaaagactttgcataaaaaaactttctactatctggaacagttaattctgaaatatggaatgcatcagaatacacttcgtatcaaagagattcatgatggtctggatttttattattcctcaaaacaacatgctcagaagatggtcgaatttcttcagtgtacagttccctgtagatacaaagcatcacaaagactgatctctcaagatatccatagtaacacatacaattacaaaagcactttttctgtggaaattgttccaatatgcaaggataatgttgctgtctgtct

SEQ ID NO: 12300 - DNA, 292 bp, Homo sapiens
  misc_feature (1)...(292): n = a,t,c or g
agaggatgagaggctgccccatggctggaggcagcgtccgtntgtgcagtcaccatcatcaacccccattcggccccttccccagatgcgctggtgacaggggcttcttggatgtcaaatcatgttgtaggagggtgcagactgcgggcttctgtggggagcagtactactgtgtctgtcggcagtggccatgggaccctcagcccgtcctgtacatggagcagggtgcacagtcaccctccatcctgtggcgagaggctggcccggcccggccaggcgaggcagaaggttt

SEQ ID NO: 12301 - DNA, 389 bp, Homo sapiens
  misc_feature (1)...(389): n = a,t,c or g
gagcagtgttgcctcagtgaagaagaaattgaacagattgtacagcagtctgatgcgttttcaggagcagacatgacacagctttgcagggaggcttctcttggtcctatttcggcagtttacaaactgctgacattgctaccataacaccggatcaagttcgacccatagcttacattgattttgaaaatgcttttagaactgtgcgacctagtgtttctccaaaagatttagagctttatgaaaactggaacaaaactttaggttgtggaaagtaagtgggatacttggaatcaaggcatctctgtattncagtcttctttattttttagcatanaaagtngnggtgtgntaatagntttttaanantntnttntanntnntgactt

SEQ ID NO: 12302 - DNA, 825 bp, Homo sapiens
gccaaagggttataggggtacacttaggggttgcatgcaagctgttaccaaaaaatttttaagtattttcttaatttgaataataaaaccagaggaaatgcatacagggcatgagcaactgaggcaaacctttgtggacatgaattgttctacgatgaatttttgctttagtattttaataagaattacaaagacaatggcatacttggggtgagagggagctgaggatgtctgaggagggaatagtattgcagggaagactgagaaaacagtaggatgacagttttgagtatactctgcacttttcaattgtgcaatcttcttgtgcactttaaggctttttaattttgtttgagaatgcaaatgtatactgtaagtctacctttactatctactatgcctacttcaccatctcttaaggactcggcatttgtccacagtcagactgcaagagagggtaggtcatgaacagtcacccgtgctggctgtagcccccacagaggcaatcatgcccaatagattcaagagaagctaagcggaaatggagggtggaaggtgtgatctgtgggactgtctgggcctgttactcatcctgctatcaatttcttattaattaatcttgatgattcttattaattaatcacatttgcaggaaattcagatgaggcaagaaaattttattggcctgggtaagactgaaagcattccaaattaggcttagactgtgcaaagggcttagctaagttatcgagcttaaaacccgtcaattaaacaaacattatttgaacagttactgcatgccacgcactgtgttgggcttagtaa

SEQ ID NO: 12303 - DNA, 741 bp, Homo sapiens
accagtgtcctctaggaaggctgttagcatatggctctactgagcaggcagtgccatctggtgcctgagatcatgtgcttcaggcagttgtcacactgcatctacagccaagcatcacagaaacacttcactcatgtggtcagggaaggtgggactgattcacatgttagagacaggtcagatgggaaaattaaggcccaacttggtgttggggaataaccatactctggtctttcaagtgtagtagctgatgattcccaagaaactgatgaattttctgagtccagacaaaatttccccaagcctgctctctctgttggatatacataatagagaaagtcaaatcagccctttggggtttgtggtaaaaattcactcacccattgaagcctaaggtggctttgtaccttccagatctctcagcaaatcccctgggccctggggcagaaatgtcacctgcttgccatgtctttgaggggttcaggtcagcctggagaacaggctccttaggtcaaaaaccttgttttaagagccactgtggtacagtcaatgtaacccacttgtgcagaagccatgcttcccaaggaaggtctcaggttgacaactagacatcaaatctgagaagccaactgtggagtaatgtgtttttttctctgtggacaagagtgatcagaaaggtgcttgatcttgaacaattgatccatgatgaaaaaatgaccattagctctcccccagaagcgt

SEQ ID NO: 12304 - DNA, 496 bp, Homo sapiens
ggaaccaattgaagaaagaggagaaaagtcttagagtgtggaaaaggcaaccaggttggccgtaaggtgcctgctggaatgcgtgtgcctccacacgggtctgggcatccggactgataaccagccggccagactgagggatggaaggcactgagatgggggcccgtccaggcggacacccgcagaaatggagctttctgtggtctcttgcactctggctgcctcttgccctctctgtgtctctctttcttggtctctccctctctcctcctcagcctggtctttctctttggtgcacacttagttattgttgtgagcaatggaagttcaaaggaactccctctccagctcttctgaatcttgggacacagcctaaaaaggacaaaaagttagaagacagcatagcaactcagctcagggagctaccagagaaaaatagcaactgatgtgggtgcttttttttttttttaatttgaataaaaagaattagaagtga

SEQ ID NO: 12305 - DNA, 339 bp, Homo sapiens
ttggcaccagctgtcattcatgctttggaaaagtttactgtatatacattagacattcctgttctttttggagttagtactacatcccctgaagacacatgtgcccaggtgattcgtgaagctaagagaacagcaccaagtatagtgtatgttcctcatatccacgtgtggtgggaaatagttggaccgacacttaaagccacatttaccacattattacagaatattccttcatttgctccagttttactacttgcaacttctgacaaaccccattccgctttgccagaagaggtgcaagaattgtttatccgtgattatggagagatttttaatgtc

SEQ ID NO: 12306 - DNA, 311 bp, Homo sapiens
agtcatttacatatttttgtcttgttgatcattacctgtaaatgaaagaccttaataggaaaaaaagagtaaagctcagtgtgaatgcaaacatccacaaaatatgatcttcgtttatattctgtgatgttgtttataaatgaatgcctcagttctctgctacccttttcacagctttgtactgtttgccttatattctatttgtgcttttaaagtgtgtctgttgggaaaacaaaatgtgtaggtggtttgtaagtgaataatttttatttcttcttgtattaaaattttgtttttttctctaaaaaaaa

SEQ ID NO: 12307 - DNA, 442 bp, Homo sapiens
aaagaggatccctcattgaaggatgttgaagatactatggtggagaccattgctctttgccagagaaattcacataatttgaaccagcagcaacgtgaggccctttggtttccgttattggaggcaatgatggcccctcagaagctgtccagttcagccattcctcatctacactctgaagctctgaagtctttgaccatgcaagttttaaatagcatggcagcatttattgcccttccatcaatcttgcaaagaatcttacaggatccagtttatggaaaaggaaaacttggagaaatccagggacttatcttgggaatgttagatacctttaactatgaacaaaccctgctggaaacaacaaccagccttctaaaccaagatctccattggtcattgtgtaacctgagagcttcggtcaccagaggactgaatcccaaac

SEQ ID NO: 12308 - DNA, 1289 bp, Homo sapiens
ttggttgatttttttgccttcccttcaattttaaactgaagcattttaatgtgggtagaaactctacaccaaatacactaaacattttggtgcttagtggatttctttttaggtaactggtacttacttccaaagactgaatacaagccacactccatcatatcccttaaacttcatgaaaaaccattcaagatccccttgctgcaacactgttctcttcttctctactaaattctatttccaaaattggtaatagagccagaaggatccccagtacccagccctctgcctggcacaaagtggtagcacaattaaattcagtatgggtggagcatggtacagtcttggtgccatagaaggagtagttgcatagtcacacatcatttgataagttggatgttccattacatagaggaacacaaaattccagggtttttggaggaagggattagatagtgactaagccgccagaattgaggtggccattcctttttgtataggctaagaaacaggttatcagtgaaaagttaattatggctttggcactagaatagcactgttgcaaagtatttaagcaccccccatctcagccctttattttatctttcatgtgggctaatgtgaggataatcttacagatattataggaatttcttttctatctttatgaaaacaacgtatataaaatatatctagaaaacctttgtttgagactcttatttaatgggcttttgattctaatgataattgtacctttatctttcaaaagctgatatttcctacctaagcatctcccgagaaaaatatctcattaaaaagcccataaataataggggagaagaaagccttaggtatcaattccaaaacagtgattgaaatttcccaaaataattatggcttctgtcatctccagagataatctggcttggtttaccccataatctaatttcagaaaagaaagctttattttaacactcatctgaatcaacattaaagccttttctctcaaagcgtttattgagaaactcaaatgaatatactttttgaattactgtcatcaaaagtgtacggcttcctgtgctgcttgtgtcaaatggaacctgccctctaaagcactttctttcctttacttgcgtggtttcatgtaagctgtgctgtttagaaacaacatctcagactttacaaagaaatgacaaagaagggccattgcactttttaagggatatcgacaagcagtttctgttttctaaaggacaaaatacagagtgtgtgtcatttttaattagatt

SEQ ID NO: 12309 - DNA, 416 bp, Homo sapiens
taaaggttttagaaatactacatagggtaaatgagaaaatgggacagattatacagtatgataaattttatatacatgaagtacaagaattgatagacataagtaaatgattatatcaactgggtccaacagcaggcctatggaatgttggcagatatccctgttacaatctgtacatatccatttgtatttgatgcccaagcaaaaactactctgttacagaccgatgcagtctttacagatgcagatggctattgatcaggcccacaggcagaatgtctcctctctttttctcccagtgattgaatctgtgaatccctgcttaattctagtggtgcgtagagaaaatattgtaggagatgcaatggaagtccttaggaaaacaaagaacatagattacaagaagccactcaagg

SEQ ID NO: 12310 - DNA, 411 bp, Homo sapiens
ctcccatctattttaagaaagccataatggaatctgatgaagagtggtccatgaacaagaagttgatagatctctcttcaaaagatatcagaaagtctgtacccagaggttaccttacttctctgtggattttggccttcacggagggtttgcccatgtcattgaagatcagcacaaattccctcattactttggaaaggaaatcataggtgggatgctggatatagaaccaagactttggaggaaaggcatccgagaaagctttgaggatcagaggaaaaaaagcactgcagtttgctcagtggtggaaaccatatgacttcaccaaaagtaaaaactattgaggtgtaccttccattttaaaatttttcttgagatcccgttcagttttatttccattgcatctaatga

SEQ ID NO: 12311 - DNA, 761 bp, Homo sapiens
gcaagataaaaattacatcataccgtctattttgcccatagtgccatttagagatgaaaaccagctttaactttgcaaagtgaacatgtacatggtctgctctcatttattcattcttctctcaaaagtcaaatgaatgcagagggagcttggtcaaactgcttttgtttcaactgcaggcaggggagcaaaaggacgccatgtgagcattaggaaaaaaaatactcactcttactaacaatttttatacagaaaatgagtcattttggaaatgattcttatgttttttttttttctccttttagaaaattctccaaaaggttttgatgttgaatcttggtcttggacctgttttttcctttgagggttttttgttttttgttttttctaggatttcattgtgatgttttggttttgttttttgctttttgtttaagttgtgctgacaccaaacacatccagtttataatcagtacattggaaagctggtattgatgtagaaccagtgcataactttttatggggttttgttattggtttttttttgtaaagtgtgaataaaaggtatgtttactcatttttcctgaacactgtgttggtaatgtgcatcatgacaatttccagtgaaggtgagctggagctggttggactaatgagactgaggaagcagcttttcctacgatctgcattatgtaatcacaggtccagagagctttatggaagcgggagaggaggagcacttactcatgttgtatttgtaa

SEQ ID NO: 12312 - DNA, 596 bp, Homo sapiens
gtaattggtgagagtgacatcatgcaggaattcctatcagaatccgatgagaactacaatggtgtgtccgacgtagagctgagagtagcattaccagatggaacaacggttacagtcagggttaaaaagaacagtactacagaccaagtatatcaggctatcgcagcaaaggttggcatggacagtacgacagtgaattactttgccttatttgaagtgatcagtcactcctttgtacgtaaattggcacctaatgagtttcctcacaaactctacattcagaattatacatcagctgtgccaggcacctgcttgaccattcgaaagtggctttttacaacagaagaagaaattctcttaaatgacaatgaccttgctgttacctacttctttcatcaggcagtcgatgatgtgaagaaaggttacatcaaagcagaagaaaagtcctatcaattacagaagctatacgaacaaagaaaaatggtcatgtacctcaacatgctaaggacttgtgagggctacaatgaaatcatctttccccactgtgcctgtgactccaggaggaaggggcacgttatcacagccatcagcatcaa

SEQ ID NO: 12313 - DNA, 1574 bp, Homo sapiens
cctacatgtacaaaaacatttacaagaaattctaacctccgggcacactgtcagttggtgcatcattttacaactgaagaaatggtaaagttaaaaattaaaaggccttatggaagaaaatctcagagtgaaaatgtgccggcctcacgaagtacacaagtgaaaaaacagctagctatgacagaggaaaataaaaaggaatctcagcctgctttagaattgagagcagagacccaaaatacccacagtaatgtagcagtgatcccagaaaaacaacttgtagaaaaaaaaagtcctgacaaaacagaaagttctttacaagtgattacagttacttcagaacaatgtaatacaaatgcactcacaaacacacaaaccaaaggacggaagattaggaggcataaaaaagaaaaggaggagaaaaaacgaaagaagccagtttcccaatcccttgagtttccaacaagatacagtccttacagaccttatcgatgtgttcaccagggatgctttgctgcctttacgatacagcaaaatttgattctccattaccaggctgtacacaaatcagatctacctgcattttcagcagaggtcgaagaggaaagtgaagctggtaaagaaagtgaagaaactgaaactaaacaaactttgaaagaatttcgatgtcaggtaagtgactgttctcgaattttccaagcaattactggcctaatactacactacatgaaactacatgaaatgactcctgaagaaattggaaagtatgactgcttcagtggatgttgggaagtttcccatgtgacccagttagagtgtaaatcttcatttacttacatatttgaacttatgttgttcatcttagaggcagaccacgggattggactaagggcaagtaaaacagaagaagatggtgtatacaaatgtgattgtgaaggctgtgaccgtatatatgcaacccggtcgaatctcctccgacacatttttaataagcataatgacaaacataaggctcatttgattcgtccaagaagattaacaccaggccaggaaaatatgtcaagcaaggcaaaccaagaaaaatcaaagtctaaacatcgggggacgaagcacagcagatgtggaaaggaaggaataaaaatgcccaagaccaaacgaaagaaaaaaaataatttagaaaacaagaatgcaaagattgtgcagattgaagaaaataagcccttattctctgaaacgtgggaagcatgtatattctataaaggctagaaatgatgccctgtctgagtgtacaagcagatttgtaacccagtatccatgtatgataaagggatgtacttcagttgttacaagtgaaagcaatataattagacattataagtgccataaattatctaaggcatttacatcacaacaccgaaatcttcttattgtattcaaacggtgttgcaactcacaagtaaaggaaacgtctgagcaagaaggtgctaagaatgatgtgaaagattctgacacgtgtgtatcagagagcaatgataattcaagaacaacagctacagtttcacaaaaggaagttg

SEQ ID NO: 12314 - DNA, 426 bp, Homo sapiens
aactaattgagaaactgattattgatgagaagaagtattacttatttgggagaaaccctgatttgtgtgactttaccattgaccaccagtcttgctctcgggtccatgctgcacttgtctaccacaagcatctgaagagagttttcctgatagatctcaacagtacacacggcactttcttgggtcacattcggttggaacctcacaagcctcagcaaattcccatcgattccacggtctcatttggcgcatccacaagggcatacactctgcgcgagaagcctcagacattgccatcggctgtgaaaggagatgagaagatgggtggagaggatgatgaactcaagggcttactggggcttccagaggaggaaactgagcttgataacctgacagagttcaacactgccacaacaagcggatttc

SEQ ID NO: 12315 - DNA, 494 bp, Homo sapiens
  misc_feature (1)...(494): n = a,t,c or g
gtggctctttgtctaggacccagatcatccccagagagagcccccacaagctcctcaggaaacaggattgctgatgtctgggaacctgatcaccagcttctctggaggccgtaaagatggatttctaaacccactgggtggcaaggcaggaccttcctaatccttgcaacaacattgggcccattttctttccttcacaccgatggaagagaccattaggacatatatttagcctagcgttttcctgttctagaaatagaggctcccaaagtagggaaggcagctgggggagggttcagggcagcaatgctgagttcaagaaaagtacttcaggctgggcacagtnnnnnnnnnnnnnnnnnnnnnnnnnnnnnnnnnnnnnnnnnnnnnnnnnnnnnnnnnnnnnnnnnnnnnnnnnnnnnnnnnnnnnnnnnnnnnnnnnnnnnnctacgcccaccctccccccggcaaaaaaaaaagctgggtatggtgct

SEQ ID NO: 12316 - DNA, 463 bp, Homo sapiens
ctgccccagagaatcagaagttcatcttgcaggaggatggatctttatttcacgaacagtccaagaaatgtgtccaggctgcgaggaaggagtcgagtgacagtttcgttccactcttacgagactgcaccaactcggatcatcagaaatggttcttcaaagagcgcatgttatgaagcctcgtgtatcaaggagcccatcgaaggagactgtggagccaggactctgcccaacaaagacttagctaagcagtgaccagaacccaccaaaaactaggctgcattgctttgaagaggcaatcattttgccatttgtgaaagttgtgttggatttagtaaaaatgtgaataagctttgtacttattttgagaactttttaaatgttccaaaataccctattttcaaagggtaatcgtaagatgttaacccttggtatttagaaaattaaaaccttataatatttt

SEQ ID NO: 12317 - DNA, 422 bp, Homo sapiens
actccggtaagtacctagcccacatgatttgactcagagattctcttttgtccacagacagtcatctcaggagcagaaagaaaagagctcccaaatgctatatctattcaggggctctcaagaacaatggaatatcatcctgatttagaaaatttggatgaagatggatatactcaattacacttcgactctcaaagcaataccaggatagctgttgtttcagagaaaggatcgtgtgctgcatctcctccttggcgcctcattgctgtaattttgggaatcctatgcttggtaatactggtgatagctgtggtcctgggtaccatgggggttctttccagcccttgtcctcctaattggattatatatgagaagagctgttatctattcagcatgtcactaaatcctgggatggaagtaaa

SEQ ID NO: 12318 - DNA, 1824 bp, Homo sapiens
ggaaggggacgatgagtttgacgatgaggccccggaggagctcgactttcggccagcgcccaggcggaacgacgagaagaggagcggcgagtgcgggagaccgtgcgcagggataaaacgctcctgaaggagaagaggaagcgacgcacggctcgtgttcatcgaacagaagaaaagaaaactccttccagacactattttcggagaagttaaccacagcttcacagactaacatcaagaaatccgccaggaaaggtgaaagaagttaatttgcaaaagaaaaatgaagacttgtgaaaaaggaaatgactccaagaaagttaaagtacaaaaagtacagtctgtcagccagaataaaagctagcttggccgtactttaaaaaagaccaagatcttgagagattcaagggcaacaagcagcacaagccttcatacataattcattatatgggccaggaaccaacaggactactgtaaataagttcctgtctcttgccaacaagaggttaccagtgaaaagagctgctgtccagtttttgaataatgcttggggaatccaaaaaaaaacaaaatgccaagaggtttaaaagacggtggatggtcagaaagatgaaaactaagaagtaaatcaatgctaaatgaagaatctgtactttgtatgtatagaatttatctaataaatcattcatagatcattttaaaggatcattataaaaatcataaacctatttgaggaagtgctcaaccacatttcattcttctggagtagaactgtggccttgcaatcctcgaggaaaaagtggtttaagaaggaattgttttctttttaatatatttaactgaattcaagccatacccacatcagcaacagcacctcttctactctccccgggttagaggggtggcaaaaatggcacggactaaaaggagaaatggatattccagcaaagtctctaactgcagcctgtagacaatttgctattaaagattcagtgcacaaaatatagctaacagcttttaaatttttacttttaaccagtctggggatttgcttgcctggtgagtctcatatgccatattatgaatatgaaaataatgaagttaatttcctgttgcctttctgtgtcagccacaatatcaggtctaaccctaatccagggatgccagtaaactgaaggcaattttaggttgtagaactcagattaattgtagaaaccattaattttaattgctctaattttcatagtaatcataaaaagtatgcaagtacctaatatataaactcaattgacactgtatctgtagaagtaaatttttaatggctggttaattatatcactacattttattgcaatatagtactcatttaagcacttaaaaatggaaggtgtacaaagattaaattaagacacggtaaattgactaaatatttggtttttatataaataaaggtcataaccacaccgttgacatgtaatactgttataatacaacagttaaacttgtgagtctacaacagaagtcatctgtagttaaacaggaaacaaagttgaaaaagaccatgttaaaacaaaactactgggactaacaggtcgggattgtaagtagcaacaaacatattcactcagctcctgagtatttcaagttttacagtacacattaaaaatgatttcttccatcaacactataaattcaaactgtcggatgtttatgcattttgcaagttacactgattgaatgcttatatgggagtgggggtcggaacatctcccaatttgaagtttacatcacccacatgctaacacaaacacaaccttgttccat

SEQ ID NO: 12319 - DNA, 161 bp, Homo sapiens
ggacagttttctgtattgtactcagtaaggtctgacatattttgcatgtttgaccactccttcatttttaaaatagtttttttattgccttcaagtgaaacatgctcttggttttcctcctatctcatttgctgttctggtcatatttctggtttgctggg

SEQ ID NO: 12320 - DNA, 685 bp, Homo sapiens
gctgccggtgtcgtctttgcttcagccgcagtcgccactggctgcctgaggtgctcttacagcctgttccaagtgtggcttaatccgtctccaccaccagatctttctccgtggattcctctgctaagaccgctgccatgccagtgacggtaacccgcaccaccatcacaaccaccacgacgtcatcttcgggcctggggtcccccatgatcgtggggtcccctctgggccctgacacagcccctgggtctccttcgcctgctgcagctgggtgtctacctgcgtggccttctcgctggtggctagcgtgggcgcctggacggggtccatgggcaactggtccatgttcacctggtgcttctgcttctccgtgaccctgatcatcctcatcgtggagctgtgcggggctccaggcccttttcccccctggtcttggcgcaacttccccatcaccttcgcctgctatgcggccctcttctgcctctcggcctccatcatctaccccaccacctatgtccagttcctgtcccacggccgtttcgcgggaccacgccatcgccgccaccttcttctcctgcatcgcgtgtggttgttaacgccaccgaagtggcctggacccgggcccggcccggcgagatcactggctatatggccaccgtacccgggctgctgaaggtgctggaga

SEQ ID NO: 12321 - DNA, 366 bp, Homo sapiens
ctgacatcaattttaccctgaggtcactgctagagacgctgatccataaagacaatcactgccaacccctctttcgtctactgcaagagccaagttccaaaataaagcataaaaaggttttttaaaaggaaatgtaaaagcacatgagaatgctagcaggctgtggggcagctgagcagcttttctccccccatatctgcgtgcacttcccagagcatcttgcatccaaacctgtaacctttcggcaaggacggtaacttggctgcatttgcctgtcatgtgcaactgggagccagcaaccagcacatccatcagcaccccagtggaggagttcatggaagagttccctctttgtttctgcttcat

SEQ ID NO: 12322 - DNA, 1115 bp, Homo sapiens
agacgcgtaaaacgcaggcaaacctgaggtcctcagaatggcgggcacaggtttggtggctggagaggttgtggtggatgcgctgccgtattttgatcaaggttatgaagcccctggtgtgcgggaagcggctgcagcgctggtggaggaggaaactcgcagataccgacctactaagaactacctgagctacctgacagccccggattattctgcctttgaaactgacataatgagaaatgaatttgaaagactggctgctcgacaaccaattgaattgctcagtatgaaacgatatgagcttccagccccctcctctggtcaaaaaaatgacattactgcatggcaagaatgtgtaaacaattctatggcccagttagagcatcaagcagttagaattgagaatctggaactaatgtcacagcatggatgtaatgcctggaaagtatacaatgaaaatctagttcatatgattgaacacgcacagaaggaacttcagaagttaagaaaacatattcaagatttaaactgggcagagaaagaacatgcaactcacagctggatctaaattgagagaaatggagtcaaattggggtatccctggtcagtaaggattatggaggttgaacggactattgttcagctagaaaatgaaatctatcaaattaagcagcaacatggagaggcaaacaaagaaaacatccggcaagacttctgaaaagacaatttagcaggtagaagaaaagttgggctttcacaaaaggcatctgaacttttaatgaactttgaaggacaacagcatcttcccaaaaccattgatgtttaagtgtttagaaatcatagaaggtgtaggctgctgtggtaattctatttgtatatctcaacagaattaaaatgtctagcttggtggtatttttatagccataaaagaaaatctttaggctttcaaaataaggatgactttagaataatattgtgtcatagaattaattttcagccatgtggaccatattttgtatccaaggatccttatttaaagctttcaacatgtacaggaagttggaaatttttggtttatgactttgtctaataaagagatagttctaaacacaaaa

SEQ ID NO: 12323 - DNA, 422 bp, Homo sapiens
gtgctggatctggacgaggacgaggacgacctggaggtgttcagcaaggatgcctcattgatggacatgaactccttcagccctatgatgccaacatcccctttatcaatgataaaccaaatcaagtttgaggatgaaccagatttaaaggatctcttcatcacagttgatgaacctgaaagtcatgttactacaatagaaactttcattacgtataggattattactaagacatctcgtggggaatttgactccagtgaatttgaagttaggagacgatatcaagatttcctttggttgaagggaaaactggaagaagcacaccccactctgattattccaccattgccagaaaagtttatcgtcaaaggcatggtggaacgtttcaatgatgacttcattgagacccgcaggaaggcgct

SEQ ID NO: 12324 - DNA, 160 bp, Homo sapiens
gactccatctcaaaaacaaaaacctgggtatgtatctagaagtggaaaaacaaaaaaaaggaaataagttatgaaaataaaaaccatgtcttgagctgggtgcgctggtgtgtgcctatatccctagattctcaagagttgagacaggaggatcacttga

SEQ ID NO: 12325 - DNA, 428 bp, Homo sapiens
gggtgtctgccatctctgtggcctctggagagtgacgtctccctgctgggagtgctggttctcacgtgcggtttcccttgtgtatcggagctctttctcggctttctatttcccccagttctttaagcagtcaattggcacagagtttcccacgggggctgcagtggattcactgtgtcagggatgagcctggcttgggggttggtggggctctgaagcgcatttggggttctttgtagcttctaatgtgaggtttgagtccagtgcgcccacagcagcatgcccttctcaccccttgcagtgttgcaggctcaggcccctgggctccttcagcaagcaggctagtcaatgaggcatgaggatccggcacagggcatcccctggggcttcaagggcaatacccccgtgcttagggtttgccctgtgcc

SEQ ID NO: 12326 - DNA, 318 bp, Homo sapiens
cccgggctccccactgcagtcggccttgcctcctcctcctcctctacctccagtcaggctggacgggagggtagccttgtggctgagaggggtcagactaggtggcacaggggctcctggaaagacagcaggcttcctgctggggcgttcccttgttggagggaatagagtgggggtgggactctgcaggggtgtccttgtccactcgcacccctcgccgcccaccagggccatggctctgtgacttgggctgatccccaccctttctggggcctaacagcaccacaggccgctgttacccccttaggagcttgccct

SEQ ID NO: 12327 - DNA, 107 bp, Homo sapiens
aagatttttttttcccacacagttttgcatttaagtaccagaatacccaaacatttttcattagtcttcatcaacactcccgtttgtgttctcagtcaaattaaaaa

SEQ ID NO: 12328 - DNA, 468 bp, Homo sapiens
gacaaacatggctaaaaacaaaacatcaaatcctgcccccgtgaagagttccctgtcacctcaagtttgaggatagtcctctaagagtgacctaagcataagtgaaagacatctcccctcacccttctagccccctacaaggtgccaggttggggtaaagagttggagatgatggccaggagtggctccaacacgctggtgagaggcctgattaggttttggggaagatctgagagctctggcctcttcgtgagtggaacataaagccgcctcttgttgggagatcctaccccagtgacagaggaatcccccaaactaggctgtgcctggctccgtggcggctccagacccgggtagtgcctttgtcccctgaatactcactcccccggtccagagggccttcccactgcccagcctggagaaggctcccctgacctgctctctcagtatcctggagagctggccaga

SEQ ID NO: 12329 - DNA, 542 bp, Homo sapiens
ttttaaaaagatgagtaaagagaatgtttatgaagtggctcctacataatgtcccagccctgggagtcacgaacagactccatggttttcattggcccctcttcttcggtatcagaatccctggtttaaggcaaggatgagagaagaacacgaggacgcaatgaaccagattcaagctgaggctgtgtggcatggcagaaggctgaactattcttgtgtagccctagggatagtccaagagccctctagtcttctctgaggcaatgagattcaagggcagctgtgatccttgcccttgaacggaaaccagccgtggccaaatctgtcctcacagatccatgtctccctggggcagtggcagagcagaggatagttccttattactctttgctcaaagggagatgtctcctgtccttgcctgcatttcgtcgcctctttcgactcaagaagttctccaatttcttgctgcgtttcagctccttgaacttctcagctagtgccaactggcgctgctcagatttcttcaggaagtatggccgatg

SEQ ID NO: 12330 - DNA, 941 bp, Homo sapiens
  misc_feature (1)...(941): n = a,t,c or g
cagatggccaggcttgcctctagattggctgggccagaatttctggggtcagtctgaaaagtctgcattcttagcccgggattcagatgatcattaggtttgggaatcttaaatagagtctcccttctctcttttcactgttagggagggagagggagtgatgtttttgatgctctgttactttagctgaaggattttctatcaatcttcacaatctgtcttgaaatggttcccatcagccacttcgtgcaggaatccaaggggctaagaaacatacacacacacatacacacacacgggcacacacacaggcccactgtgcccagagacccacacgcgcagcaggctgccaggaaaccaggactcagggcccacaccacaatctggaaggaacatcaagtccccagggtntagccacggcggctcttggcccatggtctggtggccaaggaggcatcagctgctggtcacaggtggcgggccgcttcccagaggatctgcagagccatggaggcgcaggggagctgggccagggtgtaggtcacggagcggatgggtgccccgcagcttccccaggtaggccacggtgtgtgccnacacggcccacgaggaagaccaggaagtgcatccaggcgacaaaagggttaggaccccagaaaggagtagacgaagcccaggaaaaggaaggggtagatggtctccatgtcgttccggtgggccctgaggcagcgttccacgtcggggtcgctcctgcaatactgggggcctcctccgtgtctcagggcatcctcggggttggcaaaggccttcttccgcagcctcacttggcccgtgatgatggccaccacgtacatcttgatgaccagcagcgtgctgcagagcaggaaggccgggagggccgggctgctcatcaccaggctgtgggcaggcatctctggcca

SEQ ID NO: 12331 - DNA, 1760 bp, Homo sapiens
ctttattttagtttttgtacataaagaaaaatcatgttcatatccatcatgaacaaaaacttaaaaaggcagaactagaagacacgtgtccttcaccaaagcaaatctgtgctaaaggttccaaacatttcaatttttaaaataaatattttcattttccgatgtctactttcatgtcttcagagtgtcacaggaaatcgaagcctatcatgaattacaatttttttttagagtcccggctcactgtgtttggtaacttgccataccatatccggcttggttaggaggaggtattacagggggaggagcttgtccttggggaggctgagcaccaaatccacccatccaagcagcagaaggtgattgatctactccaaatccttgttgattccatggttgcccgtatactccataaggcggtacttgccacccatttgccatatactgtccatactgttgtgggtttccatacacttggctccattggccccattgactatagtcaacctaggaaaaagcaaagtattgttttagggaacacataagaaacaccgtatatgaagaaagagtgggagacaaggaagagaaaaactaagtaagcacccttatgtgaataggactctgttatttatcattgtctaagtttattggggtggtgacacctgtgaaaagaaagtattaagattcagttaataccgcaaataatcaattttgaaatacaatcaactgaaagtagctatatgctttattttattgttcattttacagagtttccaaagcttttatgtgacatgtaagatggaaaccttaaagaatgctatgaaaaatcgaattacctgttggaagtttttagtcatatcaggagattctttaccccaatagcatttaaccacatgtccttcaatcgtagtaccgttcaccgaaacaatgggcatgggctgcactttcatgggttgaaaatctgacaaatgaatagcccttttctgggaaaactcttatttccataatttgtccaaatggtgagaatgtctgtctcataagctgatctgttaacccagacgcaattcctccacagtacacagtacaattttttggacttgactggtttactacatcttcaaatctcaactgcttagtgttgttttcttgtgtacttttaggtgcaggtggtttacgagtggcccaattggttcggatttgacgaccacccaaccactgaccgcccatatgcacaatcgcattttctgcatccagtttgttataaaaagatacaaaaccatagcctttggattttccagttgccatgtctttaactacccgggcatccgatattttaccaaagggggcaaatgctgatttgatatcttctgttgtaatttctggactcaaatccccaacaaacacatggaagtgattggaagtatcttttttctggctacttggtgtggttgcccagtttactttgacctcctttcccaaaatttttctcccattcatagcagctaatgcagcagctgcatctctgtgttcataaaattccacaaagcaatatgggtcattgcttgtatgctgcaaaacagaaaatccaacagaagagttgacccttctgctatcgggttgctctgttatcattttacagcttttacagggtccaatctgactgaacaactgaagtataaggacttctgtcacatctctggaaaggttacctacgtatagagtccggggctgcccgtcgtcttccatcatggtgggtgcga

SEQ ID NO: 12332 - DNA, 369 bp, Homo sapiens
gacaaggacaggaggctgggaaattctgggcagaagagagcgagtcctggtaaaggccccaccctcaagcctggaactacagcccaaagtgagaacatgcattcctgttttcctgctcaaatgttgccttttccaaaaccacccatggcccactctgccccctatcctgtgccatcccaggctttgccagcagagcaggcgaggagaagatgaaaagcagctggacattggaaactggtttggggctggagagaagaagtccaggccactggacttcaggaaaagatcatcttcctgctctatcccttttccagctccccttgcggctgagagccactttcataggcaataaagtccttcacattcaaa

SEQ ID NO: 12333 - DNA, 712 bp, Homo sapiens
  misc_feature (1)...(712): n = a,t,c or g
ccccggctcaagcggggtggagaacacggagctcgtcaagtcacccagtgagtacctgatgatgcttgtgccacccagccaggaggaggagtaagacaagcctgtggcccccagcaacgtgctgtcgatggcccagctgcgcacgctgcccctggccgatcagatcaagatcctgatgaagaatgtgaaggtcatgccttttgccaacttgatgagcctcctgggcccctccatcgattccgtggctgttctgcggggcatccagaaggtggcgatgttggtccaagggaactgggtggtgaagagtgacatcctataccccaaggactcgtccagccctcacagcggcgtgcctgctgaggtgctctgcaggggccgaaacttcgttatgtggaagttcacgcaaagccgctgggtggttaggaaagaggtggcaaccgtgaccaaactctgcgccgaggatgtgaaggacttcctggagcacatggccgtggtgaggatcaacaaaggctgggagttcattctgccttatgatggggagttcatcaagaagcacccggatgtggtccagcggcagcacatgctgtggacgggtatccangccaaactggaaaaatctataatcttgtaaaggaaaccatgccaaaaanccgatgcacatcagggctgccggctggtctgtgggacacgatccattaccaaaccaggccac

SEQ ID NO: 12334 - DNA, 583 bp, Homo sapiens
ctcagccagaagaggtaatgtaatgctgtagatgggaataggagcattgatcttgctcttcttcctgactgtagtacttccctttcctatggctttaaccagccacctcctccctgggaaacatctcctgtgggcttgttgggtatagaagctactctaagacccaaccagataccatgatgccactgttaattctgtttgctcttctaattaacctaagctagtgtgtatgtggacagggagggtggacaaaattctacagtaaatatttcaaaaattatagcatcatagaatcatctttatggctgccagatttgtcatcaacacccccaggatagacagtttcatcttccgacctatctggaaaatctcaggaccatgtccccagacctcctaactaaccatagcaccccaaaatacccaaacccctattgtgaagtggaactcttccccacttagtggatcccccctggaccctgctgtccccctgccctgaccactattatcggaatctgggaagttgggcatctatatctccagtgcactcataactctaacatttgcatccactcttgcattaatg

SEQ ID NO: 12335 - DNA, 490 bp, Homo sapiens
tctcgtttcttcctctgacctccgaggtccccgctcgcaccacggggttgctctgttctcctgtccggcccagactcttctgtgtggcgccgccgaaggccaccgttagcgcgagctgctccgttcgccctgcccacggcctgcgtggctggggccgagtcccaggggccgcacggagggcacagtctcctgtcaggctcggagaggtcaggagaccgaccccaccactaactttggagaaaatgtgggtttgctttttaaaggaatcctatatctagtcctatatatcaaacctctaactgacgtttcttttcgaggaagtggcttggtgggtgcagcccccgccggttccgttgacgctggcaccttctgttgattttttaagccacatgctatgatgaataaactgatttattttctaccattactgaacattaggacaaacacaaaataaaaaacaaaacacaggacaacggtgctgattctggtg

SEQ ID NO: 12336 - DNA, 591 bp, Homo sapiens
aattccaaaacctgtgaatgtgggtaatgtgggagagccttcagccaaacctcattgctttataaaccccttagaactctccctactagctggaaactctggtgacgtgatgaatgtgggaagggctttggtggatgttccaccaaaacacgttagagaatttgtacattagagaatttgtgctagagcaactcttcaaatttagtgaaactgggaaaacccattagtagagttcaagcttcagtattcatctcaaagagaaaccttgggaacatgatgaatgtgaggaaagttcctttaccaacttggagatgtataaaactagagctgaaaagaagctgagaaatcaccttgtctggtgattttctgcctggtggggccatttgtataacgacacttgtgcattgcctcctcatgctgttactgacggggcagggtgtcatgcatgggtgcagaggatggaggctgagaaaggtagacagctacccatgatctagcccagtcgtattttagagctaataaaactgatgttcagaaagtgacatgccttggcctatagtcctaactgggctgggcctctttcctgtggtt

SEQ ID NO: 12337 - DNA, 783 bp, Homo sapiens
tttttggattcattcatgccatagtgtgtttatttatactcttaaggtaacaagtccacttgtacacattgatttcacaacatcaataaatttgtacactttgagatttgtttctgggttataattcttcctctgggtctcgtgaccgtttccgggtgctcaaggaaccttctgtttgcaatgaacatgcagaagtaacaacagtatctctaaatccctgaggtttgatttgaaacagtactgtgcattccttctggctgggtgacttgtacaatgttgccaacctttgctttcggtcccaatgaaagattagccgtattgtagcagcatgtccccaactttcccctaatgcaggaacaagcaaggcctgatttctatcaatctttgttgtcatctgattggttaaaattacagctaatctgtgattatttgcaaggctgatcatttgctgggctaggccatttaataaccgagtacgaagagacaggtcatctaggtcatgacgaaatggaaaagcaataccatccactatcactagtcgaacctgatttcaaacgttcacagctggaagggaatttcacttcaggatgaattataacttgagtctcaccaatctctgatttagataatatttagatgaagcctgggacttttagagttgatgatggaaccagttaagacgtttggggctttgagtgttctgaaaggaaatctggaagaagataaacttgtgccagtaactctgtgtagtcacgacagcgaaaataataaatatgagaaagc

SEQ ID NO: 12338 - DNA, 563 bp, Homo sapiens
ggaccagatggtgaattctaccaaatgctaaagaatggacataaatccccaaattctcccaaacattgtggaggagaaaacacttcctaattccccgtattcatgtgaggggccagcttccctcccattctgccccagcttcctccagtggccttccccaacaggcagtggcccccacttctgacccctgtaactctacccactgtgggtttcctccttgccacccttccagccttccaggctttgggggccattgagacagcccatcctgcctgccctgagtgggagggcaagacatgactggctcaggatggcctgtcacccaagttggactcaaagaagccagggacatcagtgcagtcggatgcacagtgcagtaggttttggtaagtgcacacgtgtgtgtacctgcccttccaaacctcacaggagagaccaacccacaccccaccccaggtcatcactgttctggcccctgtcaccagagattaattttgccctttctgaaactttatgtcagtgaatattagagtctgtgtcttgttgttaactgaaaaaaaaaa

SEQ ID NO: 12339 - DNA, 1128 bp, Homo sapiens
  misc_feature (1)...(1128): n = a,t,c or g
tttttaaggtatttttaggctacttggctcatctgagtttttgttagtgttgcgagtctccaaaaacttctcagtgtgtttactgaaaatttatgtgtcagtgggcctgagtggttgaaaacggtgttattcaaaggccgcctgtatttctaattcgtccctctttgtgattactgctggctaaattcagacctacattattagattattggatttatttcccaanataccctttctgcccacaagtttaccttccctaatttcctcctgctcagttttctgaaggatgtcatatataggctactcctctgcttattgcttattgacctcatctcctgtcacccccactacacccacgaccctaaactctggcttttctcagaaaaagatgtgcttttcctaactccgtcccacatcttcagtctggaatgttctgtgctcttcagtgtagccttcagcgctcacctacttaaaagtcctttctgctgaagcctgtcttcttctaggagacttagtggacatctgttggggctctcctggctcttattttcttcttagttatagcaattctctgatcactttgcttgcatacgtccacctctccgggtcatgtgcttctcaagagtgggagctttgccagggaatcgttgtcagatttctgatgtgtgtaattcatccaggtctggaagggtctttattccagtctgaaggaccattttaattttgtgtaagtattttcatcacaaatcctcgtacacatgagggtattggaagaaacttgaacctttcctttgtgctcactgtcacatgacatcgtcacccaagtttcaatgtcccaccaggttggttttaagaacatgcagaatgtggagcatgttccgctgtccttggacaggccccatgcggctggtgaaagatgtcttcatttctgcggctgagagagatgtgtacactggggacgcactccggatctgcatagtgaccaaagagggcatcagggaggaaactgtttccttaaggaaggactgatctgtgtgctcttatcaccaatcagttcagacctggttgattttgtactttggaactgtaccttggatggttttgtttattaaaagagaaacctgaagt

SEQ ID NO: 12340 - DNA, 322 bp, Homo sapiens
gttttacacctatctgctcattttgttgggttagcttttctggtttatttcataggttgttcttgctatttattaagaacagaatatcaaaagattatgaatagcctcagctctagaatgcttaccactgttaaaacaacaaaaagactaaacctctaatttcatgcaaatctttgttagcttattctaagaaatttattaagtaaaacaaagagaaaccagaagtgggagatagttattttgtgcgtaattttctttaaatcattttgaatgatggtgaaggcattcagtttgctgtattttttttaatcacttcatacaa

SEQ ID NO: 12341 - DNA, 117 bp, Homo sapiens
aaagaatatggtagtagatgagccacagccaggtgcccatgtactaatcatgataacctgacatgccattctcaaaatgctgagttgttaatttcttgtcatctttaaatatatata

SEQ ID NO: 12342 - DNA, 75 bp, Homo sapiens
cttcatcctacgagagagaagttgtcccatctccaaccccttaggttaaaaagtttaaaaataaaagcaagaaag

SEQ ID NO: 12343 - DNA, 330 bp, Homo sapiens
gagaagcaaaacacatcgtacccatgtccagagctttctagaaatctcattatataactcaccaatttactcaatgttacatttcaaacaaaacgaacatttttttaaaaaaaccttacaaatatataaatccaaaccacaaaacatcttctaaacatggtatttactctaaacacaaatggatttctggaaattgcatcacaatgctatctaaactagattttatgaaatcataaatgtatttagctggtatccttgggggcttaaattcattggaccatatcccatgtatactattctcatcctacttactttgggcatacatattcc

SEQ ID NO: 12344 - DNA, 748 bp, Homo sapiens
gcttgatgtggtagaagaatctcactatattcaacaaagggttcagaaagctcaattcctcgttgaattcgagtctcaaaataaagagttcctgatggaacaacaaagaactagaaatgagggggcctggctaagagaacctgtatttccttcttcaacaaagaagaaatgccctaaattgaataaaccacagcctcagccttcacctcttctaagtactcatcatactcaggaagaagatatcagttccaaaatggcaagtgtagtcattgatgatctgcccaaagagggtgagaaacaagatctctccagtataaaggtgaagtgttaccaccttgcaagatggtaaaggtacaggtagtgctgactctatagctactttaccaaaggggtttggaagtgtagaagaactttgtactaactcttcattgggaatggaaaaaagctttgcaactaaaaatgaagctgtacaaaaagagacattacaagaggggcctaagcaagaggcactgcaagaggatcctctggaaagttttaattatgtacttagcaaatcaaccaaagctgatattgggccaaatttagatcaactaaagggatgatgagattttacgtcattgcaatccttggcccattatttccataacaaatgaaagtcaaaatgcagaatcaaatgtatccattattgaaatagctgatgacctttcagcatcccatagtgcactgcaggatgctcaagcaagtgagg

SEQ ID NO: 12345 - DNA, 520 bp, Homo sapiens
  misc_feature (1)...(520): n = a,t,c or g
tttgganaccgtttnnnnnnnnnnnnnnnnnnnnnnnnnnnnnnnnnnnnnnnnnnnnnnnnnnnnnnnnnnnnnnnggcacgaggatgtgaaacgaagacaatttgaaaaacatataaaagaacatcatctcagaagtcagcctcaaagctctcagaagtgtggacatactaagtataaaatacccgaccacagggtggaaaggaaggaatcaaagagtcaagcagcctgtcagtgtagccaccagccatccaaagtagaaatctccagctctggtgccaaagtatacctttactcatctcatccaggccagtcagatcttactgtgccaaattcgccacccacccatgatccgggacttcagcctcatcccaggataggtgaccacaaaaacataagtgaacagaaaagcctgctagaagtccagcgactccagaaagaactgagcagttgtatccacaaaattgaagaggtaactaaaaaaggtgagaaaaattagattctttacttcgacctaagg

SEQ ID NO: 12346 - DNA, 252 bp, Homo sapiens
ccccccacgcccagccacatttaatctcttaaaaattctggaggccagaagtgtgaaatcagttccactgggcttaagtccagggatggcagagctggttcctcctggaggccctgaggaaagaatctattatatttccgtgtctttttcagcttctaatagccgccttggctggcagccccttcttccaccttcaaagatctccagtctctgcttccatcatcacaggccctcccgcattccaggataaac

SEQ ID NO: 12347 - DNA, 384 bp, Homo sapiens
tttttttttttgcaaaaataatcaggcacactttttattttacatcttaatcaacattacaaatacaaaaggaaaaaagtcagaaacaactcatcacagaggaaaaaaacatcattcagaagagattaatctgaacttcaacattctttgtgctcattttaaaattattaaaacaggaattcaaaaggacaagcaaataaaaaccaagtattttattaattaaaattgagaccctaaaccaactaagactatacaacttaaaaataagctgtcttcatcctagaaaagtttgattttccatcttataatgaatatgcaggaacttactaatgggtaagtaaacaaattttcttttacaaacaagttattttgagttatagggat

SEQ ID NO: 12348 - DNA, 647 bp, Homo sapiens
tttttttttggtggattttgtaaaccatcatttactttgtctttacttttttttgcaaagatagttgtggtgcgaacaagttgagggaaaggcattaaaagggttagactacgagaaatgaggacaaaacaattgcgatacttcctataggagaccgcacaaaaggcagttggctggtttcatattgcataatgatgctgtgttccttgatgaagcaaacaatcttccttgtattaacataaggatcagaccttggcccccacacagtgttggtttctgtatggctggaggtgtccttactcaattgacttcactggaaacatacgttgtatgtcaattcatctttcagtacttcctctcagagaatatacttggactatttaagcgaagtacattgtgcgtaaggtatcttggtgaatctgtacagccttggcaagagcttgtggatctcgcccattgctttgtcctgaaacgtgacttccttcagcactggtcatggttctttgtccacaagatgatatctggctctaaatgctaccaggtgagcataatacgctggtgcaggtatagaaacagatcgtgtacagcgtacgtaagtgtggcagagctggtaagttagcagctgaagttcatctgcagtaaagcag

SEQ ID NO: 12349 - DNA, 674 bp, Homo sapiens
acattacctctgattttatttagattctaaaagttaggatacaaaaagcacataaacatctacaagtaccaaaacatttatgaccttataattttatagtgcaagaaaaaggacaaagacaggaatacaaataaattataatctaaagagttacatataaaatgtccttgattatttgttaaaatctgctagaaaagtaacaggaatgttatcaagcctttctagacattttgaacacaatctgacaccgttgcatttcctggttgtatcctcagcttaacaggcactggagacagccagcttcttcaaatggtccatgaacacctgcaggctaacatcatcagttaggatgggtgctccagtttcctgaaatgtaatgataaagattagttggcagatatcttagaagctgattagaattcatgagctgtcaagcaccttccctcagaacattcacaggtgttgtcccctctgctacgagtactcccatcaccccatcctctgcctcacgaacaacttcttttgactaaagcacaatttcctcacaaaatcctttcctggtacgccgagatcaggccaccaccgcctgctagttttgagcatcgaggcgttttactttaccctcttccctcgtgtcccgcattcttttggatcccactagttgtcgaccttgc

SEQ ID NO: 12350 - DNA, 1531 bp, Homo sapiens
taaaaatgaaagcattaaagggtttccctacaaaacatttttctttaaaatacttttgaaatggctataagcagttgactttcacccttggagagcatcacactgtgtgaggttcagtgattgttgaccctccccagcccctcctgcttctttaagttatctgtgtgcgtgcgcttcctctcaatcttctttgcacgctcatttctttttctctgacccatgagaaaggaaaacttactgatgataatttttaaatagtgtaatttattcatttatagcatgtcaggataaattaaaagaacatttgtctggaaatgctgccgggacctattgtgtaaatgtaggtattttgtaaaataaccttgaaattgtaaattgacacgtgtttggtcagattgtgtcaagtttaatttgttttgttttcttttttcttttttttatttgaaaactactttagcaataattaattccatgattatcacattctgccattaagggatattagtaccgtaatactgaagaaattttattaagtctgaacttctggggtaggcagcttctttgtttcttttctatccacccttgtcggttgaggtatttgtttcttgactaataaaccctttgatacttttagccagaaatcagtctcataaagctatttttgagtatagtttgtgtaaaataaaaatgtttagctttggtaataacttccaagctgaactccctctagcaagatatttttcagtgcttttatttactatgcacttagactatgcactttttctgaaatatttttgtaacacttttttgtatttttgccatttgaaaaggttgtggtgtagttggtctgtaattaagttgcagatttaaaactgctgttagctttgtaaatcaaaatataggtgttttttgtcctggtatatcgtcattccatctgcagctggagctggaatcccattgatcttctagctaccattcattttcttcactgttcacaaaagaagagtgtgaaattcagtgaatgctgttactaatcctgttacgagatgaatctcatttcaccaaaattaaattatgtttttccgctaaaatgatgatacaagttgaagacacatcactctgaaattggaagacctcaccacttaaggctccacagtggcttactcagctgaactctaggttactactctttactttgttcacccattggggggtgcagtttttttaaaatgttgggagatggccattctaactactgttgaatgtctctgttttgggaaggtataacaagaaataaaaaagaatatatatgaagggagagactggttatctcctcccatatggttgtgcttatcctcttatggcttacaaatgaatatttggaggtttgctttcacaatgatttcccatcaacaaatatttttagtaggatttttcctgtttctgttagtccttgcagtactcataaatgttttaagctgagcatactgtaatagtcataagtttaatttcattataataaaaataatca

SEQ ID NO: 12351 - DNA, 190 bp, Homo sapiens
aatgaataaagaaactgaggctcagagaggcaaagtaacttgcctgataggacacagcaagtaaggagcagtctgcatcactgcaaagtggtgtcttcagatgcccccactgcccggtctccagtagccccaccacagccacttttgtcaccatgactgacaagatgaccaactaacacacacttcctga

SEQ ID NO: 12352 - DNA, 361 bp, Homo sapiens
tttttttttttttttctcttcctaaatgatttatttatctctgatagaaaaaaataagaatgctttgaaaatcagtttaggaattacagtaacaatattgatgggccatcatttaataggcactgttaaaagatggggagatgcaggtagagtaggcagcttgagaggaaaaatcaaggaaatacaccatcaagagcagaagcccttatacactactcttctgcagacactgggaggggctgccagggggttgcatatttttgaggcaatatgtagagttgggagaatgagaccccaggagtatttattcaaagttgagaggggaaagaacagtcttcaggcctacaacaaagagctaaag

SEQ ID NO: 12353 - DNA, 379 bp, Homo sapiens
ttttatgtttttaccacaatttattcatccattcccttactgatggtcttttttttgtttgtttttttggtccttaccaaaaaatacaatatacattagtaaacatataatcttaagtgctggcgctttttattccttagggatagattcccaggagattcctaggttgtaagagtatattaatgttaaaacagactcacaatgttgtccaaggaggctgttacaatctacatttctaaaagcagctatgaaaataacgttttcccctcctttgtgagtaagtaagatgacaacttagacaaaagcttattgggctatggatgttctggataaatttgttcagaaagtcactcaatatatagtgtgacagcacatcaat

SEQ ID NO: 12354 - DNA, 853 bp, Homo sapiens
atttcttttgccccttcatagccctttaatgatatattgctctgtacttattctaagaaaatatccaattacctataagctatgttaaagagctggtttatggaactagcaaataaatagttaataaaaaaaatattcaactcaaatatactgaaatgttcctacataaagttttgagttaaaatcctaaacaatgaaaaaaaacctgtatacctgaataatcttttgctctttctagtgaccatttcctacaaataacacacagttgcatatattttacagtttcaatcttatatttattctcttgtggaatgctaggtttaatgttacagtatggttgtcaaagctaatgaaatgtgacaaatgtctaaatgctgcagaacagtataattttaattaaacaaaacacctgttattgtacagctgaggtctgatggttgttaaactgatgcctatgtgtatggccagccacaaaccttggggatgtttattacctgtacatatatatacaaatatatcccatacatatgtatgcacacaggcatgtattaatttatgcgtgaaacttataaaattatatatacaaacacatacatgcacatctatctacatatacctaccctcaccattgagtaatcagcctcatgcccaattattattgctgcccagtataactacatgattttagtgccaataccaggcacctttttgggtgcaggataggtacatctatgcatatagatatgcatattcatgtatgtttgtgtatataaagaaattctctctcccttttatgcttcagccatgcattactacaataaacagtctttccactgtaggtgttggaattcta

SEQ ID NO: 12355 - DNA, 372 bp, Homo sapiens
tattctttatttagatatattcaatatttattttcatgagattactttcttttgtagataattatcaaacagcacagctacttgccttaattttagagttactcacattttgtgtggaacatcacacatatcacataaaaaactatattatgaacaaggacttgctaagaagagtcttggtcttgatgaattcaaagcacacttttctggccttgtgtgcccttcgctttatgaggcggataattggacttaaagatgaattttataatcgttacatcaccaagggaaatctttttgagccagttataaatgcacttctggataatggaactcggtataatctgttgaattcagctgttattgagttgtttg

SEQ ID NO: 12356 - DNA, 36 bp, Homo sapiens
gtcgacgcggccgcggtcgacgcggccgcgaattcc

SEQ ID NO: 12357 - DNA, 90 bp, Homo sapiens
gttcagtttatatatagagagagaaagaaggctgtctgctcttacattattgtggagccctgtgatagaaatatgtaaaatctcatatta

SEQ ID NO: 12358 - DNA, 321 bp, Homo sapiens
gaagaatgtaaaagtttggtggtgggtggcttggcattgcccctttttcccaccgattcggtggctggtgaaggtgggagatgtgaactccaattaagggactggagagaggtgaagaattttgcaggtgggagatttggatttgaatgtggacttgtaaatgacttgaccttgccatctgtgttcaaggtcacggtttgctgtggggttcctgggagagcttactcaccccggagtcttttctttctcttgctccaagaagagccctgttggtgctttaccaccgcttggagtctcccgaggacacaaacaggcagagag

SEQ ID NO: 12359 - DNA, 1085 bp, Homo sapiens
tttttttccaagagatgcacacaattatgattttatttgttaagttacaatagccaaaagagctttacaaaaggcaaaataaactacacatccattttagaaaagtcctttttatttctttaaatcagaggccccctctagcgtttgaaagcagtcacaggcaacacacaatgcaattgaaagtaaacagtcacagcattttaccgcagaccttccaaaacataaggctggcttctgttccattcaagtggcacaaaaatcaatgagagaaaaatagctaaccataattaatattgcaaattcctgctatgattcagattcattatcctctcattcagtaatttctttattatttactgctgggttattttttactagattaaatactctgttaataaggaaaaaatatataataaatatagggactttaatttccctaataagaaatatacctcatttgaaatgaccgaaaattaatgttaccatatatcctactctgctttgatggaagttattggtaacttcctaaagtatatacttaattttaactttattatatttggaaatcagaactttttaaagtacatatattttgaaattcaacctaatctgtgactttgctaaaactttttcagtactcagtaaaaggaggtgggaaacgttgctttgaggacaaatgttggctctgaagaatatgatataaaggaactcttaagagtttttatacagacagggcactgcataaatccaatgagtgaatctcgtgcgcttttgaaaacgattgattgaaattagcgggagtaaaaaatagttgattttcactctattttttcagctaatgtctttatgtgtctgtttccatgttctattacagagggtttaagctgacagctagtattactataactggaaaataaaaagaaatctctaattttaacaaaagaaaacaatgcaaacttgaggaagaaaccaacagagaaaactatattaagctaatacttcatgttcttaaaagttataaatacactgaaaatttgaaaattcaatagctcttgaaacaaatttaatctgtattaactttattt

SEQ ID NO: 12360 - DNA, 1634 bp, Homo sapiens
tttttttttttttggtttttttgtttttattcattttatgattaaggtgtttatcactactccagttgggtaaaccacattgaagaatctgactgcaggtctttagattcagccaaatgctttccatcaattttgctctaaaaaatattaaacattttaatacttcagccatgctcagaacgctgcagtctaaggatgaacttcaacttgcccatgccaagttagggcgacaggagcagaactaaggagctatgacgtctaaaagaatcagagaatctggcttaagacgaagagagcttctgttccccaaaactaaactgtctagtttttaaatccacccttaaccgttcaagaaactgaaaaagtcaacttgtttttaaaataccacacaggtatgcaatcttccatgatttgttttgcatctcagctagcacagggaaacccttgaaaaacctagctgtcagaagtttttcctgagggaaatcattacgcttctactgctgagcttcatgtttattctgtgcgtcggggaaaggagaaagcaatgggacagagaagggaaaagttgcgactgggtgacgaattcattaggtgcatttgaaagtaaatgcaatggaaaaaagtaacaaatgctaaagttttctaaaagtttaatgaagccaataaggcatataaattgtgttctggcagacattaagacctgctttctcttaccaaagaaaatggcacgttttatcaaaatttgacaattcagagtaaagggtactgagattaagcttcagagcaccaacttaaacaaaacaaccaaaaaattgttatccaacgtggaaagaggagcaagaaccaaggcataaaggggaattaaatatgtgttcctccatctcaaaatccttttaggaataggagttctggccacttgtgagcaacacattgcaccaccaaaccccaattccagaatctaaatttacgatagaaaaacaaaggtaactccaaacgcatgtcttgtatattccaaagggaagcttgaaagtattcataatacataggcttgtctgtttcaggtaaaatgacagattgctataattcttcctgctattatagtcaaacaaaaaatgacccactttcgcaaaagtttagaaatctctcactttcattcctagttttagtatggaattcacttttttaaataagggctacatctataatgaatacagaacttcaattcacacaacatttctaacattccattcacatcccacccagtcaatgaatgaacatttatggttaactcagcaaagtttcttcacagaaagatattattaaatggctgaagaaattgcaaactttaacaaagtgctgtgagtaattactggaaaaacccttacactgatttgcaatggtcttttaaggataaaaataggaagtaactgatactggactacaagtttgcaaggaaacatttttcactgtcctacttgatatataatataataatatgatagaataaattacagtacctggcaggctgacatcagttcttcatctaaaaaaacactatcattcagttcaggatattaaaaatgaagatgaaacatgctctaaaacattgtagctacaagaggtcttatatttac

SEQ ID NO: 12361 - DNA, 895 bp, Homo sapiens
ctcttacagactcagattcatctttgtcttctgaaaatcagttatgaaatacactttgcacagaattaggcatctgcctatctgtgcattaaattaaagcaagttaaggccctatttgttactacctgcctcatttgccaaattgtagcaggtgaggtgtccttccctaatacagcatgcattgagatgcaggagaaaggaagaggcataagaaaatacaagaatgactatttcattctatattgaacctgtcccaaagtggtaggttttctgggctggaatcagaagttgcttagctaactatgacagtcaccctctgtacgtgacaggccactgtggtgactttggtcggctgagttccagtgttgtcaaaacaagacaaatggggatagattgtgcctggggttgctaattctctgcttcatatcaccatatgccgtttctggtaccaagtgaggggacatgcttgtcagggaaaccttaaaattgaatctactgatatatcttgttgaaaaaatggaaaaggtgcaaagtattagaaggaacgttagggccgttgctttcaaactgatgaggagaatgtgaaaatggtatcataaaacaggaaatgtgcttcatatgcccaagaggggaagaggtggaatcggaactccaaaacaactggtacatgttttgttgatgggcaaaaaaaaatcacagcacaaccagaaaggagaatgtaccagatgttttcaaattagagtatttcaaaaggaaaatgttattttttgttttgtattgttttaaatcccaaggatagtttttatagttccttctgtcataatatattttagttatcctaatttttaagcatgttggcacatttaaaaaatcctaattgatgatgagaattttt

SEQ ID NO: 12362 - DNA, 242 bp, Homo sapiens
aaattgaaagtgagagtgggggataagaaacttaaagaaacttaaaatattttgcttaactctgcaattacagatgctcctcaacttaggtctatgtctgggtaaccccatcttaagttgagttcagttgaagggtgtactgaatgtgtatggcttttgcaccgttgtaaagtccaaaaattgcaagacaaaccattgtaaattgagtaccatctgtaaaccttaacacaagtcaaaacatg

SEQ ID NO: 12363 - DNA, 400 bp, Homo sapiens
cctcagcatcatttaatctgttgctcacaacatttataacacaagaaccaactgtagaaaatacagagtagaggtgagtttcaagaagcactgggcaagcacttgaataactgattttgatggtaagagctccaatcatcccaaggcagaccctcttctgggagaaaaccaaagattcaccttcaaaacgaggtgtttcaggagccccaaagcataacattctatttcctaagaaacacactctatatttctgttaaaacaatttaaaaaatgggtacacatttagtagaaaatgaattgtgaaacacctgcactagcaacatcatttctcaagggacacatgaggaagtacttttcatgtttcacggacatttcttttggggtactcaagtcatttaac

SEQ ID NO: 12364 - DNA, 1181 bp, Homo sapiens
gtggcggtggaacggccatgcgcatcctaggcggagtcatcagcgccatcagcgaggcggctgcgcagtacaacccggagcccccgcccccacgcacacattactccaacattgaggccaacgagagtgaggaggtccggcagttccggagactctttgcccagctggctggagatgacatggaggtcagcgccacagaactcatgaacattctcaataaggttgtgacacgacacccgtgatctgaagacatgatggttttggcattgacacatgtcgcagcatggtggccgtgatggatagcgacaccacaggcaagctgggctttgaggaattcaagtacttgtggaacaacatcaaaaggtggcaggccatatacaaacagttcgacactgaccgatcagggaccatttgcagtagtgaactcccaggttgcctttgaggcaggcagggttccaacccgaatgagccatcttctaaaacatgattatcccgacgctactcagatgaaagtgggaacatggatttttgacaacttcatcagctgcttggtctagctggacgccatgttccgtgccttcaaatctcttgacaaagatggcactggacaaatccaggtgaacatccaggagtggctgcagctgactatgtattcctgaactggagccccagacccgccccctcaccgccttgctatagggagtcacctggagcctcggtctctcccaggggccgatcctgtctgcagtcacatctttgtggggcctgctgacccacaagcttttgttctctcaagtacttgttacccagcttctcaacatccagggcccaatttgccctgcctgggagttccccctggctctaggacactctaacaagctctgtccacgggtctccccattcccaccaggccctgcacacacccactccgtaacctctcccctgtacctgtgccaagcctagcacttgtgatgcctccatgccccgagggccctctctcagttctgggaggatgactccagtccctgcacgccctggcacacccttcacggttgctacccaggcggccaagctccagaccgtgccagacccaggtgccccagtgcctttgtctatattctgctcccagcctgccaggcccaggaggaaataaacatgccccagttgctgatctctatgga

SEQ ID NO: 12365 - DNA, 1458 bp, Homo sapiens
ggggccccgcgcctttggtaacctctatttttaaacccgaactccaaaatccttttcgggggaaaaattctggggcccttcccaaaacgcccttttcctggaattaaccgcccaaaaggcccgggcccaaccccatagttttggttcctagcctttttggtgtttggccctcgagcacaaaaaaatagattctaaaaacctctcagtattataccataattctgatgaacacaagaccattcagagttgtacagtagaagttcattttcaaaagataattgataaggaaggggatgattatgaagtcattcctaacagtaatttctatgtatccagaacggcctgcagagataatacttctgtctatcacataagtggaaagaaaaagacatttaaggatgttggaaatcttcttcgaagccatggaattgacttggaccataatagatttttaattttacagggtgaagttgaacaaattgctatgatgaaaccaaaaggccagactgaacacgatgagggtatgcttgaatatttagaagatataattggttgtggacggctaaatgaacctattaaagtcttgtgtcggagagttgaaatattaaatgaacacagaggagagaagttaaacagggtaaagatggtggaaaaggaaaaggatgccttagaaggagagaaaaacatagctatcgaatttcttaccttggaaaatgaaatatttagaaaaaagaatcatgtttgtcaatattatatttatgagttgcagaaacgaattgctgaaatggaaactcaaaaggaaaaaattcatgaagataccaaagaaattaatgagaagagcaatatactatcaaatgaaatgaaagctaagaataaagatgtaaaagatacagaaaagaaactgaataaaattacaaaatttattgaggagaataaagaaaaatttacacagctagatttggaagatgttcaagttagagaaaagttaaaacatgccacgagtaaagccaaaaaactggagaaacaacttcaaaaagataaagaaaaggttgaagaatttaaaagtatacctgccaagagtaacaatatcattaatgaaacaacaaccagaaacaatgccctcgagaaggaaaaagagaaagaagaaaaaaaattaaaggaagttatggatagccttaaacaggaaacacaagggcttcagaaagaaaaagaaagtcgagagacagaacttatgggtttcagcaaatcggtaaatgaagcacgttcaaagatggatgtagcccagtcagaacttgatatctatctcagtcgtcataatactgcagtgtctcaattaactaaggctaaggaagctctaattgcagcttctgagactctcaaagaaaggaaagctgcaatcagagatatagaaggaaaactccctcaaactgaacaagaattaaaggaaaaaaaaaaaaa

SEQ ID NO: 12366 - DNA, 10606 bp, Homo sapiens
ctactacagtggcggacgtacaggacctgtttcactgcagggggatccaaaacaagccccgtggagcaacagccagagcaacagcagctgcaagacattgtttctctccctctgcccccccttccccacgcaaccccagatccatttacactttacagttttacctcacaaaaactactacaagcaccaagctccctgatggaaaggagcatcgtgcatcaagtcaccagggtggtccattcaagctgcagatttgtttgtcatccttgtacagcaatctcctcctccactgccactacagggaagtgcatcacatgtcagcatactggagcatagtgaaagagtctattttgaagcttcaaacttagtgctgctgcagaccaggaacaagagagaaagagtggatttcagcctgcacggatggtcttgaaacacaaatggtttttggtctaggcgttttacactgagattctccactgccaccctttctactcaagcaaaatcttcgtgaaaagatctgctgcaaggaactgatagcttatggttctccattgtgatgaaagcacatggtacagttttccaaagaaattagaccattttcttcgtgagaaagaaatcgacgtgctgttttcatagggtatttctcacttctctgtgaaaggaagaaagaacacgcctgagcccaagagccctcaggagccctccagagcctgtgggaagtctccatggtgaagtataggctgaggctacctgtgaacagtacgcagtgaatgttcatccagagctgctgttggcggattgtacccacggggagatgattcctcatgaagagcctggatcccctacagaaatcaaatgtgactttccgtttatcagactaaaatcagagccatccagacagtgaaacagtcaccgtggaggggggacggcgaaaaatgaaatccaaccaagagcggagcaacgaatgcctgcctcccaagaagcgcgagatccccgccaccagccggtcctccgaggagaaggcccctaccctgcccagcgacaaccaccgggtggagggcacagcatggctcccgggcaaccctggtggccggggccacgggggcgggaggcatgggccggcagggacctcggtggagcttggtttacaacagggaataggtttacacaaagcattgtccacagggctggactactccccgcccagcgctcccaggtctgtccccgtggccaccacgctgcctgccgcgtacgccaccccgcagccagggaccccggtgtcccccgtgcagtacgctcacctgccgcacaccttccagttcattgggtcctcccaatacagtggaacctatgccagcttcatcccatcacagctgatccccccaaccgccaaccccgtcaccagtgcagtggcctcggccgcaggggccaccactccatcccagcgctcccagctggaggcctattccactctgctggccaacatgggcagtctgagccagacgccgggacacaaggctgagcagcagcagcagcagcagcagcagcagcagcagcagcatcagcatcagcagcagcagcagcagcagcagcagcagcagcagcagcagcagcacctcagcagggctccggggctcatcaccccggggtcccccccaccagcccagcagaaccagtacgtccacatttccagttctccgcagaacaccggccgcaccgcctctcctccggccatccccgtccacctccacccccaccagacgatgatcccacacacgctcaccctggggcccccctcccaggtcgtcatgcaatacgccgactccggcagccactttgtccctcgggaggccaccaagaaagctgagagcagccggctgcagcaggccatccaggccaaggaggtcctgaacggtgagatggagaagagccggcggtacggggccccgtcctcagccgacctgggcctgggcaaggcaggcggcaagtcggttcctcacccgtacgagtccaggcacgtggtggtccacccgagcccctcagactacagcagtcgtgatccttcgggggtccgggcctctgtgatggtcctgcccaacagcaacacgcccgcagctgacctggaggtgcaacaggccactcatcgtgaagcctccccttctaccctcaacgacaaaagtggcctgcatttagggaagcctggccaccggtcctacgcgctctcaccccacacggtcattcagaccacacacagtgcttcagagccactcccggtgggactgccagccacggccttctacgcagggactcaaccccctgtcatcggctacctgagcggccagcagcaagcaatcacctacgccggcagcctgccccagcacctggtgatccccggcacacagcccctgctcatcccggtcggcagcactgacatggaagcgtcgggggcagccccggccatagtcacgtcatccccccagtttgctgcagtgcctcacacgttcgtcaccaccgcccttcccaagagcgagaacttcaaccctgaggccctggtcacccaggccgcctacccagccatggtgcaggcccagatccacctgcctgtggtgcagtccgtggcctccccggcggcggctccccctacgctgcctccctacttcatgaaaggctccatcatccagttggccaacggggagctaaagaaggtggaagacttaaaaacagaagatttcatccagagtgcagagataagcaacgacctgaagatcgactccagcaccgtagagaggattgaagacagccatagcccgggcgtggccgtgatacagttcgccgtcggggagcaccgagcccaggtcagcgttgaagttttggtagagtatcctttttttgtgtttggacagggctggtcatcctgctgtccggagagaaccagccagctctttgatttgccgtgttccaaactctcagttggggatgtctgcatctcgcttaccctcaagaacctgaagaacggctctgttaaaaagggccagcccgtggatcccgccagcgtcctgctgaagcactcaaaggccgacggcctggcgggcagcagacacaggtatgccgagcaggaaaacggaatcaaccaggggagtgcccagatgctctctgagaatggcgaactgaagtttccagagaaaatgggattgcctgcagcgcccttcctcaccaaaatagaacccagcaagcccgcggcaacgaggaagaggaggtggtcggcgccagagagccgcaaactggagaagtcagaagacgaaccacctttgactcttcctaagccttctctaattcctcaggaggttaagatttgcattgaaggccggtctaatgtaggcaagtagaggcagcgtgggggaaaggaaacgtggctctcccttatcatttgtatccagattactgtactgtaggctaaaataacacagtatttacatgttatcttcttaattttaggtttctgttctaaccttgtcattagagttacagcaggtgtgtcgcaggagactggtgcatatgctttttccacgagtgtctgtcagtgagcgggcgggaggaagggcacagcaggagcggtcagggctccaggcatccccggggaagaaaggaacggggcttcacagtgcctgccttctctagcggcacagaagcagccgggggcgctgactcccgctagtgtcaggagaaaagtcccgtgggaagagtcctgcaggggtgcagggttgcacgcatgtgggggtgcacaggcgctgtggcggcgagtgagggtctctttttctctgcctccctctgcctcactctcttgctatcggcatgggccgggggggttcagagcagtgtcctcctggggttcccacgtgcaaaatcaacatcaggaacccagcttcagggcatcgcggagacgcgtcagatggcagatttggaaagttaaccatttaaaagaacatttttctctccaacatattttacaataaaagcaacttttaattgtatagatatatatttccccctatggggcctgactgcactgatatatattttttttaaagagcaactgccacatgcgggatttcatttctgctttttactagtgcagcgatgtcaccagggtgttgtggtggacagggaagcccctgctgtcatggccccacatggggtaaggggggttgggggtgggggagagggagagagcgaacacccacgctggtttctgtgcagtgttaggaaaaccaatcaggttattgcattgacttcactcccaagaggtagatgcaaactgcccttcagtgagagcaacagaagctcttcacgttgagtttgcgaaatctttttgtctttgaactctagtactgtttatagttcatgactatggacaactcgggtgccacttttttttttttcagattccagtgtgacatgaggaattagattttgaagatgagcatatattactatctttaagcatttaaaaatactgttcacactttattaccaagcatcttggtctctcattcaacaagtactgtatctcactttaaactctttggggaaaaaacaaaaacaaaaaaaactaagttgctttctttttttcaacactgtaactacatttcagctctgcagaattgctgaagagcaagatattgaaagtttcaatgtggtttaaagggatgaatgtgaattatgaactagtatgtgacaataaatgaccaccaagtactacctgacgggaggcacttttcactttgatgtctgagaatcagttcaaggcatatgcagagttggcagagaaactgagagaaaagggatggagaagagaatactcatttttgtccagtgtttttctttttaagatgaacttttaaagaaccttgcgatttgcacatattgagtttataacttgtgtgatattcctgcagtttttatccaataacattgtgggaaaggtttgggggactgaacgagcataaataaatgtagcaaaatttctttctaacctgcctaaactctaggccattttataaggttatgttcctttgaaaattcattttggtctttttaccacatctgtcacaaaaagccaggtcttagccgggctcttagaaactctgagaattttcttcagattcattgagagagttttccataaagacatttatatatgtgagcaagattttttttaaacaattactttattattgttgttattaatgttattttcagaatggctttttttttctattcaaaatcaaatcgagatttaatgtttggtacaaacccagaaagggtatttcatagtttttaaacctttcattcccagagatccgaaatatcatttgtgggttttgaatgcatctttaaagtgctttaaaaaaaagttttataagtagggagaaatttttaaatattcttacttggatggctgcaactaaactgaacaaatacctgacttttcttttaccccattgaaaatagtactttcttcgtttcacaaattaaaaaaaaaatctggtatcaacccacattttggctgtctagtattcatttacatttagggttcaccaggactaatgatttttataaaccgttttctggggtgtaccaaaaacatttgaataggtttagaatagctagaatagttccttgactttcctcgaatttcattaccctctcagcatgcttgcagagagctgggtgggctcattcttgcagtcatactgcttatttagtgctgtattttttaaacgtttctgttcagagaacttgcttaatcttccatatattctgctcagggcacttgcaattattaggttttgtttttctttttgttttttagcctttgatggtaagaggaatacgggctgccacatagactttgttctcattaatatcactatttacaactcatgtggactcagaaaaacacacaccaccttttggcttacttcgagtattgaattgactggatccactaaaccaacactaagatgggaaaacacacatggtttggagcaataggaacatcatcataatttttgtggttctatttcaggtataggaattataaaataattggttctttctaaacacttgtcccatttcattctcttgcttttttagcatgtgcaatactttctgtgccaatagagtctgaccagtgtgctatatagttaaagctcattcccttttggctttttccttgtttggttgatcttccccattctggccagagcagggctggagggaaggagccaggagggagagagcctcccacctttcccctgctgcggatgctgagtgctggggcggggagccttcaggagccccgtgcgtctgccgccacgttgcagaaagagccagccaaggagacccgggggaggaaccgcagtgtcccctgtcaccacacggaatagtgaatgtggagtgtggagaggaaggaggcagattcatttctaagacgcactctggagccatgtagcctggagtcaacccattttccacggtcttttctgcaagtgggcaggcccctcctcggggtctgtgtccttgagacttggagccctgcctctgagcctggacgggaagtgtggcctgttgtgtgtgtgcgttctgagcgtgttggccagtggctgtggaggggaccacctgccacccacggtcaccactcccttgtggcagctttctcttcaaataggaagaacgcacagagggcaggagcctcctgtttgcagacgttggcgggccccgaggctcccagagcagcctctgtcaccgcttctgtgtagcaaacattaacgatgacaggggtagaaattcttcggtgccgttcagcttacaaggatcagccatgtgcctctgtactatgtccactttgcaatatttaccgacagccgtcttttgttctttctttcctgttttccatttttaaactagtaacagcaggccttttgcgtttacaatggaacacaatcaccaagaaattagtcagggcgaaaagaaaaaaataatactattaataagaaaccaacaaacaagaacctctctttctagggatttctaaatatataaaatgactgttccttagaatgtttaacttaagaattatttcagtttgtctgggccacactggggcagaggggggagggagggatacagagatggatgccacttacctcagatcttttaaagtggaaatccaaattgaattttcatttggactttcaggataattttctatgttggtcaacttttcgttttccctaactcacccagtttagtttgggatgatttgatttctgttgttgttgatcccatttctaacttggaattgtgagcctctatgttttctgttaggtgagtgtgttgggttttttccccccaccaggaagtggcagcatccctccttctcccctaaagggactctgcggaacctttcacacctctttctcagggacggggcaggtgtgtgtgtggtacactgacgtgtccagaagcagcactttgactgctctggagtagggttgtacaatttcaaggaatgtttggatttcctgcatcttgtggattactccttagataccgcatagattgcaatataatgctgcatgttcaagatgaacagtagctcctagtaatcataaaatccactctttgcacagtttgatctttactgaaatatgttgccaaaatttatttttgttgttgtagctctggattttgttttgttttgttttttaaggaaacgattgacaataccctttaacatctgtgactactaaggaaacctatttctttcatagagagaaaaatctccaatgcttttgaagacactaataccgtgctatttcagatatgggtgaggaagcagagctctcggtaccgaaggccgggcttcttgagctgtgttggttgtcatggctactgtttcatgaaccacaagcagctcaacagactggtctgttgccttctgaaaccctttgcacttcaatttgcaccaggtgaaaacagggccagcagactccatggcccaattcggtttcttcggtggtgatgtgaaaggagagaattacactttttttttttttaagtggcgtggaggcctttgcttccacatttgtttttaacccagaatttctgaaatagagaatttaagaacacatcaagtaataaatatacagagaatatacttttttataaagcacatgcatctgctattgtgttgggttggtttcctctcttttccacggacagtgttgtgtttctggcatagggaaactccaaacaacttgcacacctctactccggagctgagatttcttttacatagatgacctcgcttcaaatacgttaccttactgatgataggatcttttcttgtagcactataccttgtgggaatttttttttaaatgtacacctgatttgagaagctgaagaaaacaaaattttgaagcactcactttgaggagtacaggtaatgttttaaaaaattgcacaaaagaaaaatgaatgtcgaaatgattcattcagtgtttgaaagatatggctctgttgaaacaatgagtttcatactttgtttgtaaaaaaaaaaagcagagaagggttgaaagttacatgtttttttgtatatagaaatttgtcatgtctaaatgatcagatttgtatggttatggcctggaagaattactacgtaaaaggctcttaaactatacctatgcttattgttatttttgttacatatagccctcgtctgagggaggggaactcggtattctgcgatttgagaatactgttcattcctatgctgaaagtacttctctgagctcccttcttagtctaaactcttaagccattgcaacttctttttcttcagagatgatgtttgacattttcagcacttcctgttcctataaacccaaagaatataatcttgaacacgaagtgtttgtaacaagggatccaggctaccaatcaaacaggactcattatggggacaaaaaaaaaaaaaattatttcaccttctttccccccacacctcatttaaatggggggagtaaaaacatgatttcaatgtaaatgcctcattttattttagttttattttgatttttatttaatataaagaggccagaataaatacggagcatcttctcagaatagtattcctgtccaaaaatcaagccggacagtggaaactggacagctgtggggatattaagcacccccacttacaattcttaaattcagaatctcgtcccctcccttctcgttgaaggcaactgttctggtagctaactttctcctgtgtaatggcgggagggaacaccggcttcagtttttcatgtccccatgacttgcatacaaatggttcaactgtattaaaattaagtgcatttggccaataggtagtatctatacaataacaacaatctctaagaatttccataacttttcttatctgaaaggactcaagtcttccactgcagatacattggaggcttcacccacgttttctttccctttagtttgtttgctgtctggatggccaatgagcctgtctccttttctgtggccaatctgaaggccttcgttggaagtgttgttcacagtaatccttaccaagataacatactgtcctccagaataccaagtattaggtgacactagctcaagctgttgtcttcagagcagttaccaagaagctcggtgcacaggttttctctggttcttacaggaaccacctactctttcagttttctggcccaggagtggggtaaatcctttagttagtgcatttgaacttggtacctgtgcattcagttctgtgaatactgccctttttggcggggtttcctcatctccccagcctgaactgctcaactctaaacccaaattagtgtcagccgaaaggaggtttcaagatagtcctgtcagtatttgtggtgaccttcagattagacagtcttcatttccagccagtggagtcctggctccagagccatctctgagactccgtactactggatgttttaatatcagatcattacccaccatatgcctcccacaggccaagggaaaacagacaccagaacttgggttgagggcactaccagactgacatggccagtacagaggagaactagggaaggaatgatgttttgcaccttattgaaaagaaaattttaagtgcatacataatagttaagagcttttattgtgacaggagaacttttttccatatgccgtgcatactctctgtaattccagtgtaaaatattgtacttgcactagccttttttaaacaaatattaaaaaatggaagaattcatattctattttctaatcgtggtgtgtctatttgtaggatacactcgagtctgtttattgaattttatggtccctttctttgatggtgccttgcaggttttctaggtagaaattatttcattattataataaaacaatgtttgattcaaaatttgaacaaaattgttttaaataaattgtctgtataccagtacaagtttattgtttcagtatactcgtactaataaaataacagtgccaattg

SEQ ID NO: 12367 - DNA, 123 bp, Homo sapiens
caaagtatgccctgaaaaaggttgacgagattagagagatggttgacaatgatttaggttttcaacaggctccactaatgtgctattccagaactaaaacacttctctttcattttccaattg

SEQ ID NO: 12368 - DNA, 1298 bp, Homo sapiens
tgctgcaggtatattcatttttattatattaatagacttagttacatataaataaacacaaaaagcaaatatcaactgaaaggtttggttgggtagtcaactaattttgttcttttctagggcaattcaagaaggtaacatttgaaaggtttctaaatgatgcacactgtaatcattcattctttgttaaaatacaacacaaaccaacagctacaatgctttttatttttaacaaaaaggatgtaaggagggtaagaaaaacagaggacagtaagataggatgtaaagtgtgatgtatctctggacaccatccctctctgcctgccccacacccaaaagttttaaataatttaaaggataccaattacagtaccagaacaccatcaaaataattgtctttatcagggtcaaaaaatacagtgattatgaatgagctgtgaccagttacgaaattttactggaaatgtttaactgtggtcagcagtccaatggtgtgcacagtgccttcaattaatgcacttgagcatacgtaattacatttctggcagggtccacacgccccaagaaaaggtaaagctaagcatttcatttctacattctaaactctggaatcacagagcccagtttaaaagaaaagtcacagtggataagagatgtatataaaaaatacaaggtgtttctttcaaatcaggagttgtgggactacattctttttttttttttttctttcttttcttacaaaatgcgattttagaaaaggatagagactccagttcatgttatactacagacttagacagtgaataagtatattgcatgttttggtagtcagtcttcaggcttcctttcatttcccctagccccaggtttctttagggtaaagcatgtgagtcctgaataaagatacaaaaatgcatttgcagctcttttcttgaattctgcagacttcaaagcctgcaagtcatatattccatcatcaatgaccacaatttttctttagctttgtacacctattcttgtataacaacagtgcatggcacaaatgtacaagaaaataactggttttagtctctacagtttctatatggagtaaaataagttaaaacttttctaatgagaatagctgacaggcagcatacatctttattttacattttaaagtctctgcaggcatctactttggttagttatcaacaatcataacataagcactgatcagagaactgagcagcattccaataacgttaacagatatattatttccttttggaatacggggaaagcccagttttaaatat

SEQ ID NO: 12369 - DNA, 892 bp, Homo sapiens
  misc_feature (1)...(892): n = a,t,c or g
ggcgcgcagctggaacctccggctgtcagtgcgcttacagttcctaaccccgaccctgcgcgcagccgcagctatggcagccccgccgcagctaagggctctgctcgtagtcgtcaacgcactgctgcgcaagccggctaccacgctgcgttggccgtgcttaagggcttccggaacgggctgtctatggagccaaaatccggggcccctcacgcgctggtcatgacctttctcttccggaatggcagcctccaggagaagctgtgggccatactggcagggccacatatatccactcctgggaacctgggcacggtttgtgtttcacctacaagggtctccgtggccctggcagttcctaacattacaaggcaagacctacccaggcacacgcatttcctggggcgggcctttccttcgggggtattctgggtgttttggagaaaacaattaacattcaacagccagatcaaacatgtacctgttgtcacgcgtccctgtttgccctgaagccgccctggctgtaagaagaaagggcctacatccctgaaaccccaggtgggacccgtttcccgctgctcactgcggtggtgtgggggctggtgctgtggctctttgagtatcaccgatccacncctgagccctcgctgcagtcctccatgacctacctctatgaggacagcaatgtatggcacgacatctcagacttcctcgtctataacaagagccgtccctccaattaatgcagccctgaggtgtctggctgtggctcaagatttggccccatgcagaccctcccaaaggatactgccttctcaagatcataggcctcagactccaactggtgttatcccagggttctgtttgctgaagtaaaaacactgattttaaa

SEQ ID NO: 12370 - DNA, 719 bp, Homo sapiens
cccacgcgtccgagccgtcagcagagatgaacagaataaccaccaaggaagccacttcctcctgccccccaaaatcccctcttggagagacccgccagaaactctggaggagcctcaaaatgctccccgagagaggccagagggtccggcagcagctaaaaagccacctcgccactgtgaacttgtcgtcactcttggatgtccggagatccacggtgatctcaggccctgggaccggaaaaggcagccaagatcactcaggggatcccacctcgggggacagaggctacacggatccctgtgtggccacatctctcaaaagcccctcacagccccaggcaccaaaagacagaaaggtccccaccaggaaggccgagaggtcggtcagctgcattgaggtgaccccaggggacaggagttggcaccaaatggtagtgagagccctatcctcccaggagtccaagccagagcaccagggcttgcagagcctgagaacgaccagctcccggaggagtaccaacaaccgccaccctttgcccctgggtactgctagagaacaggtccaccctggctctgggactcgctgccaggggctgccacactcctgaatgccttaacatttcttccatggccccacaccatggcatccgggggtcttcgggaacccgggaaatggaataaagatgtttttggggtctgaaaaaaaaaaaaaaaaaaaa

SEQ ID NO: 12371 - DNA, 162 bp, Homo sapiens
gaagtgattgagggccgacagttaagtggtaacaacataaggcctgtggtcaaagttcacgtctgtggccagacacaccgaacaagaatcaagagaggaaacaaccctttttttgatgagttgtttttctacaatgtcaacatgaccccttctgaattgatg

SEQ ID NO: 12372 - DNA, 707 bp, Homo sapiens
  misc_feature (1)...(707): n = a,t,c or g
gccacttcggcactgcttaatccagatattcttgttaactaagcattgtgcttcccaggtggtctgaagtcaggtactctctctctcaacacctgtagttgaatatgatttggtcagttgctcgttgtaacttggagaaattcctataaagtaagatctccttgcctcttccatccattgttggcacccccttgcaaaaggaaaagaacagcaaaagtcaggagcagtaatctgagaaagttaactccaggataggtaggtttctattgttatagctagatgtaaatctttagttccaagaagtgatagagtttctgctttaataatttgttgataagtttacataaacagaaataaaagatactatctttaccgtagtagttcaggccaagattatgcttagttttagttctccaggtagttacttttgccatgtcctattgatcagtgacactgccagagnccataccggcaagaggaagaggacgtcattttgtaaagtttaacttcttagcgaactgatgtgccacccagtcacagagtggagttgtgaattcatgtagaggtggcaaacctctaccttgtgttgatgagagaataatccttgggcagtctgggaaaaattaaggaaggcatctcccttcttactcatgggagattcaactatagggatttttggaaaccttaacccgccctnccttttattg

SEQ ID NO: 12373 - DNA, 287 bp, Homo sapiens
agagacttgggaacagctacacagggagctagaacccctgctccccctgtccccaccccaggagagtaaggggacgagggccagctctctggcatcaggctgcttggacatgaaaccccgtctccaagctcaagctgggagaccctggcccagtttccttatctccttgggcccagccttccccttgctagctagttcttacttcataaggttttagagagaaataaacgcagtaatgcatgaagagtgccggcatggtgctgagccctgttcctgctctcctccag

SEQ ID NO: 12374 - DNA, 457 bp, Homo sapiens
ttttttttttttttttgtaatcccttaggaaaccttacacctttacttgctttattatcaggtaatttccaggatgtaagccatacagccagaaggcagggtacaaaggagaggaggcagagatggtacactcatacagaagcttctcctgattgtccactgaatagaaggcaagctttccctcctcaaggttcagccagatgcccaccaccccaggtctgtctgagccaaggacagtttccttgaccatgtgccatgcagagagctggctagtccccttccattccacacaacaagagtccatagtccttcccaggacctggtcgcggctcatctcccaggaagccaccccaactgcccagtggctgcaattcctagtgtccacttcccagtaatgctttccagaagacagggcctgggaacataagacctggctggtagaaaacctctcacagct

SEQ ID NO: 12375 - DNA, 532 bp, Homo sapiens
  misc_feature (1)...(532): n = a,t,c or g
agtcaccaggttcccacgttttgttgctttcctaccgtctcaaaccaggttcatgaaagcatttgaacagagttcagtcttcattttacaaaaaaaaaaaaattcctaatagtggctaaaatactgcaaatttctccattcgattacaatctacaaagataaaccagcattcctttctctttctctcttttggttacttttcccctatccctactggtggaacatttattttttcacacaggttttaaagaaatacattatgttggtttctagtgtattgtacagaatccattctcattctttacttgctacattatgactatgaggagggcagagtagaggtgaactctctgtatacttgctgaaagtcttcttgtacacattgctttttgtacccgtcgcttctagctatgtatcttcctgttctctgccctcgtctcaaactatgttgccacctcaattaatcaggcacttgaattcacattgtgtagnactctcaaggttgatgatagactgggaaggaggaggaagg

SEQ ID NO: 12376 - DNA, 374 bp, Homo sapiens
gaactgaaagcgatgaaaagcgttccacacgccacgagcccgcgggatcctcggagagtatggaacccttcccctccgctctcagccggaggccagctgcgtccagccgggctcggtcttctgaacaccgatttcaaatcaggtccccggggcccagcgtcacttagggaagtggtggcattttgtggttgctgctaaatcacggagagcagccttggcgctgccggtcccaacttgatccaaggagccttgagaaggagatgagattcagtaccaggggccggccgtggctcccatcctccggaatctgcaaaatggctacttcttcagaaataatggggagagggatggcaagaggccagagatcaaggccc

SEQ ID NO: 12377 - DNA, 392 bp, Homo sapiens
agggccaccacttattatctagcagatcgtcgctatgacatgctgccttccgtcctcagtgcagatttgtgttcccttctgggaggcgttgataggtatgctgtaagcatcatgtgggaactggataaagcctcttatgaaattaagaaagtgtggtatggcagaaccattattcgatcagcatacaaactgttctatgaagcagcccaagaactactggatggaaacttaagcgttgttgatgatattccagaattcaaagacttgggtgagaagagcagacaagccaagctggaggagttggtgtgggcaattggaaagctgacccgacatagctcgccatgtcagagctaaaccgagacggatgtggtgccctgggaactggaaggggt

SEQ ID NO: 12378 - DNA, 392 bp, Homo sapiens
gcctagggtgacagagcaagaactcatctctaaaaaaaaatttttaaataaagcaaaatatgccacagcatagatctgattgtagaaaattattatatggagaactgaaaaatctcctaatcaagacaaaaattttaaatagaggaaaaaaatactatctatcattagttcaagtttccattaagagtagagtgtgaagtagctccaagttcagagctggagaattttgcatctctccctcttaccagccaattgactttaggtaaagaatactagagttttttagttagtaaaatatagttaataattctgtataaaggagcaaaagtaagtttctcattgtttcctatctcccttcataggtttgacatgttgaaattgcctgtgccgaa

SEQ ID NO: 12379 - DNA, 374 bp, Homo sapiens
ggggagacttcaggagtcgctgtctctgaacttccagcctcagagaccgccgcccttgtccccgagggccatgggccgggtctcagggcttgtgccctcttcgcttcctgacgctcctggcgcatctggtggtcgtcatcaccttattctggtcccggtgcccttccagctgtcacctgaaatggctttattcgtcaccgtctttgggctgaaaaagaaacccttctgattaccttcatgacgggaaccctaaggacgaagcctacaggggcaagggccgcttcgtattcctggaagaaggaaggcataggcttcggttttcccctcggaaactgcttctgctggaggatatgtgttggaataattacgtcttg

SEQ ID NO: 12380 - DNA, 211 bp, Homo sapiens
  misc_feature (1)...(211): n = a,t,c or g
cagtgggcagtaatttaatcatggtggtggttaccctcatgctgttcttgtgatggtgagttctcatgagatctgatgggtgtttttttttgttttgttttttgttttttgagatgggagttttgctcttgttgcccagactgggagtgcaatgggcacacgatctccggctcaccgcaaccctctgcctccngggggttcaaggcgattc

SEQ ID NO: 12381 - DNA, 555 bp, Homo sapiens
ggacttgtggtgcgctgccagggctccgcagcgttgccggttgtattcgctggataccagagggcggaagtgcagcagggttcagctccgacctccgcgccggtgctttttgcggctgcgcgggcttcctggagtcctgctaccgcgtccccgcaggacagtgtgtcaggcgggcagcttgccccgccgccccaccggagcgcggaatctgggcgtccccaccagtgccggggagccggaaggaggagccatagcttggagtaggtttggctttggttgaaataagaatttagcctgtatgtactgctttaactcctgggaagaatgaccagatgacaaagatgtgcttcgagaatgtgttggttttggacgaattccaactttgttttcacgctatatcaggatgagataactgaaagggaagcagaaccatactatgcattatccaattggtttgctatttgatcttcttgcatcaagttcagctcttccttggaacatcacagtacattttaagagttttccagaaaaagaccttctgcactgtccatctaa

SEQ ID NO: 12382 - DNA, 63 bp, Homo sapiens
cccgggcgaacatcctcgggctcaggaacaacatctactgcatggcccagctgctggacaact

SEQ ID NO: 12383 - DNA, 374 bp, Homo sapiens
gttggtgaaataacaaaagaagatttgatacaaaaatcccttggtacttgtcagggattgtaaagtccaaggaccaaatctttgggcatgtctggagaatagatgttcatatgttggctgtggtgaatcacaagtagatcacagcaccatacattctcaggagacaaagcattatctaactgtgaaccttaccactcttcgagtatggtgttatgcttgcagcaaagaagtatttttggataggaaattaggaactcagccttcattgcctcatgtaagacaacctcaccaaatacaagaaaacagtgtccaggattttaaaatacccagtaatacaacattaaaaactcctctggttgccgtatttgatgatc

SEQ ID NO: 12384 - DNA, 731 bp, Homo sapiens
gaaaaggcaaagaaggccagcgagacctctccattcccaccagcaaagagtgctacagctatacctgcaaactgaacccagccatgggcacagggctcagccagctccaaggacaaggtgtcccccccaccctggggacaaggcatttccaagccccacctccctctccaagttcaaggactgggctggcaaacccagactgcccatgagaccctgatggtgatgaaggcttgctcgagagttgggccaaaaaagtggctgtagggtgagaagaccaatcaaggcctgcccctctgtgctcccacggagggctggcgggggcgctgtggttccagaacatttcatgacctcaggaaaaaaggaaccttccagttatttgagactagtggccaagtggtgaaacctccatctccctagaactgtctgaggtgggcaggggaagggagaccttccccaccacctccttagcctggtgtgagaaacagtttttagaaaatgagagaagggatccccaagtagccaaggcccagagaaacttttgttcttctctccttagcccacatagacttcacagaatcgtctgagaaaggagagctttttcacccctggctttctagaattttctttgtctgcatttgtgaatataccacacatgatgggtgtctctgagccgaccaggattatggaaactcaattgtcagaggacccaaaacaaaacttagagtgatttg

SEQ ID NO: 12385 - DNA, 455 bp, Homo sapiens
  misc_feature (1)...(455): n = a,t,c or g
cgcgcccacgctgggccgggagtcgaaatgcttcccggtgccgggagtgagcgatgantggcttctgttcctggcccacagagtcgccttggccgccttgccctgccgccgcggctctcgcgggttcgggatgttctatgccgtgaggaggggccgcaagaccggggtctttctgacctggaatgagtgcagagcacaggtggaccggtttcctgctgccagatttaagaagtttgccacagaggatgaggcctgggcctttgtcaggaaatctgcaagcccggaagtttcagaagggcatgaaaatcaacatggacaagaatcggagggcgaaagcatgcaaagcgactccgtgagccactggatggagatggacatgaaagcgcagagccgtatgcaaagcacaatgaagccgagcgtggagccggcgcctccagttagcagagacacgtttt

SEQ ID NO: 12386 - DNA, 472 bp, Homo sapiens
caggctgcattttaggacttaatatggaaataccagagtctgagctcctctaccttgagtttcattagtccttagtgtctaggagacaggaaagaatgctctctgtgactggagaggtgacatgcaggtgcagtgtgtctggagtccctttcccctgctgtgagacttcagtggaggagagaagcattgtaccctgggatcatttggttggttccaatcacaagcttagttatcaggttgcatgccttgtctcctgcaaaagacagaatgtttcacaattcccagggtaaactctggaccattccaagtgtcctagccttctgatgacattaattacctagttgtgtcgaggagtataggatggactctcctgagaagggggaggttggtggctttgtcttttctttttgctggatcctgaactggtctagacctcctgcccccaccccccagcccccatcagatgtggctg

SEQ ID NO: 12387 - DNA, 189 bp, Homo sapiens
ggacagtgcagattcaggaaggtgcagtggctactggggaagacccaaccagtgtggctattgccagcatccagtcagctgccaccttccctgaccccaacgtcaagtacgtcttccgaactgagaatgggggccaggtgatgtacagggtgatccaggtgtctgaggggcagctggatggccaaactg

SEQ ID NO: 12388 - DNA, 334 bp, Homo sapiens
caaaagcagtctcttgaaagtttaatattatatgtttcagtgtaacataatcttactgggagtgtgttgaatacaccagaactttttgaattgtgtgctgaatgatgtacatagtctagaagaaaaaagcccaagtcttgtgcacatttaaatcgtgtacataagtatttccgtatttcagtaaagtagataaagcactcgttaaatagcattgtttacatcgaccaaatattgcctgtttcctttaattcaaatgcattaggttcccgcctccctctccttccccgccatgttgctgttttaaggcttcatatgtattaacatttctctgatc

SEQ ID NO: 12389 - DNA, 710 bp, Homo sapiens
  misc_feature (1)...(710): n = a,t,c or g
ggtacttctctacctatcctcctctgctacgccccccaggtcctcctgcgtctctgtgaagtgactcccattattcactgtttcctgatttggtaggatgtattttactatgtaaacatagccccctaggattatggaacccaaagcagcatttatatctccatctaaatggagacagataaaatagtccagaaacctctcctcaggttgcttttgttgtctgtttttgggttacgcagaacagggatgaggtgggtggcggggagggcatagaatgtgaagttataagcacatagtggagagttaggagtgggaacagttgagctgttgtatctgctttttatttttttcctcccagaagggtttttggtttttttaaaacctgttaaaaatgttcctgcaccttaagtcatactgagattaaggccaagggtgcagaatcttgtgcacgtgtctctgtgagcacattcacggngcatgcancatntgggatgtcttctgtgagatcactgaatacacttngggtcactggtgtgtgcaaagggtggtgggtggggggagtnnccaggaaagaagtgcagagatcagcaaagccctttgggnaggattgnncaanagatncaagggcaggnaggacccatnaggggtcaaggacttatagaaaaagggccccagntaaaaaaataattaattctttnggttnccccccc

SEQ ID NO: 12390 - DNA, 523 bp, Homo sapiens
agctcttgcccttattggtgctacatttctagaccggggagacagacagcaggcaaatcattaatagatactatgtgccagatagtgataaatgccatgaaaaacataaaatgagagacgattcaccttggagcaaaagattacttttaagtgactgaaataactactaatcctgactaatttattatcaagagttaattggtattccaaattcattgagcagggtgctaaaaacaacccaaatgtgctcctttaactcctttgtttaaatgacaaaagttagaatgtggtcactcagacctaactgtgcccttagagccaaagctgtggtgtcattattggttatttctagttgattcatagtttgtcccaatccaggttcaatcgggttatttttaagatctgtacaatattgcataatagtaacccagttaacttaccacttaggttagatttcctggaggaacaaaggtagaaattcaaccataggtcaaattatcacatagaaggaaaaggctttttt

SEQ ID NO: 12391 - DNA, 425 bp, Homo sapiens
cggcttttctctttagcgctcagggcgctgacccactgctcttcctcttaagaaagtgctccattccttccggcgcccggagctgctggcccaaaggatccggagcgagctagggcagacaccatgaccacccttgatgataagttgctgggggagaaactgcagtactactatagcagcagtgaggatgaggacagtgaccacgaggacaaggaccgaggcagatgtgccccagccagcagttctgtgcctgcagaggctgagctggcaggcgaaggcatctcagttaacacaggcccaaaaggtgtgatcaatgactggcgccgcttcaagcagttggagacagagcagagggaggagcagtgccgggagatggaaaggctgatcaagaagctgtcaatggacttgcaggtcccatctgggat

SEQ ID NO: 12392 - DNA, 385 bp, Homo sapiens
acttgatcaccactgtgactccggagaagaaggctgaggaggagcgggacgaggaagaggacaaacggaggaagggggaagaagtcacgcccatctcggccatccggcacgagggaaagactgacagtgagcgcacggacaccgcagccgacggggagaccaccgccactgaggagctagaaaaaactcaagatgacctgatgaaacatcaaaccaacattagcgagctgaaaagaaccttcttagaaacctcaacagacactgccgtaacgaatgaatgggagaagaggctttccacctcccccgtgcgactggccgccaggcaggaggatgcccccatgatcgaaccacttgtccctgaagagaaaatggaaaccaagacgga

SEQ ID NO: 12393 - DNA, 375 bp, Homo sapiens
gagaattccaggagggaagccgagaatatgaagctgaattggagacgcagctgcaacaaattgaaaccaggaacagagacctcctgtccgaaaataaccgccttcgcatggagctggaaaccatcaaggagaagtttgaagtgcagcactctgaaggctaccggcagatctcagccttggaggatgacctcgcgcagaccaaagccattaaagaccaattgcagaaatacatcagagagctggagcaagcaaatgacgacctggaaagagccaagcgcgccacggatcatggtctctcgaagacttttgagccagcgcttgaatcaggccatcgaaagaaatgccttcctggaaagtgaacttgatgaaaaagag

SEQ ID NO: 12394 - DNA, 59 bp, Homo sapiens
attatgtattcttttaaaatttcctctgatactataagctttttgcatttatctgaagg

SEQ ID NO: 12395 - DNA, 524 bp, Homo sapiens
tttcaaaaataaatttgcactgttcatttttctggcctcgctgttctccatagagcaagggtaatcctagaaaaatttttttttttttaaattatgcaacgtaagatgtcctccttgatagaagtcttagctcctgtgttacaagggagaactcatttgagatcagtctgttggcattgcaatgaagtgctttgtatcaggaaagtgtacactattgaccttttttcctgttcacaagctgagccatatgtacataatctagattttgttttcatagttttgcacttttatagcctatttttgaagattaacacatttgcaagatgattgactcaatctttgcctaatccaatgagtgttacagagagcttgctgtgactagaaccataaatcttaaagggggtatgtgataatagagggctggaatttaaacctgtattttaaaaaaaaggaatcacccaaatctattttggaaaacaagtcggtttgtattatgctgggatttttttggggtttcagatttc

SEQ ID NO: 12396 - DNA, 297 bp, Homo sapiens
cacaagggatgtagccaaaactaaatgcaagtttgtgcctcagatgtcttcctatcagaacagagtcaaatccagattttgatgcttaaatgtgacagcttattcagatttagaaaaacttttggtatgggccaaagaaaacatatccttaaggggatatggcccctaggccctcattttccttttctgtctgagcaattaaaaaaagcattaagtaaattccacaaattctttggaatacctagagataaaccagatatcatgttaacctgtatgattaataaagttagaatactt

SEQ ID NO: 12397 - DNA, 516 bp, Homo sapiens
ttttccacagtctgtttaaggtattaggaggacttttataaaccgagtgtttttcaggttacttcagagaggagtctccttccacccaaaaaaactaaccaaattattttatcataaagaggtaatcccatttttatgtccacaatttttacatttttgtatcagccaccaataattttgactgttttgtcaagtacatatttcatcaatcctatttccacagccgtacatgtgatcccagtgactgatagatctgtagaatgtgaactcacatttaaagtttattttgggaaggcatatatgcccttttgatgacacacacaccaaaatatataagagctgtgcatggtaaacccacagtagaagggaaaaagtaatgctttctggtatacttcagaggctccatttgaagatgtgcgttgatgtttccttgattattttgaatgaggagtaggcggtaatatttaacaggtagcatacgtatctaagcatatagtaaatattactagtacttgt

SEQ ID NO: 12398 - DNA, 472 bp, Homo sapiens
cccacctttagcgagaccaacgagagaacaccgcctgcagctagaacagcctggtcaggagcgtaacggagtgttgcgccaacgtgagaggaaacccgtgcgcggctgcgctttcctgtccccaagccgttctagacgcgggaaaaatgctttctgaaagcagctcctttttgaagggtgtgatgcttggaagcattttctgtgctttgatcactatgctaggacacattaggattggtcatggaaatagaatgcaccaccatgagcatcatcacctacaagctcctaacaaagaagatatcttgaaaatttcagaggatgagcgcatggagctcagtaagagctttcgagtatactgtattatccttgtaaaacccagagatgtgagtctttgggctgcagtaaaggagacttggaccaaacactgtgacaaagcagagttcttcagttctgaaaatgttaaagtggttga

SEQ ID NO: 12399 - DNA, 270 bp, Homo sapiens
atatgtattgaatatctagatcatttccaaataagatattaatatgatactgaaacatttattgctgaacataaatttagaacttactttgcctacctattacagaagaacaaaagatatttgggcctattaaacctttcctctgccatttcctgtcctgtgtcataggactaggaatcgtgtttctagaaagtatgaaatcgtgtgcttgcaaacttggaagaaaacagttcatgactgcataccttctagttctctagtgttcactgg

SEQ ID NO: 12400 - DNA, 309 bp, Homo sapiens
gttctctagtcattcttcaggggtcacagtctcagaaattctccagtgagcacaaaaatcttagccggacaccttcacagatcataaggtaaccttcttgaatgtaagagaagtatagaaatcaagtaagaggcatttgttatatttgccacattatgtgcatttgaataattataactttttactcatatcattgtccctatattagtattaagagcattttgtataaaacttcatgtgaggatctcaattctttataattctcttcaaagcaaggaagtatatatagagagacctttattttttaga

SEQ ID NO: 12401 - DNA, 449 bp, Homo sapiens
ggacagtgtctatactttttaaagatgtatataaatgtttcatgttattggttttgtacctagtcctttgcatggatatataggtacctaatgaaaatcgaggatcagtgtatgacaaatctcccatcctcccctttccttattgcctgtgtcggcaataggaagtagaatagttgtgtgttgtttacttacttgtctgttttagagagatttctatttttggtaggggaatattcttaatatgttttcatatctttatttcattttgtagtcttttgcatggctatgtagggacctaatgaaagtcgagtttcataatatgacagctcacttcttttcctacatatttcctcacttagcagtagctagtgtagttattttgtggttattttatttcattctctaggatctattccattagggatgcaagtgtgtagatgcatatatat

SEQ ID NO: 12402 - DNA, 356 bp, Homo sapiens
ttttttttttgctgttttataaacctttattggaaaggctacaaactttatattgccaccacatttcttatgtttaaagtggttgtggggaagtaaccttggatacaaaactactatgctgttgaatcttacccaggcttgttgtaaaatattttttgtacaatggaggtagagtggataggtcaataatttaaacctcacaggacttgattagtgtcagcacaccttttttcattcaggttttcaggttctagcagacctagaaataaactacaaatactagatttaggctcagggatggcatttaatacatttaaaatttttagttttcagttttccccatttgttcctttata

SEQ ID NO: 12403 - DNA, 444 bp, Homo sapiens
  misc_feature (1)...(444): n = a,t,c or g
tgattcgtgaataaaactaggtacatagtaagtgtatgatagatgtttgatttgtaaattacaaatataaattatcacccccatttccatttattttcttgatatatcaaaatgtgttgacttagtgattctcaatcttagctacatattagcctggcagagctttaaaaaattgatacctgggtcctattccataacaactaaatcaaaatcacccttttttttttttttgtaaagctttccagggtggttctaaaggacacctgggggtcaataacccattataaaatgatctgattacactggacactcttaggaagtatcaaaatagaacagttcaatttgcagctacttaatgattaattacatttcttaggtttttttttttgttttttttttggtttgtttgttttttggtttttaaaaggagacaggntcctggct

SEQ ID NO: 12404 - DNA, 648 bp, Homo sapiens
tcctcattaatttatcatttaatataaatgctgacagaaagcagataaagaccttgtagacattttcatatatttacaatccaaaaggtgaatcacctccttctacttgttaaaataaatcattttatctgcaactcatgggagccttaaacactaattaggagcaacatgaggctgagtcagtttccaaggtaataaaggaaatagcattttaacaaaatgggcatctttgatataaacatgcacacaaataatacaaaattgagaaagatggccctagtactctcaaaaatcggcaacaagtgggaacatgtacttatttagacccagagttctgctgccctaaacatcttcctactactatttctttttttccaccacacttgttttgaaagctgcttaaaaatcagaaatattaaacagattaaaaacaagagaaaaacggtctatttcaaatagggttctttttcctactccaaaagaactctcaggagataaggtcttcaaataagacttcacggtttgccagatcctaaggaattattcacagcctgtgaaattccaatccatttgtcttcaccattccaacctatttgtcttcacttctctttttaaagttggaaacacttggaaaaagtaaaatttcac

SEQ ID NO: 12405 - DNA, 775 bp, Homo sapiens
cccggagagacggcgaaggagctggaaaccgagccagggctgagccggctgacaacaggcatcgatcgaaggtttccggtaaccagcatacaccatctcatccgaaacagcggggttcggcttctcctatggcaggatctggggcgaaaagatcaagagatggtgaactggagaccagtctaaacacccaaggttgtaccacagagggagacctgctgtttgcccagaagtgtaaagaactccaaggatttatacctcctctcacagacctactcaatgggctgaagatgggtcgttttgagagaggattaagcagttttcagcagagtgtggcaatggacaggatccagcgtattgtaggtgttttgcagaagccacagatgggggaacgttacctaggaaccttgctacaggtagaagggatgttaaagacttggtttccacaaatagctgcccagaagtcatcattgggtggtggcaagcatcagcttgaccaagcattttccaagccaccacagtgattcagctgcttcctctcctgcatctcctatggaaaagatggaccagacacagctaggacatctagctttaaaaccaaagcagccttggcacctcacacaatggccagctatgaacctcacctggatccacaccactccaatttgcaacccccctctcagctccccaggtactatctcctttagccatggtcctttaggcactggaaccggcattggcgtcattcttttcctccagcatggagtgcaacccttct

SEQ ID NO: 12406 - DNA, 548 bp, Homo sapiens
ttttttaaatttttttttttttttcaaaagtgaaataagtcagtttattttatttctaacaaggcctttttctcctataattaagacaaaccattttacactttataataacataacttagtttttagtattttcaaaagggaaagattttgggtggggggaatttaggaagtcaaatattttagaaggagtaactatagaagttactttttcaatcttaatatattaacaggcttgttaccaggtacattacccagcattttttcttacaaggaatctattcaagtactagccaacaaatagtctacatttagaaactgagggtagaaatgtctgtattttaataggaaacaagcatctaaaatacaaatcacatgtctttaacaaggcaatttacataattaggtgtaagtttttaattaactttatgttccttaggatcctagcaaacactcagttgactgtatctcaagttcaaactgcactcacctggctataaaggtaaacatcacaatggaattgggcctgtctgactagggaaaaagatc

SEQ ID NO: 12407 - DNA, 513 bp, Homo sapiens
  misc_feature (1)...(513): n = a,t,c or g
ttgannctntgattccatnnnnnnnnnnnnnnnnnnnnnnnnnnnnnnnnnnnnnnnnnnnnnnnnnnnnnnnnnnnnnnnnnnnnggcacgagagaatgtccttggtaaagcaggaaaaataattgattttattaaatctcaacctttgagaacacatctttttaatattcagtgtgacaaaatggtaagtatgcctaaaggacttttgatgcatatcaatgtatgatggttgccttgaggacgagcatgtgggtagttatttgagttgcaagctaaacttgctactttttaagtagaatgctattttcatttgatagagtggctgataaactatggttactcacacagaggtatttggcagacattttcttgaaaatgaacaaaacgagcctgtcacttcaaagaaaacaaccgactgtatttgttgccaatggtaaaatttgagtttttatgtgaaaattagaattttaggaaacttgtatctaccaccatgaacttgacagcatgtcaa

SEQ ID NO: 12408 - DNA, 1519 bp, Homo sapiens
ggcacgagcccgcttcgagggttctctccccttgccaccatgagcgagtcatttgactgtgcaaaatgcaacgagtccctgtatggacgcaagtacatccagacagacagcggcccctactgtgtgccctgctatgacaatacctttgccaacacctgtgctgagtgccagcagcttatcgggcatgactcgagggagctgttctatgaagaccgccatttccacgagggctgcttccgctgctgccgctgccagcgctcactagccgatgaacccttcacctgccaggacagtgagctgctctgcaatgactgctactgcagtgcgttttcctcgcagtgctccgcttgtggggagactgtcatgcctgggtcccggaagctggaatatggaggccaaacatggcatgagcactgcttcctgtgcattggctgtgaacagccactgggctcccgtccttttgtgcccgacaagggtgctcactactgcgtgccctgctatgaaaacaattttgctcctcgctgcgcccgctgcaccaaaacgcttacacagggtggattgacataccgtgatctgccgtggcatccaaaatgtctggtctgtaccggatgccagacgcccttggcagggcagcagttcacctcccgggatgaagatccctactgtgtggcctgttttggagaactctttgcacctaagtgcagcagctgcaagcgccccatcgtaggactcggtggaggcaagtatgtgtcctttgaagaccgacactggcaccacaactgcttcacctgcgaccgctgctctaactccctggtgggccagggcttcgtaccggatggagaccaagtgctctgccagggctgtatccaggcagggccctaagccagggctcctggaccaaggctttcctataccacgggcccaggactgtggctccttttctaaaccacctctgggactcagctccccccgccaaaaaaaatgggtctccttctgggctccaggattgtctccccactccagcatccccaaactggtactccctgacccaggcccccaatcctgggctcttacagagcatccatgagtcaagccccctccccacacctggactccagaattcaccctctcccctgcagtctgggttcccagactgagtcctctccccaaatcagggctctagacccgagccctccaaacctggactctgggacttaggcccccttaaatctagacttctctttataggtttcaggtctcctatgggtgcctgggaagtccttgaaagtggactgttctcaggcttgacctgccccaccccatccccgcggttgaggctgtgggggcagcagatcaggagcccactgataaggggccctaggggtacagggtgctgccccagcagggtcgccaccgagtgtcttctcattttatttcagctccattttgcccatagatgggcagaggggtgagattggctcatcccccttccagattctgcaataaagcggtgtgagga

SEQ ID NO: 12409 - DNA, 793 bp, Homo sapiens
ggcacgagggtgtttataactattttgtattataaagtgggccttagagataggaagaagaatgatggattccttttggatcaatcagaaaggaaacacgaaagaaaagtcaggaaggtagagagagaaaaagggagggaaggagaaagaatgggaataaaataaggaggtaagagatactatttttgctgagcaaccagtgtgtttcaggatgatacaaagaaaaatatagaatagaaataagtgcaggcttggaatcagctacaaatcctaaagatggggtgtgtgtggatgtgtgtgtgtgtgtgtgtacaccattgtgtgtttgtaaaatgtgtatgttcatgagtaagggtgtgtgtgtgtgtgtattaaaattccagagtgaccgtggcacttgggtgtacaggtaattcctccagagctgtttgctggcttcaggagtggagtgagaatttcttttttatgaaaagggatataaaggcaccgagctgatgcagtatttgtaatattaagttgacctaacaaggtatttgcatgagtcacaattacaaagttttgagcggttttgtaatttgacatttaggaaagtctcctatttattctcatactttacattcatgcttagtatactatagaggatgccagctttaatctttctgtcatttaaagcaatatgataagggtattcaataattggggtgccctaaatttctggatgagaaaattttcaattctggccatgagaaagaaaaaaaaataaacagccttcttttttaaaaaaaaaaaaaaa

SEQ ID NO: 12410 - DNA, 398 bp, Homo sapiens
tttttttttggaggatagggagtatggctgttgtgaaaagggaggtaaagagaaatggtagatctgaagaggcctcatcagagcacatattttaggacaacacatatggaaattggacatctttaagttggtttccatagagctatgcatgtatccttacccccatgggaaaatgttggtgtgttctcaagggtatgcatgtgtcattttgaagaccaaggccctagaattgtcaaacttaaggatcataaaaatcatgagggttgcttgttaaaaatgtccaaacgtgcagagactgatctttgagatctggaccaggaatttgcatttgaacaagtgttcctggaatctctatgcaagttttatacagaacatacttttggaatccttgccctaga

SEQ ID NO: 12411 - DNA, 334 bp, Homo sapiens
gatctcttaaagcagacatttcttggcattggtgggctgagaactatactgttcacaaattcaacaaacaagaaatgtctgctttaagagatcagcactaacaggtaacatcaaagagagaagccaactgtaggagacacatcccagtgtgcttagttaatccgtcaggttttactaacacacctctgaaaagagatgcacatcctaaattcacagatattaaacaataatcactttccttacgtctatataaaatgtgcttacctctttgacagcttcagtcttaactgcaaagaaaggttattaagagaacccaattgtaggtgccccaact

SEQ ID NO: 12412 - DNA, 1000 bp, Homo sapiens
tttttttcttgggattttaaaatcattttattaatccaacagtacaaaagacccccaccaccaccgcattctgccatcactttgttccaaaaagtagtggagtgagagagcaagagggagcagatccagcaaaaacactcccccaggggccattttacaaaatgcggacaggggaagacaacacaaaaacagcaacagataaatggggcaaacagaacaacaaacacaagagttgagcagcggggtgggggtggggggttgccatctacgccgttttagtgtgagggacactgggaacgatgcccagaggctggctctcctcccagcctcaaaaggttgttcagctcccaccagaagcagggtcttctctcctcatgcccaggaactgagaagaagtgggggtaggggaccactaggtctttgccactgtatcttgagctgggggactcctaacttctccgagggccacaccccatgcctgccttccccaccccatggaggaatgtgtgcatgaacagaaaaggagaacgagcagcgctaaggtcctcactcagccccaggcccatctctggcaggcagtgcttaaaaaataaaaaaagacaaataaagcccagtgcagcctttggctgagaggaatgagaattgctaattaatcaccaggcccaagaggatatgaaagaatagcaaagagaagcaacaaactccaggctcttctacctttgagtaccatggcaatgaggatcccgccgcatcccctacccacaggctgtgacagggcctcacttggatccttttatcatggaggaaatgaggtatagggctctgcgccttttcaagctttccttcaatcaagccaggaaggcaggggaataagggcgccgaaagttgaagaacacacggagtataatgtgcaacagatgggctgggggaggagggtaccaccaaagtccagactttcaggacagcccaaacttcaaatattctggtctgtcagataacc

SEQ ID NO: 12413 - DNA, 499 bp, Homo sapiens
gtgatcactgggctgaccgctttgaggacctgcccctctatttcatgactttccatggacagcaaagcatcaggactgtaatagatacaatgcaacatgcagtctacgtctatgacatttgtcatgtgatcatcgacaacctgcagttcatgatgggtcacgagcagctgtccacagacaggatcgcagctcaagactacatcatcggggtctttcggaagtttgcaacagacaataactgccatgtgacactggtcattcacccccggaaagaggatgatgacaaggaactgcagacagcgtccatttttgggctcagccaaagcaagccaggaagcagacaatgttctgatcctgcaggacaggaagctggtaaccgggccagggaaacggtatctgcaggtgtccaagaaccgctttgatgggagatgtagggtgtctttcccgtttgagttttcaaccaaggaactcccttcacctttcttccctttccacccaa

SEQ ID NO: 12414 - DNA, 530 bp, Homo sapiens
gacaatgctcagatccctttggctaatggacttgactctcacagtatcacaagtagtagaagaacgaaagcaaatgaagggaaaaaagaaacatgggatacagcagaagaagactctggaactgatagtgaatatgatgagagtggcaagagtaggggagaaatgcagtacatgtatttcaaagctgaaccttatgctgcagatgaaggttctggggaaggacataaatggttgatggtgcatgttgataaaagaattactctggcagctttcaaacaacatttagagccctttgttggagttttgtcctctcacttcaaggtctttcgagtgtatgccagcaatcaagagtttgagagcgtccggctgaatgagacactttcatcattttctgatgacaataagattacaattagactggggagagcacttaaaagaggagaatacagagttaaagtataccagcttttggtcaatgaacaagagccatgcaagtttctgctagatgctgtgtttgctaaaggaatgac

SEQ ID NO: 12415 - DNA, 580 bp, Homo sapiens
  misc_feature (1)...(580): n = a,t,c or g
atcatggcagcatccaggccattgtcccgcttctgggagtggggaaagaacatcgtctgcgtggggaggaactacgcggaccacgtcagggagatgcgcagcgcggtgttgagcgagcccgtgctgttcctgaagccgtccacggcctacgcgcccgagggctcgcccatcctcatgcccgcgtacactcgcaacctgcaccacgagctggagctgggcgtggtgatgggcaagcgctgccgcgcagttccccgaggctgcggccatggactacgtgggcggctatgccctgtgcctggatatgaccgcccgggacgtgcaggacgagtgcaagaagaaggggctgccctggactctggcgaagagcttcacggcgtcctgcccggtcagcgcgttcgtgcccaaggagaagatccctgaccctcacaagctgaagctctggctcaaggtcaacggcgaactcagacaggaaggttagacatcctccatgatttttttccatcccctacatcatcagctatgtttctaagatcataacnttggaagaaggagattttattttgactgggaagncaaagga

SEQ ID NO: 12416 - DNA, 203 bp, Homo sapiens
gagattcagacacagtaaggctgggatgagatcctcgaagctgtgttttaacaaactccactggagagtcccatattccctcaaatttgggaatcacgaccctgaaccaggttgggcctgaagcagtcaactgaattcactttttcggatagtaatttgttcccaggggcagtgacaaccatgatgttccaggtttggtctgc

SEQ ID NO: 12417 - DNA, 730 bp, Homo sapiens
tcgaggacgaccagcggccagtgtgcctggtgtgcagggagtcccaggagcaccagactcacgccatggcacccatccgacgaggccttcgagagctaccgggagaaacttcttaagtctcagcgtaatctcgtggccaagatgaagaaagtcatgcatttacaggatgtagaagtgaagaacgccacacagtggaaggataagataaagagtcagcgaatgagaatcagcacggagttttcaaagctgcacaacttcctggttgaagaagaggacctgtttcttcagagattgaacaaagaagaagaagagacgaagaagaagctgaatgagaacacgttaaaactcaatcaaactatcgcttcattgaagaagctcatcttagaggtgggggagaagagccaggctcccaccctggagctgcttcagaatccaaaagaagtgttgaccaggagtgagatccaggatgtgaactattctcttgaagctgtaaaggtgaagacagtgtgccagataccattgatgaaggaaatgctaaagcgattccaagtggctgtaaacctagctgaagacacagctcatcccaaactcgtcttctcccaggaagggagatacgtgaaaaatacagcatcagccagttcttggccagtgttttcttcagcatggaactactttgctggatggaggaatcctcagaagactgcttttgtagagagatttcagcacttac

SEQ ID NO: 12418 - DNA, 1017 bp, Homo sapiens
agcagcctccaaactgcagctcaccaacatgatcatagaaggaggccattttactctgggagcccagaaacccgctgccgatgctgacctccagttgagtgagatactcaaatttggtttggataaactgctggcctctgaggggagcaccatggatgaaatagacctggagtccatcctgggagaaacaaaagatggccagtgggtctctgatgccttgcctgcagcagaaggagggagcagagatcaagaggaaggaaaaaatcatatgtacttatttgaaggtaaagattattcttaaagagcccagtaaggaagacagaaaatcatttgaacaactggtaaaccttcagaaaacccttttggagaaagctagtcaagagggccgatcactccgaaataaaggcagtgttctcatcccaggccttgtggagggatctaccaaaaggaagcgggttctgagtccagaagagctggaggacagacagaagaaaagacaagaagcagctgccaagagaaggagactcatagaggagaagaagaggcaaaaggaagaggctgaacataagaaaaagatggcctggtgggaatccaacaattaccagtccttctgcctgccctctgaggagagcgagccagaggaccttgagaatggggaagagagctctgctgagctggattaccaagacccagatgctacttccctcaagtacgttagtggtgatgtcacccaccctcaggctggggccgaggatgctctcattgtgcactgcgtagatgactctggccactggggcagaggtggtttatttacagctctggaaaagcgatccgctgagccaagaaaaatatatgagctggctgggaaaatgaaagacctgagtttgggaggtgtccttttatttcctgttgatgataaagaatcaagaaacaaagggcaagatttgttggccttgattgtggctcagcatcgtgaatcgttccaatgtcctgtctggcattaagatggcagcccta

SEQ ID NO: 12419 - DNA, 617 bp, Homo sapiens
tttttttttgtttgttgaaggcaaaagtgtttattcaagactttctaccacactgtgggaagcatcgataaacagtcataataattatcattctgagtcactgcaagcgtggggttggatgctggctctcacagtagcctgtgttgggaccatgagcagccatgcgcacctccacgcacggccgagctcaacccgaagaccacgcgtgctccctggcaggagcaggaggcctgaccacagacgcagcagctccccagcctgagcctgggagtgcaccagccagctcgcagcggaggccgtttctcctcacaggctggagtgagctcagagtctagaggtcagaggacctcagactaagagctgcaacagaacgacagcaagaacattctggaaacgatgccacagtgaatcttttatactgtcactcacacttggtgagggcctcagacatgaaaccctggggagaggcgagtgtgacctccagagtttggctgggatgcggctgagacagacctgctgctggccgaggagggcagtggctggcgtggccctcatggccagcaggtgctaggactcctctggaggcccaggcgcctgtctaagctgccggctgtggc

SEQ ID NO: 12420 - DNA, 335 bp, Homo sapiens
  misc_feature (1)...(335): n = a,t,c or g
ctggtgcgacgaccaagggtaaaagccagagcaaggaaccagagagaccacttcctcccttaggtcctgtggcagttgatcctaaaggatgcgtcaccatagccatccatgcaaaacctggctccaaacaaaatgctgtaacagatttgacagcagaggctgtaaatgtagctattgcagcacctccatcagagggagaggctaatgctgagctctgtcggtatctttccaaggtcctagaactcaggaagagtgatgtggttttgngataagggtgggtaaatctngtggaaaaggtggtgaagctttttggcttctacaacttccagaagaga

SEQ ID NO: 12421 - DNA, 1045 bp, Homo sapiens
ccattccattgttcattcttctttcttgaaatcccaaaccttctattaacatttcttttcagttatacactgaactttactgtagcctttcttctagagtaacaaatgttctttgttttccttcctctaaagatgtctttatgtttccttcattcccaaagaatatttttgtggaatataagattcagagttggcagttgttttcttttagacttcagagatgtatctctctgttctgtacattattgtttaatataagaaacctactaccattcaaataatcattccctattttacaatgcatcagttctgtcaagcttcattcaaagtgtttttcattgtctctaggtgttcagaagtttgggctgtggatgtgcgtgggcatggggaagtttttgggggtgtattctatttggcgctccctggtgcttgccccaggctttttgatctgtaggattatgccttttgcaaaatttggggaactttcaactattatttcttcaaatattttttcaccccccagtcttgtcttttttagggacttcaataacatgagtggcagatcttgttttacactcccatgggtccttcaggctctcatcttttttctttttccagtctattttctgtcttgttaatattgattaatttttattgaccttccatggtcctcactgattgttttctttgtcatacctaatctgttgagtttgtgcagtgagttttcattttggttttgtattttccagttgtttaatttccattgggtgggttcttttgtacaccttctgtttctttgcttattttttaacgccaaagaaagactctcagagaatagacaactatattccaaagtcatggttctctggtggtttgtcttgacatttgaatagaaatgttaaactatctgggggaatagaaagcccacagtcttctgagttgtgctacaccaatatttctatgaacagatcttacaactgagagtgatctgcagatttttcagagtcatgttctccatggaatgtttgtaaaattccctagctct

SEQ ID NO: 12422 - DNA, 1072 bp, Homo sapiens
  misc_feature (1)...(1072): n = a,t,c or g
ccgctagtctcgagttttttttttttttttttcgtctcaggaaactttttaatgaaagtgtcggccacggtggtgtgtaggtggctgagctcagattgcagctgctaagacaccagccacttaccaagagaaagccaggctgcttcaaacccagggcccaaggcaaaaaagcatcacttccggccggggagtctggaagccacgccttgtgggaggtcacactggcatctaggccttcgcctggcattgcagaaggagagccagggtccccctcctggagaacgctgcgttccccagccccacaccggctttgccaccacacaggctgttgaggcaggaggtgggtaagacgtagctgtagacccaaagcaaccaccagccctggggaccctgcgggagagggagcacttttagaacatggaaaagtgtggtcatcccatcattagacagcacacatcctacataaataaaaagtcgtatggggaaggaggttggggagggaataaaaaattggcacagacattgatagactggtttccagtttcaaggtaacagatgcacatcatgagaccagaggaggcagagacaaggctggatttggcttttctaagcaacacgtgttcctgcgcagggctgaatggtcgctgagacagagatggaagccaggacaagggagcccaccgggcccagataggtacagagagcagaggctcctgttctgtcctcgccacccacgacggtgacactgcttgtaaatggtggctgtgctctcccagcaagaaaaaagcacaactaaatccacactgcacacagacgcagacagaaagccttcaagtggctgttttctgctccctgccttgccaggtccacaagcagagaggagtgtcaggcgcatggccccactgtcaggctccctagtgagctgcgggttcagcaggagctgcccactgacacacaggggacacccactcctcccaccttgggagcgggtnccagacagagccgcactgggtgctggtgtcatccagggaccccacacacttccttaaatgtgatcctgcttccctctggg

SEQ ID NO: 12423 - DNA, 1177 bp, Homo sapiens
  misc_feature (1)...(1177): n = a,t,c or g
tttttttcttcttttgttgtggctgctgttctattgatggcaggtaatcatcactcttcactagctgagcattcggtccactaacctgagtcatatccggcactggtttctctagaaagggctccgacggggaatgctgatgcacaggcactttctgcggggtgttctggggtgatgggtggagctgtgcccaaggctggtgatgagggtgtggaggtgaagactggtggtgcaagcccgggtgaggctgcagtggaggacaggttggcaactgctgaaaagatggctgttgacccaggatgttgttggccaggtatcagtcgttcctggattgcttgtgggtctccaaggccaacaccaggacaaccatttggcctcatgtgcccagtcaattcccttggtgccgaggacatgcctataaatggacgagactgctgcatgtttctggggcccaatattcctctgtccgattcccatggcaccagggggcatggtgagatggctgaggatggggcatatttggataactgccaacttccattggtatcccagcacttcccggcctgacttgtggaggaggagtgcctgctggattactcattgctttcatgggtgacatgggaggtggagaggcataagttccctgaggctgtgaaggatgcatagtttgtgtgttcatttggttaagtgagccactggggtggatgggctgctggtgcattagtccttgaccactgtttgatgggaatcctacagcattggggtatcttggtacggactgattcattggagtattatttgtaaggcctaaattttgattcatccctgtattgttaactaatccctgatttaggttactgtaaggatatcgagaatactgccctgagttgtttatagtaggagaggggactgtctggctccgagaactaaagttaagggtttgcggcctaacagccccttgttggggaggattcggggagaatctgggactgtgggcaacggattctccaatggagagcagtagaggggtggtgatggaacttgctgaaccagtgacggaaggaaggtgccatgctgggactctgctggggcacgtgggacaagtggccaggtcctgaggtggcaataaaaggatttaccctgattgaggcnaagcagnnnnaaannnncncaaatc

SEQ ID NO: 12424 - DNA, 2771 bp, Homo sapiens
tggatgggcggcaacatgtctgtggctttcgcggccccgaggcagcgaggcaagggggagatcactcccgctgcgattcagaagatgttggatgacaataaccatcttattcagtgtataatggactctcagaataaaggaaagacctcagagtgttctcagtatcagcagatgttgcacacaaacttggtataccttgctacaatagcagattctaatcaaaatatgcagtctcttttaccagcaccacccacacagaatatgcctatgggtcctggagggatgaatcagagcggccctcccccacctccacgctctcacaacatgccttcagatggaatggtaggtgggggtcctcctgcaccgcacatgcagaaccagatgaacggccagatgcctgggcctaaccatatgcctatgcagggacctggacccaatcaactcaatatgacaaacagttccatgaatatgccttcaagtagccatggatccatgggaggttacaaccattctgtgccatcatcacagagcatgccagtacagaatcagatgacaatgagtcagggacaaccaatgggaaactatggtcccagaccaaatatgagtatgcagccaaaccaaggtccaatgatgcatcagcagcctccttctcagcaatacaatatgccacagggaggcggacagcattaccaaggacagcagccacctatgggaatgatgggtcaagttaaccaaggcaatcatatgatgggtcagagacagattcctccctatagacctcctcaacagggcccaccacagcagtactcaggccaggaagactattacggggaccaatacagtcatggtggacaaggtcctccagaaggcatgaaccagcaatattaccctgatggaaattcacagtatggccaacagcaagatgcataccagggaccacctccacaacagggatatccaccccagcagcagcagtacccagggcagcaaggttacccaggacagcagcagggctacggtccttcacagggtggtccaggtcctcagtatcctaactacccacagggacaaggtcagcagtatggaggatatagaccaacacagcctggaccaccacagccaccccagcagaggccttatggatatgaccagggacagtatggaaattaccagcagtgaaaaagtacttacattccagtagccagtatctattagcagccatattgtcacctcagcactgtggacacctccctgtgaagagatccttccattccatctagtttttggaaaaaccttgtggataagtggctgtttcatcagtaagcagcctttgtggtttagttataaaaggctttagtagctcaaaaatactcttgatttcacatttctactctagatggcaacattggacagaaaatgcaatgacataaccaatttgtaatgattttggaactgtgtttcaaatggactgttacagactgaaaggtgtgaacagctttgtatgtttatgaagggtaagggaatttaatacttttccacagatttttttgtaaggggaagagggaaatgtacactttttacagcagcaatattttgtatattatgtttatttcatgtggtgaatatgcaaggcggtacactacgcactggacagcatcagaaatcctctgttaatgtggactggagcatggtagatgcttgattgttttggtctcaaaatggtgtgctataaagataaaggtgaggggaagacaaagcacaccatatgtccactgttctgttctcatagaggaaattcaaatcccttttatctattagataatcaagggcactgtgatacagttttgagtaaaaagacattttttaaaagccttccagttttgtggattaaacctttttataaagatcatttataatactgttttaaaatgtgaggcaataagaattactttgtgttggatctgaggaggctttggtaaaacagtttcatctaaatgaaagtggtaatcctcttctaaaatagcaataactgaaaatgaaagtgttaattttaccttgtttgagttatcagggaacttagtaagtaatatcaaagcattttataaatgatatcaaagaagagtcaacattgatccagtcattttattttgtaatattgagggataattggttattaaactgaatagttcaggagactttacaaacctttgtttcaactttcttatctggaaataatatcatttataaagggacacttttatgtttttcccttttttatgttggttgatataacacaaagagatatttaggaaaatgcttattgatgaggtttattctatctgtttttaaagcaccgaggttgcattctagataaccttgtttattagcatggcatattttaatcattatttgagactgtcctgtgcctgattattttagctaaattcagggagattgcgtggggcaggaaagcatgcattgaaaaatttctaaccacggttatttaagcataatctgaaaacatctagcccaaaggtaagttgctattttcatcacagttgcctatgcccagggaataagatgtattctttataattgaattggtttttcccacgtctaactggaaacaaaacagaaggggcgtcataaatttgaaataagcggaacatactgttctcaacatactgtaatcaaaaggaggaatttcagtgggtctctgtgtgtgtatgagagagagagtgtgtgtttgtgtgtttcaaggtcagaacagg

SEQ ID NO: 12425 - DNA, 2693 bp, Homo sapiens
actgtggtttcttatgtttccggcacaccaaacgggccactgctttttgcagcgcacttttccagctgcggatgtcttcctctttttatcaaccccaaaggttttaccccctaactgcatcaccctttccccttaagctttttagtccctatgaggcccttccaattccctatcccttaggccacccccagatgttcaagaccccaaccacagggcccatcagggcactaacggccgcaagctcagagccgtggcctctccgaagtggcagatggggcgggcccggccagaccaagtgccaggcgggaacagagggactgggcgcgcctcacaaactcaccacctcgcccgctggtccttcctggctcgcctggctctgaagctgcacctggaggggaaacctcagaacagtaggcgggattgcctagtaaatatctcccattcagggaggcccaggtcgtgtgacgtcgacagttgctgggtagatgaggccaacacaggttgcaagaagaggcggggtttagaggcgtgaaactccgcagtgctcagccaagcagggagcaacgctaggaagggcgggcagaaagggcacgctcttgtgggtgactacaggttaggagaccgttgaacctggaggggccctaggatggaccccgtggaaagattcagagactgcgccctctccctggcgccgccttcccctacacgcggcgggtatattctgttgcagttggcccaggacctgtttccaagactctgccccctcgcacttccgtccctcctggttttgtaaagtgatgctcataggaacccccaccccgcgtgacactactcccagctcctggctgacttctagtcttctggttgaagctgcgcctttagatgacacgaccctacccacccctgtttccagcggatgcccgggcctggaggtacctcttactgtaacccatcgccaagtgggcttttgaaggcgcctgttcctttctcgctttcttcggaagacccttgacccatcattcccccgacccccataacgggagagcagagaagccggtccccagtgtgatggtcctggtccaggcactaactgtccttttctcggaaaaggcagggggatgtggaaaagagtcttgttccctccccttcgatctgtggctttcgctttcacttcctcctccgagagcggacagatctctgggtgctggcggtcatggcgctactagatgtatgcggagccccccgagggcagcggccggaatcggctctcccggttgcgggaagcgggcgtcgctcggacccaggacactacagtttctctatgcgatctccagagctcgctttaccccggggaatgcaggtcggggcagtagggaagcccctagggatgcagggaggcgggcgctgaggagtggagggtcgcctgagaggaggaggcgagagcgggagcgcggggtacagggtcgggggtagccttcagtcccggagagcgccagacccaaagaagaggccacatggggatggggcctgagaggaggaagtgcaagttaggacaaagagttacaggtgaggtgggggctcccaaaggaagacaagagaactttcctgcccttgtccacacacaaatggtggagccttctttcatggggttatcacatgatataggaggtgtgtggtgtcttgggaaacctatgaaatttgcctgctggcctcctctcagcaactcactgttgcgcgacttagaacaagtcacttagtctaggtcccaagcccctcttctgtaaagtgaggatactgttactaaacgtgttttgtgagggttgaatgctttatgcatggaagaaaccctttaagtcactctcaaaattttttagtaatggtaacatgtgcttgctttcatttctgttgtgctggaaaatggaaaaggttgatactggcatgcctcttcttttccttctcccaagccatttccttctagagattggttattaactgtttcatttattgatggttagatcatttctgcatatctcctcaccctcatactccctaaaaccttttcctggagcctcttactacagaatttttcattgcctttctcaacctcttttctcttatcagcccacagaattcttccagtccctggggtggggacggagaaaggaacgttcagattgagatggcccatggcaccaccacgctcgccttcaagttccagcatggagtgattgcagcagtggattctcgggcctcagctgggtcctacattagtgccttacgggtgaacaaggtgattgagattaacccttacctgcttggcaccatgtctggcctgtgcagcagactgtcagtactgggagcgcctgctggccaaggaatgcaggctgtactatctgcgaaatggagaacgtatttcagtgtcggcagcctccaagctgctgtccaacatgatgtgccagtaccggggcatgggcctctcctatggggcagtaatgatcctgttggctggggataagaaggggtcctggacttctactacgttggattgaacattggactcggctctcaggaaatatgttctccacgggtagtgggaacaccttatgccctacgcgggtcatggacagtggcctatcggcctaatcttagccctgaagaggcctatgacctttgcccaggggttattgcttttg

SEQ ID NO: 12426 - DNA, 228 bp, Homo sapiens
ggataacaagctccatactgctgagatacagggaaatggaggggggaaagctggagtattgatcccgcccccctccttggttgtcagctccctgtcctgtgtgtgggcggaacatagtccagctgctctatagcaagtctcaggtgtttgcagtaagaagctgctggcatgcacgggaacagtgaatgccaaacacttaaagcaattcgatgtttaagtatgtaagtt

SEQ ID NO: 12427 - DNA, 1081 bp, Homo sapiens
  misc_feature (1)...(1081): n = a,t,c or g
gcgtccgctcagcgtgacgttgctcttgaccaggccgctgatgctcttaagctgcttgtagcagagccggcacttatgcagcctctcctccctgctgatatccacacccacagagggtggagccgccagcatgtctgtgatgaggggcagaaaccgctgcaggatcagcttcagggaggtgcagcccgtctggacgtagctctcatacttgctctgcaaaaaccttctcaatctgtggcaggacggtggtgcaacaggtcccagctttccacagggaggctttctggttgacgatgttcaggaggtccaccaccaccgacaggtcgttgatggccacagcggagtccaccgacgtcttgatgtcgcccatggtccacacagcccgcacagtgtccaggttcttgtggcggctggtgagcaccacacacatggtgtcgtggcctttgcggatctgtgacatggcatcctcgtccaccagctcggcctgctgggggatcttcacggcgggcaggaagtcggaggcctttcnaccgatgggctcgttccgggtggcagggatgatggcaggctcagccttgggtgcaggtgtggaagcaaccactgggggccggggcaggacctccagatttggcaccgggaactgcacatccatggcagggctgggctttgctgcctcctttgctgtggctgcgtcgtcctctgggggtgcagggaagggctcacttctccggggtggcgtccgactgatgctgttcttgggctggaagatctcgttgtagtcctcggcgttctggatctccgcgcgggactcgcgctcgtcccggtcatcctcgctgctgggggctgcggcgctcgctctctgagttcttgcttcaacctctgaggcttgctgcaggttgtgctgggccgctcatagatgcgccggaggggggcgctggggttgggcagtggctgtgccaggggccggtggtcctgcacagggtcccgggccaccgtgccagtcctggtgacacgcgtcagatccaccacgtaggaggagacgttgctctgggagaaggccacacctatcaactggtcattg

SEQ ID NO: 12428 - DNA, 1661 bp, Homo sapiens
ttttgaaataagtcaaagcattgtttatttatgacatatttacatatttacaaaactgattttactcaatacatcatcctgcgtaatatcataaaatgaacaccatatcctgggaataaaaatccatatttcttaataatttatgtatagcccaacttttagaacatagaatattatcaatttggcttcccaaactacaaagtcctgtttataatttttctagccaaggaacagagtagattcaacagcatattaaagtaatttagttaaccctgagtaattactaacttgcataattttgaatggatgtatataacacactttcatctgcacttagatacttatactatcacactacctttttgtatttatccacctcaattttcaacttcattaatcttcagaagaaagaggaataaagaataggaaagtaataacagaatcattacgaggaaattactagcactgccctaaacattcagaagtctgtgacacagtttaggtctagggttgtctcaaaaacctaacaaaaggaggatcccgaattgaataatctgagcaccttgtcaactgaggttgatattaaattatttttcctgcattctttgtttcctttcacactaattaaatattgtgtacaagcttataaaattcaataatttgtattaaaatacaaaatccaataacaaccaggagttcttcggaagaaaaaaaaaatcacaaaacaacccccaacagtggtgaagaactatattaaagatggcttttcctaagacagagggagaacaaaagcaaatagcactctccctcccccaaggctagagcaggaggttcaaggaaatgggcaggaagagaacagaacactcaagctggacggattagtgaaggaaactgtggcctgagactgatgatcagcatatcttatgcctaaacaccaccactaagactacctggctaagctgccatggtgtgttagagatgatgagttacttttcttgccccttttacaacagggaaatctaaggacaacaaaataaacaaaaggctgagaaagctgagcatgtgaagtcagtcatcgtccgctgcttttgcaaaaactctgggccaagaacagaaccagagaggccagagcagttcatgtatttctctcttccatctgaccatctctcatcttcctcacccactcacacggttccgagcaggaggcttaccaggtcaccaggggcaggaaaatttctagcttcaaccaagccatggactgccactgcccctttggggattctaggaaaataatccatcctaatgaaatgtcagtatttgtgattctatgagaacaattcctcaaaacatcaaaaagacatttgtgacttggtaaaataaaaatcaaagaaaaattaaggtatttttagaatctgtaaaatttccttataataggagggaaagtagcagaactattttaagtaaggacatgcttcccttcagtctgtaatgaaagactgttgttgtcatcatgccattgccatgataaaatactactagaaaaggatagcttttaaaataaagtgtagacgcaaatggtagagaaagccttcttgtacttgaaggaaggaaagaaagtattctgtccctgttactcctggacaaaagtacaccaaggcaac

SEQ ID NO: 12429 - DNA, 865 bp, Homo sapiens
aagctgcattatgtaggcacaactgattaaaccactggccattggaaatcagtcagcctctctgccctccttggaggttgggagatgggacagaaagtcctaaccttctaatcctcccttggtttttcagtgaccagcccctaccctgaagctacctaagtgcgccagcaccaatcattagcatacaaaatgacaccactttggaaaggccaaaggattttaggagttgtatgccaggaagggagttgaagaccaactatatatttcacaatatcacagctgcccagagtgagatcggcagcctttaaggtattcatccagctgaatgttcccacatgccctcaagtacttaccacccaactctgtagcagtgcacagtggacataaggtggtgttggcagtctcagtcctatttaatgatggccagagatacctcctggtcagccaaagccctggctgactgccaggcagttgcgcagtagctcttcctgtagtgaaactgttcttcttatcattgttgactaaactctgttggaagttgtctcactagccatatgagccacagctgtctctatcctgaatagcttaatgagccataggttgctgactcctggactgcaggaaccttttagttgcctctcgccacagttgaatttccttctggacctccatctctcttcatcacagttgtcaacacttgagccttctcccatgttacttcttatgcagtgtcccttctacttaactgtaagttttataaaagcagaaaaccgtcttattcagttttttgcttatgcagtaaacattgaataattgtcaaatgaataaataattgtcaaataaatgaatatattgaataaccata

SEQ ID NO: 12430 - DNA, 544 bp, Homo sapiens
  misc_feature (1)...(544): n = a,t,c or g
gttattatacttttcactccaacttccaataactgacaggtgattatttttgctgcactgtgtgcttaagcaaagcagccaatcaaagcagctagcagttgttaagtcttccccgccccttcgatgaacagccaatcaaagcgatttagctctgcttctgttccatttcttagtcccaccctcaccataaacatccaagtgtggtttggctgaggagctgagggtgtctgccaatcacagctggctcagctctggcttctgtaaaccgccaggtagaagagttaaagctgcgccctcccgagactatatatcattgtctttttcagcccgctccgggcaaactgccatcatgttgcaccaagggccgttaggcctgccttctggggaaaacgtcccagtgacaagcttgctgggggtncattcaacttttgggnagccnggttgttcgcttgcaggggaagggaaccnattaaggattttttaaaagggnaacctgatctttgctattcaatttncttgttggntaaatnggcagggcaaattt

SEQ ID NO: 12431 - DNA, 1680 bp, Homo sapiens
tttttttttttttttttaagaatctttcaacttttatttctagcatacattcatctggacctttttgtttctttacaatgttccccctaagataaatgaatacaataaaaatataatccaactaccagcaatgtttctaaccagaaaagaatctaaaatctctggtgtgataatataggatttttttaaaaaatataaacttcataccagaaataaagcctgaatattctctttctttaaaaatataatttttccttctttgctcttccaagtaaatcttaaaatgaacctgttctagtctatttttaatctagcaattataacactacctagcagggttttttcctttataccttgttctgtactgtgaatcaactaataattgcaaacgtctttaaaaagtgagatgccatttggctgtagcaagattcttcaagagatgctgaaaattaaaaaacaaaacacaaaaaatccctattagcaaactgaaacccacttaacaaattatattatcctgtttctgaaattagaaatgtatagagcacttttgcaaactgtaaagttcaaatggaaaacattttttataatctgtttggactataaagactgctgactgggacagaactttagggacacaaggctctgtgaaatccatttttttctgcaactccttagttttgaaggggaggtttataaattgcacacaagctggggtatggatacaggaatatctcataaagattgattggtttgtcgtgacatgtgactgtttttcttaattgagaataaagaccaaggggcacagggagagttctcttagatcaatactttataccagactgataaaaattagacagtgttttccccacttctgactagttcctctatgcagagcttcattatttaagtacaatccagtttaaaatagtattccaaagctcagccataaatggtcctggggatgaatttccctttcccttgatttaggaagataataaagcctaattataaatatgggtacaacacacctgaatcacagagtagtacccttccaactccaaaccaacagtatgatccttaacagtaataaagggctgcatttattgtgattgtctgtgcccagacacaggtgattaaaaagaaaccaaaggatgagtgaactgacaagagggaaagggtttgtgttgctacatttaaaaggttacactaacagagccgagtgagtcaggtgtgctgtggcaggatcagctgtgggggcctcctttcctagtttctgaatgatcttcctgtggctctgtgagcaggcccagcatggggaatgggctaaaaggcttatacatctcttttggccctcagatgcacttacccttttctttggtgccctctttccccaagagaatattcaggccaattttgcttttttccttgtttctgcattagtaagacattataaactagcaacttgtaatacctctaactctcactgtcttatgttagtataaagtacctcaagtaataagaatgtggaacttaaatgccacttacagaagtcaaacaagcccatgtcacactttgatgaatccaaagtattaaatcttagcaactgatgaagtaaaaagctatttttgctaaggtttaaatattggactttaaaccaactttaatattccatgaaatcaa

SEQ ID NO: 12432 - DNA, 939 bp, Homo sapiens
aagtgccttgtccctcaaagcccaccagtcagagagctacctgccgattggctgcaactgccacctcagtcctcgggtgtggacacaagcccctgcccaaactcacctgtgttcaggacgggaagcgagcctgccctgagcccagcagtggttcggagggtctcctcagacgccagggctggggaggcgctgaggggatcagacagtcaactgtgccctaagcccccgcctaagccctgcaaggtgccgttcctcaaggttccctcgtctccctctgcctggctcaactcagaggccaactactgtgaactgaacccagcgtttgccacaggttgcggcaggggagcaaagctaccctcatgttgcccaggggtaagccacacagaactggttcacagccaagcagaatgaggcgccaggtccccggaactctggcgtcaactacttgatccttgatgatgatgacagggaaagaccttgggaacctgcggcagctcagatggagaaggggcagtgggacaagggcgagtttgtgacgcccctcctgggagactgtctcctccttcaggcccaacgagtttgagtcaaagttccttccccctgagaataagcccctgggaaacagcaatgttgaaacgtgcaaaagaactgtttcaccaacaacgaccccaaggtcatcgcccagcacgtacttgaggcatgggactgcagggttgctaggatacttggagtctctgaagagatgaggaggaacatggggggtgagctcaggcctggaactcattaccttgcctcacggacaccagctgcgcctggacataattgaaagacacaacacaatggccatcggcatttgcagtggacattctgggatgcacgggcactttgggaggaccgagcagccactctgagtaagatcatccaggtggcggtggaact

SEQ ID NO: 12433 - DNA, 325 bp, Homo sapiens
ggagcatgtggtgtgagctggaacaggagaacttcttcaacgaatttcaaatggagggtgtctctgcagaaaacaatgagatttatttagagctaacatcggaaaacttatctcgagccttgaagactgcccagaatgccagggctttgaaaatcaaactgactaataaacactttccctgcctcacggtctccgtggagctgttatctatgtcaagcagtagccgcattgtgacccatgacatcccataaaggtgattcctaggaaattgtggaaggacttacaagaaccggtggtccagatcctgatgttagtattattacag

SEQ ID NO: 12434 - DNA, 383 bp, Homo sapiens
gcggcacgagcagggtgttaaccgcatatgaaacaacccatatggaagacatacttaggggtcaaacctgtggtgtgtggaagtgaccactgggatgtcatcattcaccatttatccaggatggccgctcaccaggcaatttgctaggctcgggggcgggtagtatccatacactatgcactactgctctgaagcttctggaatcagaaatgaacccattttcatcgacgattgctgttagttgacaagtgacatcttgaaaatgccacattccctcatgtcacaggaagttctgggatcaccaaggattgttggagagtccagtgagatggaaccacacaaccaagttccctaccaagtgtcttgtcagctctgggtgtttg

SEQ ID NO: 12435 - DNA, 327 bp, Homo sapiens
gaacttgatgtgagtaggcattaattatgggtgcagctactaagatgggaaaaactatcacgacagtggcaccacctgatttcatgatgtaccatatgcagtaacacatgtttgaggtacagaattgaagctgatttttctgcaaaagatgaatttctataaacaatcccatttttatattttattattaaaacaaaaatacctctctttgctagagagtatatgtatgacttaaattattagctatggtttgcatttagtacatggcagattgccctgaagtctgttcattttaacaacatacggggctgggcacggtggctcacg

SEQ ID NO: 12436 - DNA, 1201 bp, Homo sapiens
  misc_feature (1)...(1201): n = a,t,c or g
ttttttttttttttaccaaaaacgcaggggatttatttgaggtttgggtgaaaaataatcttgtgggtggtggtaggccgacagatggggacaggaagctgtggacgaaagccccaggtcccgtgggagaggtgacagcagcaggggcacgcagccacgtgggtccccaggggaatgtgaaggcggagggctccaggcgaactggggattaaacaaatatttacaggcagcagggaagtgcccagcgcacgtgacgggggcggggcgggactttggggagggcggggcctaacggtatcgagcgagccggttgtagacgtggtccaggtttctgcacaggaatatcgagagcgtcatgaacccgagctcgagtaggccgacgcccaggcaaatgcccactatggaaataaggttgttgtgcagccacttctggaggccctgcgcgcagccctcgcggtagatgtggctctctgcaggacagcgcagatgtctgcactgtgtctggaccgcgccaggtgtccaagcctgctgagctggggcaagatcaccttatctaggattgtggagtcgttggtcgccgacaagttgtagcaggagcagggcacgcggtgcgcctccgacccgttacctctcaggatgaggacttggaaccagtcctgcgggtagtgccagccgcagcagcgcagctggaactgcacatagtcccagctctcctcggccgcggtctcctcggggttggtgccgtacttttggatggttttctctacgacgtcccgncaagcttcgctccagctgggccccgctgagtggagatgaggattcccagggtgatctgtgtggcaaacaggagcagcagcatcccaaaatacaggcccaggaggcagcggagctccttgagggcccccacacaacccaggagggcgatgccccatggtgaagattcctgagatggccaggactttggaccagatctgcagaggcacgaaggcccaagccccacaaaggacacgaagctggtcttgtcgatgaggatccagatgccgaagcagaagatcaggctgccgaggacgaagaagaagaggttgaaaacgaagaggaagtacttgatgaggctgaggcagctctcctgggctgacatcttcacctagtggggtaagcggtccactcaccacacagaagaggtgctgacagtgggggagac

SEQ ID NO: 12437 - DNA, 555 bp, Homo sapiens
caatggcggggtacttgaagctggtgtgtgtttcctttcagcgtcaagggttccacactgttgggagtcgctgcaagaatcggacaggcgctgagcacctgtggctgacccgacatctcagggacccatttgtgaaggctgcgaaggtggagagttaccggtgtcgaagcgccttcaagctcctggaggtgaacgagaggcaccagattctgcggcccggccttcgggtgttagactgtggggcagctcctggggcctggagtcaggtggcggtgcagaaggtcaacgccgcaggcacagatcccagctctcctgttggcttcgtgcttggggtagatcttcttcacatattccccctgggaaggagcaactttttcttgttgccctgctgacgtgacttgacccgagaacctcacagagaatcctcgaggtgcttcctggcaggagagcagatgtgattctgagcgacatggcgcccaatgccacagggttccgggacctcgatcatgacaggctcatcagcctgtgcctgacccttctcagcgtgaccccaga

SEQ ID NO: 12438 - DNA, 427 bp, Homo sapiens
cactatttcattagcctcagaacgatatgataaagacgatgaagccccctctgatggagcccagtttcctccaattgcagcacaagaccttccttttgttctaaaggctggctaccttgaaaaacgcagaaaagatcacagctttctgggatttgaatggcagaaacggtggtgtgctctcagtaaaacggtattctattattatggaagtgataaagacaaacaacagaaaggtgaatttgcaatagatggctacagtgtcagaatgaataacactctaagaaaggatggaaagaaagattgctgttttgaaatctctgctcctgataaacgtatatatcagtttacagcagcttctcccaaagatgctgaagaatgggtaccagcagctgaaatttgtattgcaagatatggaatctgatattat

SEQ ID NO: 12439 - DNA, 920 bp, Homo sapiens
ttttttttttttttttgtcattaatatgatctttaataaacggaataacgcaccattttacagcaagcctttttaaacctaaagaactgccttaaaatctccttctccaatgtctctgtatcaatacaatctttttatttaggtttatatatatcaaagcatttacttacacttattcatagaaaactctttagtggcttaatgtcagctttcatagtggcatccatagataatacaaaagaaaagtgatttgctttattttatactcacactgatccatcaaacacaacttatacagcatagcaaggcttcagacagcttatacaaaagcaaaataactgaaattattcataaagtcatatatgatagtctatctgtaatgtaagagcaaaacacaccaacaaaagatacccgttaacaagaaagagggttctgaggaagtgcgagtattttctagcctttctttttccggaaaagcatcctcagaagtgaatactccgtagcttatgtttctcctgtccattcagaaaaagcatgacagctacgcatctccatgtttcagctactacaacaccctaagagttagtgtattttacaattatccatgtatctttatttgaaaaattatcagcaaaaaactgaggatgattccagcttacataaacactgatacaatataatctctatggaaatgaaataacaaggcatacaaaaattgcttaaataaataaatgtggccagaaaaagaaaagccacagaagtcaagcaattcagtgttaaactgggacctatctttgaattgcatcttttagtaattttttcttactgttaagcttctttaaaaatatgtttcctttacatacttacgaggattggtaacaaggtgaagagcctgagacaagagactggttacagataac

SEQ ID NO: 12440 - DNA, 148 bp, Homo sapiens
ctgatacctgcaacagcatggatgaaccttgaaaatacaatttccatgaaaaaagcaagttacaaaggtcacatactgtatgattctattacacaacatgcccaaaatagacaaatccatagagatagtagattagtggttgccaggg

SEQ ID NO: 12441 - DNA, 605 bp, Homo sapiens
aagaacttaaaaccatcaggattctagatttacttagctataagaagttaaatcccacgttctgataatctttattcttctacatgttttcctggaatgatgtgtcaaaccagggtcatttttaagttcatataattttctttcataataatgaggacttcctttttctaggttattgttatatttctagtaacactgaaggtaaaataagcttataaaagaaggaaaacatcagaatggtgtatctagaatacacaatcttgctccttactcctccatcatctctaatgaaatttttcttgatgtctgtggctcagtcagtatatattttgaaagattcattgtggtgaatattttgagtcctgacagtttaaacgtgatagagggaacaaaggatttatatattttttgtacaaagtttttttcttaaactgtataattttgtaaataatttgtttgggtttttttttttgtgtactaaaactaccagcgtatagatttcaataagaattgttgtatttttgtatttggaaactgaaaattacagtaaataaatggaactctaagaaaaatttcagtagacagttcaacagaatgaaaaaaaa

SEQ ID NO: 12442 - DNA, 717 bp, Homo sapiens
cggacgcgtgggctgagcagaccccagggcctcttagccaatccccgggcctggtgaagcaggcgaagcagatggtcggaggccagcaactacctgcacttgccgccaagagtgggcaatcttttaggtctctcgggaaggccccagcctccctccccactgaagaaaagaagttggtaaccacagagcaaagtccctgggccctgggaaaagcctcatcacgggcagggctctggcccatagtggctggacagacactggcacagtcttgctggtctgctgggagcacacagacattggcacagacttgctggtctcttggaagagggcaagaccccaaaccagagcaaaatacacttccagctcttaaccaggctccttccagtcacaagtgtgcagaatcagaacagaagtagtaccaattcaatgttcacatgaacaaacaagctgcccccaggggtaccattttggggagggggaatcttttctttctttcccccttaaaaaaaaacacatctgccccgaacactttcccactgttattctttcctcatatcccaacactcagaactcttgtgacattagccagtgggggcttatggttgtgtgaaccatgtatgaaaatccagtgggccccaaccaaggagacagacagacttgggtctctttcccccaacttttccacatggtcatcgtgaaataaaaagtccactctgg

SEQ ID NO: 12443 - DNA, 361 bp, Homo sapiens
ggagttggacatcgggcagcactgccaggtggagcattgccggcagcgagattttcttccatttgtgtgtgatgattgttcaggaatattttggtgactgtaatcaatgagagactgaagacagatcaacatacatcttacccatgctctttcaaagactgtgctgagagagaacttgtggcagttatatgtccttattgtgagaagaatttttgcctgagacaccgtcatcagtcagatcatgagtgtgaaaaactggaaatcccaaagcctcgaatggctgccactcagaaacttgttaaagacattattgattccaagacaggagaaacagcaagtaaacgatggaaaggtgccaaaa

SEQ ID NO: 12444 - DNA, 652 bp, Homo sapiens
  misc_feature (1)...(652): n = a,t,c or g
aatactttttttttttttttttaaaaaacaaagaacactttattcccttgacagtttctgtacagcgacaccaggctgtgcaaagcccagtgtcgtcttcactgagcacattccccagggacgcctggtgcagccctcctctgccccaggccccaactagccacccctgtgcccactagcaggccctgtgccttcacagggatgaagccctggcactgagaatgcctgggaggcaccgtttgctggggagcagagggactgacctttggcttctttgtggctggaggtgttccaggcctggtgagggggtcccatactgttctctgctgagccctctgcacactttgggggatcctggctggcggtggtaggtgggccggagactcagttgtccgtcagctggccatgtccccattttatggacaggcagcctgaggcccagaggcggaaggatttctccttgccacagctgcatcacacttgaactgtccagacctccacgcgctggcctgtttgctccccaccctagtcccgcaggnctgatatggtgcctccagcagactccatggcttcccggagggtgcagggtccccagttcaccctccagcaggagtggcagcagctggggtaccccctagcagttgcgcacgag

SEQ ID NO: 12445 - DNA, 422 bp, Homo sapiens
ttttgtttgttctctagttttattatttgtcaattttcccaacacaggaactataactcattttgaggatttttttcagtgcatttcacagcaaaaatgaacaagggaatcattaaaattgttgtacacaaaccaactctttttcttataatttacaatttgttgaaaaaattattgttttgctgttttcatcctactaacctctttaacagaacacaatttatcagagcacaaagcttaaacttcttatgatgatgcaacagacacagccacctacaatggctgataaacaacaggtatgttacacacactgattggaagaccatatcagaaaaaacagagtaaggcaccactcttgggaaattaaggtagcttgcagtaacaagtgttgagcaccataataagtaggtgctcaataaata

SEQ ID NO: 12446 - DNA, 414 bp, Homo sapiens
aaggcttcaagagagggcagaatgtattcggcagaaaagggactcaggtaagcccagcctgggatgagagcacaaaagcattcaagatttgcaggccttgctatggatgcgcttaatcaccatggaggccagcaatacccatcttagcatggctttgatattctctacttcctggcctttaaaaatgacctataatttttcagtttgctttactatattttataaagaaaattctatcttatggttgattgagcattgagacttatgaaggcattaggatagattagctcaggaatgtaaaggttcaggaaaaggtctgttttctcagattaacaaatatgatggattccatggctgaccttggtgctttaaaccaggaggtttcaatctagtcctagagttgtggccctactg

SEQ ID NO: 12447 - DNA, 1496 bp, Homo sapiens
aaattaccgtggagacacctgcaaaagcgggcccaggatgctgtgatcatcctggggggaggaggacttctcttcgcctcctacctgatggccacgggagatgagcgtttctatgctgaacacctgatgccgactctgcaggggctgctggacccggagtcagcccacagactggctgttcgcttcacctccctggggctccttccacgggccagatttcaagactctgacatgctggaagtgagagttctgggccataaattccgaaatccagtaggaattgctgcaggatttgacaagcatggggaagccgtggacggactttataagatgggctttggttttgttgagataggaagtgtgactccaaaacctcaggaaggaaaccctagacccagagtcttccgcctccctgaggaccaagctgtcattaacaggtatggatttaacagtcacgggctttcagtggtggaacacaggttacgggccagacagcagaagcaggccaagctcacagaagatggactgcctctgggggtcaacttggggaagaacaagacctcagtggacgccgcggaggactacgcagaaggggtgcgcgtactgggccccctggccgactacctggtggtgaatgtgtccagccccaacactgccgggctgcggagccttcagggaaaggccgacgtgcgccgcctgctgaccaaggtgctgcaggagagggatggcttgcggagagtgcacaggccggcagtcctggtgaagatcgctcctgacctcaccagccaggataaggaggacattgccagtgtggtcaaagagttgggcatcgatgggctgattgttacgaacaccaccgtgagtcgccctgcgggcctccagggtgccctgcgctctgaaacaggagggctgagtgggaagcccctccgggatttatcaactcaaaccattcgggagatgtatgcactcacccaaggccgagttcccataattggggttggtggtgtgagcagcgggcagaacgcgctggagaagatccgggcaggggcctccctggtgcagctgtacacggccctacccttctgggggccacccgttgtgggcaaagtcaagcgggaactggaggcccttctgaaagagcagggctttggcggagtcacagatgccattggagcagatcatcggaggtgaggacagcgtctgacgggaagcctgatctggaaccttcccaaggactcaggcaagcctttgtggctggatcatgagaggagggactccatcttgagccatgtcccccagcctggcatgcgtgcactgtaaacgccaatcggggggtcaccaggatcaaccgcaggctttcttcagtcccttggtcagaccataaactgcatttttgattctttgtggattcaaaccctaggatccatcagtcttgcaaggacattgaatattaggaggaaaaagtcatggaaaaaataaagccatttagaacctgg

SEQ ID NO: 12448 - DNA, 401 bp, Homo sapiens
gtgccagactctcctcggggcgtctgtgccttcctaattggctgtacctcctatggttgggagacgggcgtctcccatatatgtgcgacttggcagctgtgactttgctggtggccctgtgactgtcctgatgagctgctgtctgtcggccccagggtgctgaccaccccacatcgtgtgtgcgcactgtgtgtatagtgtctccgttgcatgcctgtggctgtaccgtccgaattctttggtgggatttgctggtggcgagtgtgagagtgcagacgtgcacttgtcagcctgccacgcgagggggacctgggcgctgttcctgttgtgtgtcccatgtctgccgttgctgtgcatgtgaggctgccgcccctgttgtcctcccgccctctctgggggtg

SEQ ID NO: 12449 - DNA, 1047 bp, Homo sapiens
gcggccgcctccaccagcactgtgagtgtgtgggtccagagcagggtcaggaggctgctgaagttctcctgcaccaagttggtgttcatgtagcaaagctccacctccaggaacttcatcaggggcagaatggcatcctcaggcaggacagactccctgacgcccaccagtttctggatgtgcttggcgatgcccacctccaactggctcggccagggtgcggacgccagtgcggatctcatggcccagcccggccagcgcgctctgcagctgggcatgcagcgtgttctgcagctgcccctgctccagcacggcccctacccgctgctccagggcctcccatgccagctgggcgggcaacttgccgatcaccagccgcagctgctccatgtcattcaccaccacacacagcatgttggctgccctggccttggtccttctggccctgaaaaaaagctcgcgggcccgggcctttaataaggctgcaagtacaccagggccaggcgacaggtgtcctccacaaacttgacggtaatcatgaaggcctcctctgggtctggccagtccagctgccgggcagtgtggctgatctgggcaaagcaggtggatagatccaccgctgatgtgctgtgcttggtcagttcacccaggggcaccagctcatccatctgcacagcgcgctgcacccgcgccagggcctcgttgtacgtcttctgcagccaggaggggatggccggctggaaccagcggtggaaattatccagggccaggactccatccctctctgaggagctcatgcgcagctggcagagctccttgaggctgatgtagagctggaacagactctcgcccatctctggggacactacatcacccacaaccgtcgtgtggtcctgcacccgcttggccaccagccactgcagctcccggaaagccatggagaagaggtggatcttgagggtattgtggaagatcttgtcccatgtgcgctggcactggtgcaggtcgccaatgacatcctgtaccaggcccagcaaggccttgcct

SEQ ID NO: 12450 - DNA, 1051 bp, Homo sapiens
tttttttttttagggtaagtcagtttattgatgtgttgtgatccatcacccagatatattaaacacaaagtacttaagtaattcaggatttcctttccagaaacaaagcaggaataaaaaccactatgacaatataaaacctttgtacatttttaggtatttttcccttcaatatttaaataaacatgatttcttctggcatgtatttaatgttaagtgaacatgattttaattagtctttttttatcgttatttcagccattataaaagccataaatgtgtttccagaaaaagtgcttttgatattattacagtattctctcataaaataggaggtacgcttgtgagtttagtactttagttgtaggcacagcttgcacatgtgtgtcgctgatgtgaaaccactggcccttttgattccatttcaaaatcttgtggaatatcaccgtgaaagaacaagattagagagatgactatttgcggttcttgccttggcataggcagtgtaatgccccgacctcatagtaccactgtgttcaacaactccatataaggaatagagtacccttgtattttcttctgcaacattcttacatttaagggtgcaaaaaggagccaaatctaagatttccggaaactttatgtgtttgttaactttgcgtaggttaaaaccagcctgctgaaatctctttaaatgaagagtaagaacaggaggagcaagagaaattagcatctgctttttggcattggtgtaaacatgcttcctttcaccttttatatttgcctttggtccattacactgtctccgtgtgcatacttcacaaagcagtttattcgcatctcgaagtttctcattacgggtgaactgatataaacaatgttggattgaacactcatcagtattgaaaacttccctgtttgcaagagtacagaaagcagtttctggatcttcatttacaacctcatacacctttgttccaggagtatgactatcattcagaatctctatatttatttcatcaggatgaagagcagcattcaaatgtcgatc

SEQ ID NO: 12451 - DNA, 98 bp, Homo sapiens
ggtaatgagaacatgggggacatattgaaaggacacaggaaccaaattgaatgtccctcagtggccaaatcttgggcaatttgagcaataaaataatg

SEQ ID NO: 12452 - DNA, 645 bp, Homo sapiens
ttttttttttttttttttgattttctgtgtcagtctttatttggcaaacaaatttccttcccgataaggcagccgcgtgagaggagcgactgaatgcccagcacccaacctccaaaagcacctccagccagaagacaaagatcctagaggcccacctcctcttccgctgctttagtcttgcgcatggagggctgaccgcaggtctgcaaagctcgaaggtgttcctgagtcctcagagcagcagcaggagctggaacaggaggcagtgagcctcctagccccgggtcatgggctggagggagcatgacaggaaggagggaccctgcagaccaaggctccaaggggctggattctggctcccctggggcaggcaggggctctggggcttgggcccagcttggagtcacaggcttgctccatcccctagtgagtggctgtcatcgcccctcaaaatgggctgtgatttgttccagagtctttcctttagtttcagggacacagaacaaagtgaaaaggacactgaagatgcagaaagcggaggcaagccagaaggctccatagggcctgaggacctccggcgatgaagaggcacatgctgcccacggccagccaggccagccccacgctggcatcaacaggctgtgc

SEQ ID NO: 12453 - DNA, 391 bp, Homo sapiens
ctccttttcccctgctggctggtgactgtcagagaccccatcactgagttttgtgtgatgagatgttttcatcatttttgtttccttttcttgaatcagacttgtgatttggggagagcaacttcagggcttctccatagaccttgaccattataagcagaccttatttctccctacacttccactccataggtaaataaactgggtgaagccacacacacccaatgaacattttctcccatttggtggtttagtttcacccagtgtgcttttggataagcagaaatatctaaatgggattttgagttctccagctatagaatgtgaatgagataaaaagtgaactatctattatatttctctgagtttgttttctatcataaatacatgg

SEQ ID NO: 12454 - DNA, 432 bp, Homo sapiens
cagagaccaaacatggcctgtacttggtctgtgaaggaagtggcatcatatcagccattacagcgaaaactcttcactgcagcggttcagctgctgaagccagagggtgtgctggtttatagcacgtgcactataacactggccgaaaatgaagaacaggttgcctgggccctgacaaaatttccttgccttcagcttcagccccaggaaccgcagattggaggagaaggaatgaggggagctgggctctcatgtgaacagttgaaacagctgcagcgatttgatccatcggctgtgccattaccggacactgacatggactctcttagagaggccagaagagaagacatgttgcgtctggctaataaggactctataggtttttttattgcaaaatttgtaaaatgcaaaagcacataggagtagggatgg

SEQ ID NO: 12455 - DNA, 358 bp, Homo sapiens
cggacgcgtgggtttaggaatgtgtaaccagaactatgttagtattgcttataaaactttagttaggttcaatatatacatatatacatctctatataggtatatagatttgcattttgtcttgtaaaattttatttgaataaattcttcctgtaggtaatgggaaacaaaattaatagttcatatgtcactcatagcatttctatatttgaaagtagcccaatataaaacttttgattctaaaattaaaccagcagcctattacaagcacattctttgattgagtcattggttataaacttactaaatgcagagaaagcagccaatttaggaaacttctgagttggtgggacactgt

SEQ ID NO: 12456 - DNA, 440 bp, Homo sapiens
ggttgctcatcactaaatgggaggccttattgaatggaaatactggcttgtatttaaaatgtttattagtatatatatttgggcaaattttacagtcatagaatagacacagaagaatattaagttaatcagacatgatttagtgagatcaaaaatacaaataatctgaaaatttagtgaaaagttctaaatatactatccataccaagcacatcaatatattttagaaaataactgtattgaccaagctggctgaaaataagaattttgtttttctagagagcacttaattgctacttaatgtcaaacttaatgacatctcacccacccctcctaaaatcctactaaaataaaattatagatattgaaaaaggaaagaatctataatagcaaagaaaaagggccagagttttgctaagaaatgttctgtagttgggtga

SEQ ID NO: 12457 - DNA, 715 bp, Homo sapiens
ttttttttttccagtgtggaaacttactttattccagccatgattatcctagttgtcaccttgcacacctgccatccggtgccatctcctggctggcacatctatacccactctggctctgaaaggcttgtcaaccaaaaatgggcagctggggctaaggcatatttaaacaaaggctccaaaggacccctttcacttgggtctagcatccagcctctctctcagcaaaggcaggattgtggtcccttgtgttttctgaacagggcccagggcagccaaggcatgccatcactgcagcactcaaccctctggtcacagtggagtcgccggtccagcctgaaatattactacagaggagaaagacccattcttgctatgttgctctatcttccacgtccaaaaacagtcctatgtagcttcagctgctccgaaatcaggtcacagaacagcaggagacattcctttggcaaaaaaggacacgcttttgtcctgtatcttatactggtaagtgaagctctgatcccggtggactgcgggctgcgatggtctcctccacaggatcctcagctgcccgtgcacatccctgcagaagccagtggccaggccctcagcccgcagtatcagatggctctgatgactgaggccattcagcaggatgtcattctcctcatcctccgcatctccactgtcgtgcacaaggaccaccatgtttccc

SEQ ID NO: 12458 - DNA, 496 bp, Homo sapiens
  misc_feature (1)...(496): n = a,t,c or g
ctctcccgttccctagcacgctctctttctagttctctctctttttctctttcccgatcccgttcacgttccctctctctctcccgctccctgtctcgttctcgttcccgatctctctctctagccctttcatctctcctatcatccactctgtctactcttcgttcctctcttctttcatcacgctcaagctcgtcattccttccctgatgtcgaattggtgagcttggtctttgatctacaatgaaaatcaagttttgtcagtgattaatttgacagataacctattggtaagacagcatggtaaatcttaaattttatctgtgtataggggtcacactgggcaacaaattaacaaaccaaggtaggcatatttaattttaacttaatatccaagtaacaatcgcccctagaccttaaattttttaaagataatttttaatttggccctctaacgaccatgtttcctgctccccgtcaacccccttcncccctc

SEQ ID NO: 12459 - DNA, 351 bp, Homo sapiens
ggcctaaaacagccatacacactgctgctatggatatgctgggaggacctggtatcgaaagccagtgtagaaaagttgatatcattgcagatgcagcatattccattttccaaaagccaaaaagttttactggcaactttgtcattgatgaaaatatcttaaaagaagaaggaatagaaaattttgacgtttatgcaattaaaccaggtcatcctttgcaaccagatttcttcttagatgaatacccagaagcagttagcaagaaagtggaatcaactggtgctgttccagaattcaaagaagagaaactgcagctgcaaccaaaaccacgttctggagctgtggaagaaa

SEQ ID NO: 12460 - DNA, 528 bp, Homo sapiens
gcgtcgaccgtagctgcagctttggaggagtaagcggcgtggtagcgaaggtcgccgaacccgcctggctagccggcgagttgagtggcgactcttttgaaacagatggtcaccatgtttagatattagcagtcccgtatgtgcatgtctgcatttgaaaatggaagagggaaacaacaatgaagaggtaattcacttgaacaactttcactgccatcggggacaagactttgtaattttcttctggaaaacccagattatccaaagagagaagacagaatcattataaatcccagtagcagtctgctggccagccaagatgagacaaagttgcctaaaataagacttttttgactattctaaattgactcctcttgaccagcactgcttcatccaagctgctgacctcctcatggccgacttcaaagtgctcagtagtcaggacatcatgtgggccctgcacgagctcaaaggacactatgcaatcacccgaaaggccttttctgatgccattaaaaaatggcagga

SEQ ID NO: 12461 - DNA, 234 bp, Homo sapiens
gagctgctccacgtgcagagacaggtttcagaatgagaggagaagagcaggcactgcagagggtgagggaaagggcagcagtggactgggaagccctcaggtggaggtcagcattgcttccctcagatcatgggtgaatttgaggaactcagttaatatctttgtatcttcctccctccataaggtgagaacaagcacatgctctgcccatgtcagaaattgtctagactagtg

SEQ ID NO: 12462 - DNA, 1459 bp, Homo sapiens
tacccataagacatcacattatccctttgtaagctacttatctccaaaaaaacttcagaaatagaaaactacattttggcaggaataattgaaaacaccagaaggttgaagtttaattggaaacccagaatatacatactttgctgttttcttccctcaaatattttactatttgttttatttgggagttaaaataagagtatcatccatatgggtccatcctaattcacagaattaaatgagcttaaataggaaaattcagtattttatggataatcacttcgtttttagtttttaaaatttagattattctataatttaccgtgtttgagtattttctcatttttttcataaccatacctgattatactgtgtaacaaatattttctattgcagttttctttccagtacttattagaactcagtatttggaaataatttcagcttaattgaccataagaactgtggccaaaaagaacagttttttggagaggcagatgacattatacctgattttagaaaatctcactttatttttgctaataagtagactaagtgctctgtgttctcagtcttccctttttttctgcccccattcttactttgtcccaggcatgcagagaaagatggtgatattttaggccaggagtataccttgctataacctaagcatgccttctttattccagctcctatgttctgtgtatatcattaacattttcccaaataaacacttaattctcttttccctaggtgccatctcctcaagctacaaaatgtccacatcttatatcccctttgcttctactgctctgattttgtggtaccagtactctctgccactgaacattttgaaatatttttgttttagatttgcaaaaaatgacatataggtcagtactcacatggatttttaagataaatcacctgtgtgataatattttgaatctgagacgaatacaacttttaaaaattgtttttaaaaatagactttttttttttagagcagttgtaggttaacagaaaaattgagaggaagatagagatttcctttctcccctgacaaagccctcaacagcctcccaggctatcagtatcctgcaccacaatggtacatttgttacaatcaatgaacctactctgaaacatcattatcatccaaagttcatggtttacattagagtcccctcttggtgttatacatgctagaggacaaatatatgatgatatgtatgcatcattataatatagtatagtttcgctgccctaaacatcctctgcaaatgcaactattttaatgggtacccaaagaagtaaatgtatttactggcttttagataataaataacgggctttattgtttattttaaaagctacaatttgttttagctggtttctctgttctattaatgctttgaatttccaaatttaatatatgtagtcatgcatttaacttaaa

SEQ ID NO: 12463 - DNA, 329 bp, Homo sapiens
ggtcgacgaggaaagagagcaagccacaccccgggggcgaaagactgccaacagtcagggccgccgtaagggccggatcaccaggtccatgacaaacgaagctgcagctgccagtgctgcagccgcagcggctactgaagagcccccaccacctctgccaccgccaccagaacccatttctacagagcctgtggagacctctcgatggacagaagaagaaatggaagttgctaaaaaaggtctagtagaacatggtcgtaactgggcagcaattgctaaaatggtgggaacgaaaagtgaagctcaatgtaaaaacttctattttaact

SEQ ID NO: 12464 - DNA, 380 bp, Homo sapiens
tttttgaacagagtagaactggttcatttttagtcaaatgcagcactgggcagtacagtcaccactgggcacatgtggctgtttacatttgaaatattttaaagttccttaggcacactagctgtgtgattaataaataaaacatttctgtcatgtagaaggttccgttgggcaaagctggtctaaagcaaggtcctgaggttctcagcagatcatttgttttacgtccatttgtttatatattgtctatgactgccttgtgttatgggaacagagttaagtagttgtgtcagaaacagttttgtccatgaagcctaaaatatttactacctgcccttttacaggaaaagtttgtttacctgatcaaaagggataggacg

SEQ ID NO: 12465 - DNA, 444 bp, Homo sapiens
ggacccctccccagggccttttcctcctctgcgtcttccatctactgaaatgggagagggggtggggagcttctgttctggtgaagggacccgggcaggcccccagcaccccatgctgacttggagaaccccagatctctggggcccagccaggcagggtgtgggggcagctgtgccaatctacctcacaggcccaccccctgccgggcatgccgtgggatcatgggcagggaaggctctgggggtcggagacaccgctgcttagcacccccagccagaacaccctgagggtctcggggctctggagagagtggggcgggaggaagaattggcaccttcctagggaaggagacgagcgcttcgccttgattctccgagaagcctccgagaagtgctttaagtgtgtttgcatgcgccaggcggtgggcagcgggggcctgtcct

SEQ ID NO: 12466 - DNA, 380 bp, Homo sapiens
ctttcttcctagaaaacgggagcagccagaccctagcacaaagaagcaacacaccatctggccctctcctcaccagggaaacagcccggacctagaggtctacaatgtcataagaaaacaaagcgaagctgagcttagctgagacccggccagacctgaagaatatttcattccgagtgtgttcgggagaagccactcccgatgacatgtcttgtgactatgacaacatggctgtgaacccatcagaaagtgggtttgtgactctggtgagcgtggagagtggatttgtgaccaatgacatttatgagttctccccagaccaaatggggaggagtaaggagtctggatgggtggaaaatgaaatatatggttattaggac

SEQ ID NO: 12467 - DNA, 553 bp, Homo sapiens
ctttttctctctataagggccagggtgttggtcaaattcaccatcgattaatttatatcttctgttgtgatttttttcaactatataacaagtgccaactaattgtccatgggacaatctacttttccactcaatttatcgttttgagtagggaaaggttcatttattttcattacctggcattaagttaaagaattcattattttgcatacatttgagtcattctgtgacctataaagtgtttttgtaactatctaattctaatggttgcaaagcaaagcacatgactgtaaaaccaagcaaggtgttttagtaactttttccctgaatacttggtagtttccattgatactattccaaaacaaattctgctgttttaggttgtatatttactttgcttttgttctaagaaaaagccaaggactaaatcaacttgtttttgtgtttcagtaatcagtttaaaatctaaggatttttttttaaattaggactatttaatgaaggtgccatgtaattgtaggcttgctaggtgtttaatgtttaataggactgg

SEQ ID NO: 12468 - DNA, 435 bp, Homo sapiens
gaaagagcggaccttctccttctgtggcaccatcgagtacatggcccccgaaatcatccgtagcaagacggggcatggcaaggctgtggactggtggagcctgggcatcttgctcttcgagctgctgacgggggcctcgcccttcaccctggagggcgagaggaacacgcaggctgaggtgtctcgacggatcctgaagtgctcccctcccttcccccctcggatcgggcccgtggcgcaggacctgctgcagcggctgctttgtaaggatcctaagaagcgattgggcgcggggccccagggggcacaagaagtccggaaccatcccttcttccagggcctcgattgggtggctctggctgccaggaagattccagccccattccggccccaaatccgctcagagctggatgtggcaacgttgcggaggaattc

SEQ ID NO: 12469 - DNA, 4386 bp, Homo sapiens
cgcgtgtctacgcggacgcaccggctaagctgcttctgccgccgccggccgcctgggaccttgcggtgaggctgcgcggggccgaggccgcctccgagcgccaggtttattcagtcaccatgaagctgctgctgctgcacccggccttccagagctgcctcctgctgaccctgcttggcttatggagaaccacccctgaggctcacgcttcatccctgggtgcaccagctatcagcgctgcctccttcctgcaggatctaatacatcggtatggcgagggtgacagcctcactctgcagcagctgaaggccctgctcaaccacctggatgtgggagtgggccggggtaatgtcacccagcacgtgcaaggacacaggaacctctccacgtgctttagttctggagacctcttcactgcccacaatttcagcgagcagtcgcggattgggagcagcgagctccaggagttctgccccaccatcctccagcagctggattcccgggcctgcacctcggagaaccaggaaaacgaggagaatgagcagacggaggaggggcggccaagcgctgttgaagtgtggggatacggtctcctctgtgtgaccgtcatctccctctgctccctcctgggggccagcgtggtgcccttcatgaagaagaccttttacaagaggctgctgctctacttcatagctctggcgattggaaccctctactccaacgccctcttccagctcatcccggaggcatttggtttcaaccctctggaagattattatgtctccaagtctgcagtggtgtttgggggcttttatcttttctttttcacagagaagatcttgaagattcttcttaagcagaaaaatgagcatcatcatggacacagccattatgcctctgagtcgcttccctccaagaaggaccaggaggagggggtgatggagaagctgcagaacggggacctggaccacatgattcctcagcactgcagcagtgagctggacggcaaggcgcccatggtggacgagaaggtcattgtgggctcgctctctgtgcaggacctgcaggcttcccagagtgcttgctactggctgaaaggtgtccgctactctgatatcggcactctggcctggatgatcactctgagcgacggcctccacaatttcatcgatggcctggccatcggtgcttccttcactgtgtcagttttccaaggcatcagcacctcggtggccatcctctgtgaggagttcccacatgagctaggagactttgtcatcctgctcaacgctgggatgagcatccaacaagctctcttcttcaacttcctttctgcctgctgctgctacctgggtctggcctttggcatcctggccggcagccacttctctgccaactggatttttgcgctagctggaggaatgttcttgtatatttctctggctgatatgttccctgagatgaatgaggtctgtcaagaggatgaaaggaagggcagcatcttgattccatttatcatccagaacctgggcctcctgactggattcaccatcatggtggtcctcaccatgtattcaggacagatccagattgggtagggctctgccaagagcctgtgggactggaagtcgggccctgggctgcccgatcgccagcccgaggacttaccatccacaatgcaccacggaagaggccgttctatgaaaaactgacacagactgtattcctgcattcaaatgtcagccgtttgtaaaatgctgtatcctaggaataagctgccctggtaaccagtctctagctagtgcctcttgccctctcctcacctccttttctctcagtgactctggaacctgaatgcagcttacaagacaagcctgacttttttctctgattaccttggcctcctcttggaaccagtgctgaaaggttttgaatcctttacccaacaatgcaaaaatagagccaatggttataacttggctagaaatatcaagagttgaatccatagtgtggggcccatgactctagctggggcaccttggacctccagctgggccaatagaagagacaggagacaggaagccttcccattttttcaaagtctgtttaattgcctattacttctctcaaagagaacctgaagtcagaacacatgagcagggtgagaggtgaggcaaggttcatcctgaatgggagaggaagtcgaaccactgctgtgtgtcttgtcaggatgctcacttgttcctactgagatgctggatattgattttgtaacagcacccggtgttttcacggctgtccgacgtgagctaacgtggcggtgtggctgcctggacctcctctttcaggttaacgctgacagaatggaggctcaggctgtctgcaagaaaacagttggtttggctgtgattttgacctcctcttccccactggccatcttctaagagactttgtagctgcctcctagaagcacattctgagcacatttgagacctctgtgttagaggggagactgcacaaactatcctcccccaggttgagacgtctgcagagtggcaagctgacttgtagaaatggggtgccatttatgctctacttagacaagggtaatcagaaatggaatcagtgcaggcaaaatttaggatttgccgcttccataaatcaaagcatgactaatagggggtctctgaaatgtaagggcacaaacttcacttagggcatcgcagatgtttgcagaatggttggcctaatgattatgctacagatgggttttaaatgacccgtctaggttactgcttccttgcaaaaaaagtcgaatcctgcattgaattgaatatgaatttctctaactctctccagaaaatggatggagataacttgtctttaaaactgtaggccagccttagccactgtgggagcccttgcctccgagctctggcttcaaggggagctcttctccaggtttcactaggtgaattgatttattattatcatattgataatgtgagattctttagccactttggggagcctgtctctccagaagcctttcttagtggtgcccacagttggagcccaggggccatgtttgcaaactgattcatgtgcatggctgacaggagtactggttcactaccaatgcctgagcttttctcttacatagaaaaactgtccactctcagtaatcacaagcagcatccgttttgttttctcttcttgggagacatctgtcaaaccaggaatattcttgaaaagaacgtgagcaggaaaaactgctggtgatactttttttaagttttgtttttatcttgcctgttggcttcaatacatttgagaatacgctgaagagggaaaatttcagtgatggagattctagattaaatatcaggactgatttcctggtgggattatggtccagttttaccaaagaaccaattccttgaatgttggaatctaactttttatattgtcattattattgttgtttttaaacggttctttgtcttttctgttttatttttctcaagctgctttcaggagctagcagaaaataactcaaagttgaagactctggaagattttgctttaacctaactcgcattgatgtattaaatttataattttagcattcccaatagatcctatcattccttaaacataataccctttgtcttggagtagaatactaagttagagttagtgggatttctagtttagggagagggagctcaaaactataatctttaacaaattggaaaaatgaaatagggtgttttccctttttgtgcacacctatattaccttaagaaatttccttccatagacagctgcctcaaagggaaatcctctttaaaccgtagttggcgcagaggtcagtcctagtcggagcttaggaggggcggagacgctcacatcgtctgacttgagtcgccactgattgtggcaacagctttgcctcatgagtcaaaaattggcaatttcttttgatttttagttgttgaatttgctgtttcaagcatttgtacatattagaagtctaaggagtagcaagtcagtgggaggactttttcacccctggcattagcagcttcgacctcattttccagatgcaccagctcctattaataagttagcaaggaaagtgtatgtcacgtgcaggaacagtgaggcagggacaggggttctgctccttctcacttcaccaccggcacacagcttgcccctgtctttgcccccaaaggtattttgtgtctagtgtcacattggagctattcttcactggtccttaaccttgggttttaaaaagaaggcttctctgtttgggtagcgtaagagctgagtatagtaagtcctcttccaaagagatggcaatatgctggggcatct

SEQ ID NO: 12470 - DNA, 910 bp, Homo sapiens
  misc_feature (1)...(910): n = a,t,c or g
tttttgtttttttttttttatttaaaatgttctttttttatttgtcgtttaaaaacaaacttggaagaagcaaaatccaaaacttgccctttgcctctcgcaacataaatatgtacagttcagaatgatcgctgatacaaaacatgccaaggacaggggcgctgagggtggagggagagagggcgctttaaaaaagggaaccatttcatccgttgttacgaaggaccaaccttgctgtacaggatacacacaacacaaaataaagtcttcacgggattcacacttgtcagcgatttattttttaaaaagggggagggtcctggaggtgaggggagaagactgtaaaggggaaaactgaaaactgagtatgtgcgagtgtaaaccaacccaaaatacaaacacgggggcggggggtggggtgggggattctgatgcaattatacaggcagggtacttaaaaaaaaaaccaaccaaaattccaaccttgtagcttgggtctgagttatagtttatataaaaattaaaaactgtataaggtttcttcactaaattctacaggactatcggatacctagcatatgcttacaaagtctgccccatccccttttcccaatcccagggcccaagccccaaacacagcctgactcacgggagccaatctccccctccctgtagcctagaccttctgctctcggaaaaggaacatccaagggctgtggctttgagggcagcagcccagtcttcctactgtctgatttaattacagcggttcctgtgggagtgggggctgttattctcttaaacatttgcagcttgaaacagttgaggaagcagctttaaaaaaaaaaaatctccctacccccaacaatccacaaccccccaaattcaaaacaaaacnnaaacaaaccta

SEQ ID NO: 12471 - DNA, 455 bp, Homo sapiens
tcattagatatgccattcatatcaagtaatgttcaagtatgataaaattattttggttgctttaaagcactgtttcccaaatctacctgatcataataatttaccaggaagcagaggagagctacttgtttaaaaatccacattcttggacccaatcctcagatgcacggattcagtcttcaggggaaactctgttttaaggggtatgttgtaatctaaagtaattggttcaggaggtgtcaataggttgaacttgtgagaaggcactgaatctgccatccacatcacatatagcagctattatgaaatcagctttcataggcctatttttaaaaggaatctgaaatttaattctattttgataaaactaagactggaaaataaccacttgtaaacattcctatgattgttactaaaatgtattttcatgtttaaaatgtttttggatatttttg

SEQ ID NO: 12472 - DNA, 368 bp, Homo sapiens
gttttgtgttttctttatgttgtttatatattttttaccttagtgtttacactggtaaggcttgttagtccatttttgtagtttttttaaagtaagcttttagatctatttgtgttttaatgtttcccagtttgggttttgttttgttttggaagaatctgctttcattattaaattataaaatgtaaatgctctaaagtaggaatttttaaagagtaaattatttgtgtagcttattaggaggttcaggttagtgaccataaagtgggttacttgtacatgaaaatttgaaatggtaccatgtaaaattcttctattgtcaactttttctgatgtatgccagttcatttactgacaaatgttgttac

SEQ ID NO: 12473 - DNA, 370 bp, Homo sapiens
caggaccccaagtaccagggtctgcgggcacgtggccgggagatccggaaggagcttgttcacctgtaccccagggaggcccagcttgaggagcagttctacctgcaggcgctgaagctgcccaaccagacccacccagacgtgcccgtcggggatgagagccaggctcgagtgctccacatggtcggagacaagccagatttctccttccaacctcggggccacctggaaattggcgagaaactcgacatcatccggcagaagcgcctgtcccacgtgtctggccaccggtcctattacctgcgcggggctggagccctcctgcagcacggcctggtcaacttcacattcaacaagcatctccggcggg

SEQ ID NO: 12474 - DNA, 552 bp, Homo sapiens
ttttttttttttcctaataaaacaaacctttttaataacattgaaataaaatggtttcattttgcattaaactacataccatgaacttctccaacataaaaggactaaaaacaagcattagaagatatttacaaactatctttaaacttctacaggtctctcctcctcctcctggatgtgcacaccccaatccagttcacccatcaagtgcacagcaaaggaaaagaggcccatttaataaacataatgtttccaacacccttgaggaccatggacagttttgcaagaaacatggtaaggcaactagaagcataactttctgctgaaaagagtctctgggggtcttgtctacgataacatacattctttgtccctacaaactcatacttcaaaaatgaataaaagcattagaaatggcattaaagttttacattgggcaattaaatagctatgcaaaggtgtcttatgcaactcgattaaaaccttgtgcttactctgctactgaaatagcacacgtagaagacaatacttcccccaaccaaacaagaaaaa

SEQ ID NO: 12475 - DNA, 110 bp, Homo sapiens
atgagccacaaagatttttgtagtaggtatattggcattgcattttatattcctctatatttaattttgaaaacctaaaagaaggattgtgcatcttgagagaaagttga

SEQ ID NO: 12476 - DNA, 866 bp, Homo sapiens
  misc_feature (1)...(866): n = a,t,c or g
ggaganagaaaacagcagaattttgataagaaaagaaaagcaaaaactaataagaagatggatcacataaagaagagaaaaacagagaatgcttataacgcaatcataaatggggaagctaatgtcaccggttcccaactcctaagcagtattttaccaacttcagatgtgtcacaacataacattctcacgagtcacagcaaaaccagacaagaaaagagaactgagatggaatactatacccatgagaagcaagagaaaggcactttgaattcaaatgcagcttatgaacaaagtcatttcttcaataaaaattataccgaagatattttcccagtgacaccaccggagttagaagaaaccattcgagatgaaaaaataagaagacttaagcaggtgctgagagagaaagaagcagctcttgaagaaatgcgtaagaagatgcaccaaaaataaaatctcctgtaaagacttcagtgaaatagctgttttttaaaatatacttcagcattaataagttaattgtagggtgtgttctgaaagtgtctttgaatatgaagcttgttttttccatcagtcgattgtacaactttaaggaatacagaaaaggttgattcacatatgacttgtgaataatttacatggggtatctatacctttgtcttagatacctttttttggaaggataaattttatattttcctattattttaactagaattctccaagtttgaatatttgggcagggtttttgttattgtttgtatctttacctaaattgctcaggcattattccagcagtagatagtgactgtgtattactgaaattttacaaattccaagagagggaaatcagctcccaaact

SEQ ID NO: 12477 - DNA, 518 bp, Homo sapiens
  misc_feature (1)...(518): n = a,t,c or g
tttttttttagttgttaaactctggttaagtttattataaccttttttgtgcacgttacactcatccacattggtacaactaatttttaagtgtaaattctcatgtccacatttgtcatatcttctcaatatcattttttggaaagaatcttctatgccttgctctggccaaaactcttgggaaaaatgagaacatataactgggcgtccctccaccatctcatgtctcttcatattccagggctcttttccttgctccagaaaaatgatcaggtctggcttacagacagtgagaccaacggagaacaagtttctgtagttctccaacatcacatccctgtacaaattctgctgagcgaggtccaggcatttccactcctccagggagaattctatggccacatccctgaacgtcaacagagtcatctcctggcctccagagagcctggcgtttcacttctggatctcccggtgctgcgggtcnancacctacggctagcaggggacacagagccgcg

SEQ ID NO: 12478 - DNA, 625 bp, Homo sapiens
gcggcgctactactactaaattagcggccgctcgacatcacgagaggaagcttaaatctgttgtttgaatttaggaccacctcggttcacaatggtccgtagtggaaaaaatggtgaccttcatcttaaacagattgcatattacaaacgaactggtgaatatcattcaactacactgccaagtgagagaagtggcataagaagagcagcaaaaaaatttgtcttcaaagaaaaaaagctgttttatgttggaaaagacagaaaacaaaatcgtttggtaattgtttcagaagaggaaaaaaagaaagtcttaaagagaatgccatgaaaatgacagtggagctcatcatggtatatccaggaccctcactctggtagaatccaatttattattgggacatctgtgaccaatggatgtcaaaccagtggggtatatgccttgtcagcattgccaagtggcaaaaaatacagttattgtagcaccgaaacagcaccttctcaagggtggaaaatccatggagtttagttactgttgatctgatgggggccttttcatacaagccacagaagtccatgtatatgctataatcatgacagattgttcaccaaatggattgtgattttg

SEQ ID NO: 12479 - DNA, 1422 bp, Homo sapiens
tcaaaaacatatgcaaaaacattttatttataatagatcaacatttttgacatgaaaggtagccactttcaatttctcaggaatgcctagaacccaacagttttcagaaagactacttagttcacaattatttcactgtaggtaaatgaaataatttcagaatgaactttttaaatggctttgcctatggaaagttgttttataaacttgaatgtatggtaagctagctttcccaggaaatgaatgtaatccaactatgttccaaatgtattaaaccagtttatacaacaaatatgagaatcacttatgtgcatcaactgtgctaaaacaagaattctttttatcaaaatattcatttttcaaaaaggcctcacattaacccctcaaaccaagcacccccttcctatgtccagcactcttttctacttcgagttgcatgactgtagagacaactgtcaaattccagtggaactggtacactgacttaagactctatgtaatatacatcaaacacaggaggtcactgactttaagggacgaggtgataactaactagttataattcagcaaatgtcttttttagtttagagggaaaaaagtagcccccaagtgtccttaacttttcagtacttctctgtaacacacagaatgaaaaggtactctctaaaattaaaatcattagaaaatatcttaaataaagtgttttacataaataagtgttaaatttcagattcaaactatattttcttctgtatctcaatttgggaaaaatctcacaattattaactcttctcagttacatttatttttgagcatttaaatctactatacaccagtttgtaaaattcaccttggttacctctccccatgcctatgtgctgtctttcctcaggtaagtccattatatgcatctaagtgctggggaggtttaaatagcacttaaagaatattcatgagagttctgaaatgaaggtttcgtctttagctattgactgtaggatttgtaattcaaatcatcacagcatcctaaagaaatactgtgtgaatggaatgcacacaattcctacagaacacacaaactgatgtccaaaaggcacagagtaatgctggtggctctttctagtcagttaagaaacaataaaaagtctgcattattctttcataatttaaatacttaagtaatctccactttattattttataacaatgacttcaaatttacattattttaagtaccattgtaatagcttagtgtataatacagatatttgcgaatatcccatccaaaaattaaaaaaaacttcttcactatatatatatttatataaaaattattctgaaagacaagaacatagacaagggacttggtacagaccatcaactcaattttctatcaccacagttgtaactccaaaatcaaac

SEQ ID NO: 12480 - DNA, 913 bp, Homo sapiens
cagcggacacaagggtgagcttcagacagacaagatgatgagggcagctgccaaggatgtgcacaggctccgaggccagagctgtaaggaacccccagaagttcagtctttcagggagaagatggcatttttcacccggcctcggatgaatatcccagctctctctgcagatgacgtctaatcgccagaaaagtatttcctttgttccactgaccaggctgtgaacattgactgtggctaaagttatttatgtggtgttatatgaaggtactgagtcacaagtcctctagtgctcttgttggtttgaagatgaaccgactttttagtttgggtcctactgttgttattaaaaacagaacaaaaacaaaacacacacacacacaaaaacagaaacaaaaaaaaccagcattaaaataataagattgtatagtttgtatatttaggagtgtatttttgggaaagaaaatttaaatgaactaaagcagtattgagttgctgctcttcttaaaatcgtttagattttttttggtttgtacagctccaccttttagaggtcttactgcaataagaagtaatgcctgggggacggtaatcctaataggacgtcccgcacttgtcacagtacagctaatttttcctagttaacatattttgtacaatattaaaaaaatgcacagaaaccattgggggggattcagaggtgcatccacggatcttcttgagctgtgacgtgtttttatgtggctgcccaacgtggagcgggcagtgtgataggctgggtgggctaagcagcctagtctatgtgggtgacaggccacgctggtctcagatgcccagtgaagccactaacatgagtgaggggagggctgtggggaactccattcagttttatctccatcaataaagtggcctt

SEQ ID NO: 12481 - DNA, 617 bp, Homo sapiens
cggggaggcgcgcggaggctggagctggaggcgcggcgccggtgagctgagaaccatgtgtgctcagtattgcatctcctttgctgatgttgaaaaagctcatatcaacattcgagattctatccacctcacaccagtgctaacaagctccattttgaatcaactaacagggcgcaatcttttcttcaaatgtgaactcttccagaaaacaggatcttttaagattcgtggtgctctcaatgccgtgcagaagcttggttcctgatgctttagaaaggaagccgaaagctgttgttactcacagcagtggaaaccatggccaggctctcacctatgctgccaaattggaaggaattcctgcttatattgtggtgccccagacagctccagactgtaaaaaacttggcaattacaagcctacggagcgtcaattgtatactgtgaacctagtgatgagtccagagaaaatgttgcaaaaagagttacagaagaaacagaaggcatcatggtacatcccaaccaggagcctgcagtgatagctggacaagggacaattgccctggaagtgctgaaccaggttcctttggtggatgcactggtggtacctgtaggtggag

SEQ ID NO: 12482 - DNA, 539 bp, Homo sapiens
attcggcatgaggggtctggctaggctacgggccacgcgccgccgccgctgccgccgccactgtcctcttcggaggcgcgggcccgacggaaaccatgtttgtggctcgcagcatcgcggcggaccacaaggatctcatccacgatgtctctttcgacttccacgggcggcggatggcaacctgctccagcgatcagagcgttaaggtctgggataaaagtgaaagtggtgattggcattgtactgctagctggaagacacatagtggatctgtatggcgtgtgacatgggcccatcctgaatttgggcaggttttggcttcctgttcttttgaccgaacagctgctgtatgggaagaaatagtaggagaatcaaatgataaactgcgaggacagagccactgggttaaaaggacaactctggtggatagcagaacatctgttactgatgtgaagtttgctcccaagcacatgggtcttatgttagcaacctgttccgcagatggtatagtaagaatctatgaggcaccagatgttatg

SEQ ID NO: 12483 - DNA, 548 bp, Homo sapiens
  misc_feature (1)...(548): n = a,t,c or g
gtacgggggcaaaaccctggacagggagcaggataagaagggggcgggatgagaggtttggggaggtgaggacattgccctgagatatcccctggaggcagggagaggagtgggggcaggaggaactgaagaggggggcagtttcagggaaaatagcccttagcctttttagtcgatgccaccctttctgtcacctggagaccttgtacttctcttgcactaataaccccggtgcttttgtggctgggggtttttctgttgctgctgctgcctccaccactgctgtgaattcacccatggtgcattggacactggatcttgaactccagagtctgtttagggaggtgagcacagggctgggggaggtgcggcggggcccagaagaccaggccactnagcccgcgctccaggctgtaacggtccaaaccacggcactggagctgcagggtctgcctagtgggctctgcattccccgagagcacgagtttngcacatgggagaatggagcccgtgggagaaccttctgggggggtcggggaggaatccct

SEQ ID NO: 12484 - DNA, 661 bp, Homo sapiens
gctcgctgcaggggtcggaggtcagggcgagcgtctcgcagggccgtaggaggaagatggcggtggagtcgcgcgttacccaggaggaaattaagaaggagccagagaaaccgatcgaccgcgagaagacatgcccactgttgctacgggtcttcaccaccaataacggccgccaccaccgaatggacgagttctcccggggaaatgtaccgtccagcgagttgcagatctacacttggatggatgcaaccttgaaagaacttacaagcttagtaaaagaagtctacccagaagctagaaagaagggcactcacttcaatttttgcaatcgtttttacagatgttaaaagacctggctatcgagttaaggagattggcagcaccatgtctggcagaaaggggactgatgattccatgacccctggcagtcgcagaagcttccagataggagattacttggacatagcaattacccctccaaatcgggcacccacctccttcagggcgcatgagaccatattaaattctatttactaagcttgtcagttctttcaaagttgcatccatccaagtgtagatctgcaactcgctggacggtacatttccccgggagaactcgtccattcggtggtggcggccgttattggtggtgaaggtcgac

SEQ ID NO: 12485 - DNA, 305 bp, Homo sapiens
cggcgagcgggatgatgatgtgcctgcagatatggttgcagaagaatcaggtcctggtgcacaaaatagtccataccaacttcgtagaaaaactcttttgccgaaaagaacagcgtgtcccacaaagaacagtatggagggcgcctcaacttcaactacagaaaactttcggtcatcgtgcaaaacgtgcaagagtgtctggaaaatcacaagatctatcagcagcacctgctgaaacagtatcttcaggagaaactggccagatgaagtggttctaaaaatcttctcttacttgctggaacagg

SEQ ID NO: 12486 - DNA, 329 bp, Homo sapiens
ttaaagctaactaccattaagatcattatagaagtttggtataatgaagatttgggtttttcagtccaatgagtttccatattcttgaatgaaaaagatccacatttcatcatttgcctgtttcattttcttttagtacttttgaacttagtttggtcagaaaatactagaattttagtttgatctaaagaaccagcttatataacttgcctgttgccatgtacatttgtatgtctttgctgtgtcaaataactggatctgattttagctctttttaagtggtgaaagcaatgcatttttattcttcaaattcagacattgaatgtgta

SEQ ID NO: 12487 - DNA, 639 bp, Homo sapiens
cccacgcgtccgaattttataatccatttaaagtgaaagtttatcacacaaatagtacacttattttctaaccaaatacttgataggttatgctactccagtgtagatggccattcctaacttgtttgtgcctgaagatggacttgattcaaatggtttacatatttagtgggtaagggatatgttacagtaccccacctgtaagttatttattagccctaattgtgtttgatttcagacaaaattaacccttttctcctgtgtatctttgaagtggcagataaggtgaagcatcagactggtatcaatattagacaatgttatttattagccctaattgtgtttggtttcagacaaaaccttttctcctgtgtatctttgaagtggcagacaaggcgaagatcagactggtattaatgttagagaatgttctgaagtgttcctattttgtagttatctattccatttgacatagtagaaggtactattttctttctactctgatgcatggggaaggatgtttttggacattatcaactgagataggtgggaaacctcctctcatttgtggcttagagagctatcaccatttcagaactatgatgcttttcttctcagaacttgtgttaagtagatagt

SEQ ID NO: 12488 - DNA, 152 bp, Homo sapiens
ttcttataggacctggattctcaccacatcctctgttctgtttagggaacacaaaggtaagctcagctctgtgtccaggagtaccttatagtcctctcccttaactgtgtctgtttcaacttgatccaagatcaggattagtacaagcttgt

SEQ ID NO: 12489 - DNA, 405 bp, Homo sapiens
cgccattttccccacaggggcgaggaggcggctttggttctcccggtgggcttgccggagtgcgttctgcagaccagaagggctttgtctggcgattgctgaatgctcaatagcagcctgctgggagggaagtcgaagggagaaataggacagaaagagagacctgacctctccctggaggctctcagtgtcggccgaggccgcttggtcttgctctagggctctgcattcccgagagctgctgtatgccggggattggcttccaagcctgcctgagcttctccagtctcccgggcatcgccatgcggtgggagggtgagccttcctctcctgctgaaattccggcggcttggcaaccggccggggggtcttggattcctcggggagacaccactgatgctttgt

SEQ ID NO: 12490 - DNA, 364 bp, Homo sapiens
cggaaagtcctgagcagggaggagaagcagaagctaaaagaagaggcagaaaaacttcagcaagagttcggctactgtattttagatggtcaccaagaaaaaataggcaacttcaagattgagccgcctggcttgttccgtggccgtggcgaccatcccaagatggggatgctgaagagaaggatcacgccagaggatgtggttatcaactgcagcagggactcgaagatccccgagccgccggcggggcaccagtggaaggaggtgcgctccgataacaccgtcacgtggctggcagcttggaccgagagcgttcagaactccatcaagtacatcatgctgaacccttgctcgaagctgaagg

SEQ ID NO: 12491 - DNA, 144 bp, Homo sapiens
tttaatacaggaacacacagggctgtgtagcatgataccaggcccaggagatcagtaattacaaattaagggttaaatcagagattattcaacagagagggagaaaggaggagacagagggaggacctgttgtgttccagccat

SEQ ID NO: 12492 - DNA, 1031 bp, Homo sapiens
tttttttttttttttttgagactccataatcagatttattttcctctaataagacagtttagcatctccgagttttgcattctacagtcttacaaactttagttattagcatcagaaacacaaaaacattgcaagacctcaaaacacaaataaataccaaataaaaccacacataatatacaataaacaaaactagaaaacagtaatgctatcaggaagtcaggcatgttgctaagctcacagtaacaacatgattattgctgggcaataactcacggtctttttgttttttcttagaagagcggaaaacaggacccaaatcactggtcacaaaatcacttggactgtcaagatgtgtcttcacagcaagcggctactacagacgcaacttttaaaacaggcagattaaaaagacagggtcaaatgagagattggccttctttggtctttgtttttgggtaacagaaccgaacagaggcaccggcagagaagaggctgcgaatctgcagatgctgtgcagcgtcgacactgccctccacacttcacagaccttctcctacaggcatttcttacagaaatcaccggacatcatgccagcttgtgtgttttccaattaagtcattgaatttgctgttggagggtatcttacttgtctgaggggactaagttgtcaaatccagtcatcacctaattacaggagcggtacagcgatcctggacttctagcctcttttcacggtgagagttcacaagacagactagacacagtgcagcaggagaaatgaaacgcaggctctgcttggccaccggggcctcctcacccgcacacctgccagccccgagacggccgaggcttcacacgtctgccctgccaccgcatgtggggcacaccagggatcaggtggaaaatgcccttgcagtgagctgctggccccgcctcacgccgcctgctggcccggctccctgatgccaccgtgcctgtgaccatcagcatcagcctggacgaggcagcaataatgaccaggtagcctg

SEQ ID NO: 12493 - DNA, 512 bp, Homo sapiens
cggacgcgtgggcggacgcgtgggcgagtccggccgggcagtagaggaaattgcggtagtgaccctcgggcctcgccatgaagagccgctttagcaccattgacctccgcgccgtactcgcggagctgaatgctagcttgctaggaatgagagtaaacaatgtttatgatgtggataataagacataccttattccgtcttcaaaaaccggactttaaagctacacttttacttgaatctggcatacgaattcatacaacagaatttgagtggcctaagaatatgatgccgtctagttttgccatgaagtgccgaaaacatttgaagagtcggagattagtcagtgcaaaacagcttggtgtggatagaattgtagattttcaatttggaagtgatgaagctgcttaccatttaatcattgagctctatgatagggggaacattgttcttacagattatgagtacgtaattttaaatattctaaggtttcgaactgatgaggcagatgatgt

SEQ ID NO: 12494 - DNA, 472 bp, Homo sapiens
actgactccgagggttgggagagcgcgttggtggcgacggcgagtcagccaacaaatggaattttcttgagcatgtttctaatcgttttgccattggaatccatggctcatgggctcttccatgaattgggtaactgtttaggaggaacatctgttggatatgctattgtgattcccaccaacttctgcagtcctgatggtcagccaacactgcttcccccagaacatgtacaggagttaaatttgaggtctactggcatgctcaatgctatccaaagattttttgcatatcatatgattgagacctatggatgtgactattccacaagtggactgtcatttgatactctgcattccaaactaaaagctttcctcgaacttcggacagtggatggacccagacatgatacgtatattttgtattacagtgggcacacccatgggtacagggagagtgggctctagcaggtgg

SEQ ID NO: 12495 - DNA, 389 bp, Homo sapiens
gtaacagtagccaccacattgaacatcaaatatcatttcattttttcccctttttctcctacctgaccctaagtaatacccagtcttcccaataccccattctctgtaaaatcttacaaggattgagttgaatattatcaactactatattccttcactcagaaaaaaaaatttgtagtcatatgtttcatcataagaataatatatactaaattgcctgtgtatttatttttatttgcagattcccactggattcttctctctgctgacagtgagggctttatcccgttaaccttcacagccacacaggaaataatcataagagatggcagcctgtccaggtcagatgtcttcagagactctttttctcacagtccaggtgctgtttc

SEQ ID NO: 12496 - DNA, 132 bp, Homo sapiens
ataagattacttcttttttagatggttcacattggcataaagaaatgctactgacttctggatgttaattttgtatcctgcaactttactgaatttgtttataagttctaatttcttttgtggagcttttcc

SEQ ID NO: 12497 - DNA, 315 bp, Homo sapiens
gtcctacaggaccatcagctgcatcaacgccatgcttacccagataccaccgctgacagcaccacagataacaagtctggagctcactggcaattccatcgcctccatcccagatgaagcatttaatggattaccaaatttggaaaggcttgatctgagtaaaaataatatcacttcttcaggcataggtccaaaagcattcaagcttctgaagaagttaatgcgtttgaatatggatggaaataatttgatacagattccttcacaattgccatctacattagaagaacttaaagtcaatgagaacaatcttca

SEQ ID NO: 12498 - DNA, 579 bp, Homo sapiens
  misc_feature (1)...(579): n = a,t,c or g
ctcgtgcnaatncggcanagaattgtctctaaaatacataagtaaatttaaaaaaaaaagaataataatttgaacagtgaatgttgatgtaacatcttaataatagagcaccagaaaaatttctaccaaatgagacaacaactttaggataagttcatcctctaggagctttctaatgtgcactcagttcctgtatactgtgtgttttgttctgatcaaggggtagggaacctttccagagaagtcccattagtaagaaatgacataaaatacgtgctttctcaggttactgtataactgttataatatatttaatatataaaattaagacttttgcttccagcaagtatgttagactagatattataaaacaactaggatcctggaataaaatctggcttttaataggttcactgggaagtagggaggaattttcaaggaaccatacttcggacattttcctctggccacaaaaaatgaacgcattttaagttaggagtcatgaatactgtattgaccatacaagtggattatggttgtctggatggcagataccaatagcaacattgtcatatgcag

SEQ ID NO: 12499 - DNA, 1387 bp, Homo sapiens
ggaagaattaattcagatctgtacctcattgctgctcacacatatatgtttcttaccttagcctaaccttctcaggccttgaagtcattattctactctttttttttcttttccttttttatggcactagagaatgaaaacctaaggtcttagaaaatcttaacttgaaaaagtctctaactggcatgatttgattacttttttcccctgtggacaaataattttctttcctatataatagatttttagtaagtgaaacctttgctgctgctttcctgggtttacattagttttttcctgcccttaagaataatttatctgtgcttctctgatgactgttaatttctaatagtgcaggaagggatgagcttttgatttcttctcactcccctcctcaccctacttccaaattacacactaacttctaactcttacagcctgttggcacatacacaagatccacgagaccatgctcctcagaagctacccatgtcctttctcaccatggtgtggctcttggagccctgagtatctgtgactacccactccaaaggttgactgtaagaggagagcggccttcttaattttgcatttcttaattttgtttttctccattcctgttttatgacttggccttcagatgcttcctactctggcctcctccttttttctcctaggaattgtttccaggtaacctaccatgtgcacttctcagctgctctgctcacctttggcccaccttcccgtgaaccctgaggagttacagatccgaataatgtggcctgtgcagagctcagagaactgtgaggactacccatgcctgtcagactctgctcagggacagagatggatgggtaaatggtgctgttggagacatttttatcttcataccaggctctgtttcatccctgcaccccgcacccccactcactccccctgagggggtaaaaatgcagaggtggttgacctgaagggtctgattccctccttcccaagccttagggcctaccctggagtgctgcagtgtgtgagagctgctgcttgcttgtttctccactaggcctgctcccaaatgcttagccaatctctggagccgacacagttgcctacggggtgacttagcaccaggttccattagctctccaagtgactgtttccacccagtacttttggcgcttgaggatggggggagggggattatttaaaataaataaaatccgaggtggcagtagaggattccttttgctttaaaaatctttggactaaaaaaaaaaaaaaaaagttttttatatataaatatataaagtaaattgttatgtaactattattgtttcttgtatgttctaattttgttttatgatgtaattaaagaaagtaagctgtgaaa

SEQ ID NO: 12500 - DNA, 834 bp, Homo sapiens
cgaacctggggttgctcaggaagtgggccagggaatgtggaagtcgttgacattgcctgggccaaaagagtgggagatagtttttctcccctcagcccactcctggtagcacctgtcgccagcctggtacaaagccaggcctttttcttctgtgagcatctcatcactgtccagcagcaggtggaaaaagggggacaacaaccagacctattttttctcccccattttttccaaattttgctgtgccaaatgtttaaaattttataaatatgaatctattgaaatttccttaatcaagagcttcttcgtgtaaagtttgcttttttagctatagaaaaagaaaacagtaaatatctcttaatggcatccagccttgctgagctcaccttttttcctgaaggaatgggtaggagtgaaatatttaatgtaaacatttcaccaagtccctttaccctaattttgaagctgcattaaacccaactcactaacacagggaatgattgcaccctagtcctctgtgggccaagaaactttcagaagcattaaaaaaatagttgaagtatatcacttctcaccaagtgggtagagtcagttggctgtttgtcccttgttttttatttattccataattatgtttgtgctttttgttttgtaaacagtaatggaacgtacatttttattttgtttagaagacaactttgattcaatctttcaagaactgttccattcttggtttcttcttagggggataaaaagttaccagttaatttgttttgagatatttaagcattctttgagttatagaattgtgatgcagggatttgtgaatgagac

SEQ ID NO: 12501 - DNA, 381 bp, Homo sapiens
cccagctgtttttaatgaaactgaaaaaatagacttgatcccggcaggactgtgatacagagccctagcctgcccagccagccccaagatctcaggagctttagggagaagacttggtggggctggagcacaccttgggcctcagtggtttctgtgtccctgtggtgccagtgcttctgggcagtgcaggcggctgccaggcccagccctgacttccactctggctcagcaacctggttatttatgtggggccgtgcaggcatgggcccactgcctgtccatcctgtttctcttatttattgaaactcaccattgccctatccttgtgtctccacccccttccatgtgttgaataataaaaggtgggaaagtgctgtcaaa

SEQ ID NO: 12502 - DNA, 777 bp, Homo sapiens
attttttttttaagggtttgtggtccaaaggcacgtttatttaaaacaaacgtgatgaggtataggaagaagaaaagaaggagaacaacaattctaacataaaaacacaggaagcatctcaaacttaaaaaagaaaaaaggagtgggggcaatggaggaagctatgtctcatacaaactgctgacctcaattgattacttacatccaaaccttacaaaatagcatttcaagtcagcacttaagccagtgttattagattttcttacaaaaagttaaagctacaaacttcacatttttaaactgtacatagcaaaaacatttaagcttttttttttccaagttggtccgagtgcaagctggtaaaagagattttttttccaaacacaaacaagaacatgtattccaaagacaatgaatataatactgataaaaacacaaacatagtgcttaagaaaagatggggtgaggtggagatgtagattgggcaggaacaattttctagtaaataaggagctgcaatctttagaggcaacatggtatgctagaaaggacactggaataagaatcagaagacctggatctgaatcatggctctgccatattctagccacatgaccttgagcaatagactttacttctctgagcctcaattttcacatctgtaaaaaatggaggataaataatacctatatctcccagcactattaagtttctatagatatagggctattcagattatctacttcttctttttttttgagacgggggtctcattct

SEQ ID NO: 12503 - DNA, 811 bp, Homo sapiens
ttttatgggtaaaaaattccatttttatttttactaatgtaggggagaacatatgtttccttctatccatcctaggtttagggctgagatctctataacaaaagagagattagcaagagaaaagcatgcacatttatttaatataagttttacacgacacgaggggctccataaggaaataaaggcccaaagaaacagttgaacttgaatgttttttatagtaggtttgatgaagagcagccagtgatgtagaaatgtcatagggcaaagtgtgaacaagctaaatgtaataaactgggggaaactgagaggcctgtttgtttagattcctctttgtgtccctgtgcttttggaggtaaggatgctccttttctctgggtgccaggagagcacctcttacatgacagtcttatgatctacttcaggggaaggtcagaaaatccttcccaggttttatggctgcttctggggagaacagcaggcagaaggtcagagtcaccttcctgcttctgcaatttcctcaaatgccttcagcttaaaatattcaatatgtcaaagtgctgtattttgtgtagggtgtcctgaaccccgtcactaacctctaactgaaagttaggattttcttcaattctgaacatagttcataaaccacggtaatattagcaatacttcatcatcaaaagaaaaacccagatattttcatatcacattagttttttgcatctattttcattatgcttatcactatttcaaatttaggatagctattaactcttatttaatgcatttataaagaagcatgcatattaat

SEQ ID NO: 12504 - DNA, 301 bp, Homo sapiens
ttttaaaagaatagatagacgttgaattattgatattctccctctctctctctaggatacttacagagagctacaatggaaaagtcctggatgctgtggaactttgttgaaagatggctaatagccttggcttcatggtcttgggctctctgccgtatttctcttttacctttaatagtgacttttcatctgtatggaggcattatcttacttttgttaatattcatatcaatagcaggtattctgtataaattccaggatgtattgctttattttccagaacagccatcctcttcacgtc

SEQ ID NO: 12505 - DNA, 429 bp, Homo sapiens
  misc_feature (1)...(429): n = a,t,c or g
aagagatggaatcaaagataaagactatgatataaattttgtaccttcttgcacattgtggtatgtcgtggataatagagcattttaaagtgatctggttgcaaaaatgtgtatatcaggaattaataagctaatggggaaattttaagaatttcatgcttattagttttttcggtatgtttgtcttcagaacatattttaagtcagaatgagcaaagatagtagtcaaagttgggagaaggtgtaattttactgatttttttctttttgacttatttgaaccttgacatgtgctatgggtgagtttagataggtgtgtacaaatatttcagcctgggatgccttgctctaactatatcttgatttcttagcatgacttagtgaaagcttatttttaagaatcttcagattataaagtagntaaattta

SEQ ID NO: 12506 - DNA, 311 bp, Homo sapiens
gttcctgcttcggagtcggcggtggtcgtccagaccgagtgttctttactttttgtttggttgaggtttcacgctagaaggtggctcaggatgtcttcatcacattttgccagtcgacacaggaaggatataagtactgaaatgattacaactaaaattgctcataggaaatcactgtctcataaagaaaatagacataaggaatacgaacgaaatagacactttggtttgaaagatgtaaacattccaaccttggaaggtagaattcttgttgaattagatgagacatctcaagggcttgttccagaaaa

SEQ ID NO: 12507 - DNA, 368 bp, Homo sapiens
ttttttttaaagtaataaacttattttaatagtgcaaaatgtaatctgctttccaaccaatgaaagaaaaacttgcaaaaaatttatgaaactagtcaataccttgaacaaagaaaaacacaaataactaagtaaatattacaattgtgtactccaaacccaaaaaagcagagaccgtcattacaagccaaatcttttttagagttggttgttgcaggttactaaaatgcgtaaaacaaaatctctacttttcagacttacagaaaagaaataactccaataagaaagctaacttaagtttcatgggaaacagatcatattgatgactttaaaatgtttttcaaggagtttacggaacagaagtaaaa

SEQ ID NO: 12508 - DNA, 446 bp, Homo sapiens
ttttttttttttttttttgacagctagaaattttttttctttaataaaaaaatcccagacacactttgaagtcctagagtacaccagcaacagaaggaagggaatcccctcatgggggtactgtagggccagcatcatcaggaaagctccaggcttcacatctgatacagtattgtcaggagcccacttaaaaaataaattacaaaaaggctgttttgggagtaagcagttgaactgttttttccccctcaggtgcaacagagattgagcagactacaaatcggtccgtgcactggctgccttgggggcatatttaggcatcagttcatttatcttccggatgtagtcagacttttctgcacagcctttgcatgtctccccccagtcatccagaatcttcttcagctctttaactcggagcttcttcaggtccactggtggcccag

SEQ ID NO: 12509 - DNA, 583 bp, Homo sapiens
ggaaactcagtctagtgcttttgtttccatccaaacatctatacattcctttattcacagaaccagatgcttctgttactaaaaatacatatccaaagcttttatatccttttaaatagatttaagatttcaactctttgggggaagacagggaagtccaaacaaacaactcagaccatcttaagttattagagataactgactttatgacacaccctgtttcaacttagatgtgaaacttgatgaacacattaatgaaaaaaattccagtccacatgtctaaggtaagtcatctttttctacatgagaatttgtgtagctcaaggagcatccactatagcaaccttcctgtgatccaggtcttgacgccacactccatttttgatttgtacgttctcctccaacctgatttggtttaatttcttcagcagttatattcagtacattgattgaactatgttcagatatgcaggaacgtgtctggcaaaagtctgaagtggaaggtgaagcaggaagagatttagtaagtttagacatgcaaactggagacccattagacacactgtgaggcttcttttgcggc

SEQ ID NO: 12510 - DNA, 311 bp, Homo sapiens
cgcggccgcgtcgacggggtccagaaagtgatcgctgccgtggtcgccatggggaagtcggattttcttactcccaaggctatcgccaacaggatcaagtccaaggggctgcagaagctacgctggtattgccagatgtgccagaagcagtgccgggacgagaatggctttaagtgtcattgtatgtccgaatctcatcagagacaactattgctggcttcagaaaatcctcagcagtttatggattatttttcagaggatttccgaaatgactttctagaacttctgaggagacgctttggcactaaaag

SEQ ID NO: 12511 - DNA, 818 bp, Homo sapiens
gcgtttgcagtcggcgctttaggggaactgtcttcctccgcaggcgcgaggctgggtacagggtctattgtctgtggttgactccgtactttggtctgaggccttcgggagctttcccgaggcagttagcagaagccgcagcggccgcccccgcccgtctcctctgtccctgggcccgggagggaccaacttggcgtcacgcccctcagcggtcgccactctcttctctgttgttgggtccgcatcgtattcccggaatcagacggtgccccatagatggcaagctttcccccgagggtcaacgagaaagagatcgtgagatcacgtactataggtgaactttttagctcctgcagctccttttgacaagaaatgtggtcgtgaaaattggactgttgcttttgctccagatggttcatactttgcttggtcacaaggacatcgcacagtaaagcttgttccgtggtcccagtgccttcagaactttctcttgcatggcaccaagaatgttaccaattcaagcagtttaagattgccaagacaaaatagtgatggtggtcagaaaaataagcctcgtgaacatattatagactgtggagatatagtctggagtcttgcttttgggtcatcagttccagaaaaacagagtcgctgtgtaaatatagaatggcatcgcttcagatttggacaagatcagctacttcttgctacagggttgaacaatgggcgtatcaaaatatgggatgtatatacaggaaaactcctccttaacttggtagatcatactgaagtggtcagagatttaacttttgctccag

SEQ ID NO: 12512 - DNA, 411 bp, Homo sapiens
  misc_feature (1)...(411): n = a,t,c or g
aatcatatgaaaatgcaagggaccaggaataaccaaaataaataaaaagaccaaagttgaaggactcacactttccaatcttaaaacttactacaaagctacaataatcaagactgtgtgctgctggcatagagagagacatataggtccatgggaatagagttgagagttcagaaataaacccatattttatggtcaactgagttttgacagaagtgctaaggccattcaataggtagtcttttgaacaaatgggtactaggactagacagccacaggcaggaaggaatgaagttaaactcctccttcataccataggacaaaaattaactcaaaacgcaccaaagncctaaatttcagagctaaaactattaaaacccttaggattaaancgggggtgtaaatctttgt

SEQ ID NO: 12513 - DNA, 42 bp, Homo sapiens
cttcctttgattaatgtactttctgtatcctagagtttccct

SEQ ID NO: 12514 - DNA, 330 bp, Homo sapiens
attttttttaaatctagtaagaaaagtctctaatgtctgatttcatgtgagaactggattctctagctgcttctgttgctaacgttagcacttctcaggtagctcttaaaaaactactacatcttgagagaatgtgaatgaaaaaggcaacctcatagtagaattaagaaaataattttggcctcatggacgtactgaaaagggtctccagaaaattcccacccccatgaatccccacaccacacttggaggtctgatagcgtagaggaacagttaatatttaaaataggtttaatctatgtcaatcataataatagtgaacacctttag

SEQ ID NO: 12515 - DNA, 631 bp, Homo sapiens
ttttttttttttttttatttctcattgtttaggattttctttttattatcaaatctctgctatagaaacactgaagaaaatgggaaaaaaaatcactggagaggcagcataaaatggtggctgaaaacaagaactctggagccaatctcagctctactcccttactagttgtgccccttaggtaggatccttcaacatctctgcttcagcttagccatttgtaaaactggggtaacagtacctatctcagagtaaaggggactaaacaagttaacacttggaaagcatttaaaagaaagcccagcacataagtgttatatgtatttgtaaaactttttaaaaatctcaactgggttaacttttccatggatctttcaggtccttacccatatacatttttttagatgtgttacagtaagtatgtatatacaattctgtatcctttttattccttcatgttatgtatactgatgcagtgtccataattataatttatagtgattgcctaaaacaaattacaaactaattgcccaacaatgcagtgatgagtaacaatggacgctgacacactgggctaaggatcactttctgtccagcaacatcagtctcacactcctaggcaataactttt

SEQ ID NO: 12516 - DNA, 450 bp, Homo sapiens
gcacgaggctctggaccacagtcctctgccagacccctgccagaccccagtccaccatgatccatctgggtcacatcctcttcctgcttttgctcccagtggctgcagctcagacgactccaggagagagatcatcactccctgccttttaccctggcacttcaggctcttgttccggatgtgggtccctctctctgccgctcctggcaggcctcgtggctgctgatgcggtggcatcgctgctcatcgtgggggcggtgttcctgtgcgcacgcccacgccgcagccccgcccaagaagatggcaaagtctacatcaacatgccaggcaggggctgaccctcctgcagcttggacctttgacttctgaccctctcatcctggatggtgtgtggtggcacaggaacccccgccccaacttttggattgtaataaaacaattgaaacacca

SEQ ID NO: 12517 - DNA, 579 bp, Homo sapiens
gagctgtttacaactgaccactgtgttccacagatgtatttttcaatagctttttgttacttagttttccatgatgcctgttatttttctcttgtaaatttaaatgagctgactttaaggatcttgggaaaacccatgggcataattacaattttctttttaatcgacttttcattacttttgggagtctgttggtaactaaagatgtcaacaaagaataaattggagaagttacctgtccccactatagcagtaaacaaaacagatgaaaaacaccttgctgttaactcaatggttgatctaattgtgaaatcgttcaccttgttaaacatctaagtaagtctgtagtcgctctgcaaacagccattatatttatttactctagaagaaactgtagagtagtaattcgtgctaatgagaaaaacaaaataccatgttcaaaacagatgtatttgaaaacttaatgacatggttccaaaaactagagcatgtatgtatggctgtgcatcatctcagcagacctaaaatatccccaagttgtccctttacagccatcaatatatttgacactctgcggcc

SEQ ID NO: 12518 - DNA, 249 bp, Homo sapiens
ctctgcgcccggcatgaagcatctttaagagagtttccattgtttaagttttcagagttgttgaaattccataacattctccttcttggtcttttaaatttggcctgtattctttcctttatgccaaactgcagaatttttcattattctgtatatcagtcagtgccatttcagctgtgccctggtgcgggtcattattgtactagacaattgagttcttataaaatcctgtgagttgttacttttttt

SEQ ID NO: 12519 - DNA, 526 bp, Homo sapiens
ttctcattgaagctggaaaaaagtagtcccaaaacctaaattcaaaataaaactatgcaacataatttttgagttgacaactaggcttgatttagagaaagtaaacatattttcacctctatcattattcttttgaatttcttatgagatcgagaatgaaaatgtataatgggtacaatattcttcatgttataaactctttctctactgtacagaaatatatcttataactatatgtcactttacagtatttaaaaatagtttcacataatctcctttgatatatgaaagcacaaaatattagaaatggttctagactaatcaagcgatataacatctatttgccatgaaatgcaagttagtattttatcaatagccaatatttagtatccttgcactccacagtacaacaataaagattatatatttgtaaagattcagtaatatttttagctatttggtcatgcttcactgcattttttataacagcttctcaatgaatttctgcaagcatatcgtagttttt

SEQ ID NO: 12520 - DNA, 564 bp, Homo sapiens
aatagtctagttaacaatttatagtaagctagtatatattaaagcaaaagcaaaatactgcctagatatgaatgttttagggggttgcttggctggtggccggcttgggtttcgcttgtacattcagcacataatcatgccggaaggatgaacgaacagtgcgattcatcagtggctgaagggggcggaagttgtccaccattcttttctctttctccccttcggaagtgaaaagcagggtccgaaattgctcaagctgatcatgatcaacctctactggttgcttcttaatgatccaggtgacagactcggagaggggtggggtagtcagagaccctgagtaggtccagtaatctgggcaggtaggcatcaggcaggaagggtcaaatgacccaaattccataacagcgtcctggccaagagactgggtcactgagtcattatttagtagtgaaaaccactcaggaattggacgccgaggtgacggttctcagggagtatctggagatcagcagtggtccagaggagctccaggcccttctgggcagctacctgaagaattgc

SEQ ID NO: 12521 - DNA, 310 bp, Homo sapiens
ggttctttgtttttaattcacatattcaacaaatgtatttcaggtgtcaggctctgctctaggccttggagatacagtgctgctcagaaaagtctggatcttgcctactaataatctaaatctagcaagagagacaaacattaatcaaattctccccaaaatgaaagtaaaattacagacatgataaacattagaaagagaaaatatgtcacaggcaggcatgacctagaagggtgccaggaagacattcctaaggaagtcaggctggagtcgaggcctgacatggaggaggaggggagggagcctctca

SEQ ID NO: 12522 - DNA, 615 bp, Homo sapiens
ggtgaacttctataacatcttaactaaaagcactcccacgtctacaatggagtcgagtctagaattcacacagagccacctagtttgtctttgtcagcgccacgtgagacacctacaacgagatgccttaagccagctcatgaatggccccatcagaaagaagctcaaaattattcctgaggatcaatcctggggaggccaggctaccaacgtctttgtgaacatggaggaggacttcatgaagccagtcattagcattgtggacgagttgctggaggcagggatcaacgtgacggtgtataatggacagctggatctcatcgtagataccatgggtcaggaggcctgggtgcggaaactgaagtggccagaactgcctaaattcagtcagctgaagtggaaggccctgtacagtgaccctaaatctttggaaacatctgcttttgtcaagtcctacaagaaccttgctttctactggattctgaaagctggtcatatggttccttctgaccaaggggacatggctctgaagatgatgagactggtgactcagcaagaataggatggatggggctggagatgagctggtttggccttggggcacagagctgagct

SEQ ID NO: 12523 - DNA, 492 bp, Homo sapiens
aaaagtttttttttttttttttttaatccaaacaccaacttgaacaagagactttcagttttaaaacattttaagtgggaaaccctgcctgtcaatgcatcattattgcccttcttgattgctgtcttggtagatgattcactgcccctccctagaagaggactatgtgtcatctgcctgccccatgacctcagccttggccacatgacttgtggtaccagtctctacagaagaaggatgcctccttatatgcaaactcaggtgtggccatgtgatctgcactggccaatgaaatgtgggcacaagtgacacctgttatttccaagcataagcttagagcctatgaatggtttgccaggtttgcctttcctcctccacccttcctgggtataggacagaagacaggaaggagcagaactatagcagacccacagtagacacacagcacagcaagcaataagcctctgctgttgcaaccactggggttttgct

SEQ ID NO: 12524 - DNA, 52 bp, Homo sapiens
agctcaactgtaagttccatgaggacagggactttatctttttattaacttc

SEQ ID NO: 12525 - DNA, 351 bp, Homo sapiens
ctgcaaggaggtagaatacaaacaactgtggatgccttttagtgtgttcgactctttgaatcttgaagaaatctataattcagttcagccagatccggagagcgtggttcttggcacggatggagggcgctacgatgtttacctctatgaccgaataaggaaggctgcctactgggaagaggagccagccgaagtgagacgctgtacttggttttacaagggggacacagatagtcgatttattccctatactgaggagttcagtgaaaaactagaggtacgggtgctttatttctttatgagtttctttaaaaaatgtaggtcctatatacattggtgagtaacatcatt

SEQ ID NO: 12526 - DNA, 482 bp, Homo sapiens
  misc_feature (1)...(482): n = a,t,c or g
gttttaattatcttaaaggagaagaatacagtttctctaaactcaagcacttttgtggactaatccttgcaattattctttcttctttcccatacttgacatttaaagtgatatctcccaggctcctacactgttagtcacagaggtaccattcgaccccttgtgcctcttaccatatgtgaatgcttgtcagttgagagtaaactttcttcataaatttcacagttgtgggattgataaaaacagaggaactctggttcctcattccttcctgctttctttcttgaaatgccattcatgatgggtcccttatatcactataggggctgctatcatccttcatccttatggccacttgcaaataggcaaccaacagtgttccttaggtggccagcacttccgggggatggccccttttccaaggcaggcagggggtcaaggccggttncctttcctgaggctgtggggnattctgntcttct

SEQ ID NO: 12527 - DNA, 519 bp, Homo sapiens
cagctctttgccttgctgttttaacaagctaggaggaattgtgtttctttaattatttagtctcccgtcagccacattgatactggaatttttccctctctgcttaggtatcttcatactttcttggaaaattaagtggaaaagatagtgcttcttttccttatgccatcatttttactgtacccaaactgtgactttaggagcaccaatttttaagggaagaatgttggtgaaaagcacagaaaccagtgacgtttgtggctgtggaatttccatggagaaaagagagcatctgaacacctggaccatcttttgcacctggcagaccctctgcactcaccccagcgtgttctgtgaacttgagtgacaacgcgtgcttgcagggtgctttttggacgactggggaagaggtggggagggggtggtggggggaagcatggacgagaacatggagcaaatgttttacaacctgaacctcagaactgtgatcctccaaggagcgcgctacttgaagaaaag

SEQ ID NO: 12528 - DNA, 352 bp, Homo sapiens
tgattttaagatttttctcatcttttgttttcagcagtttgactatgatgtgtctaggtgtagttttccacatgattttcctggatttattgggcttcttggatctgtgggtgatatcattttcatcaactttggaatttttcagccattatgtcttcaaatacattttcttttccaatctctctacctccttttttatgggaatgcaaatacacatttcttagactgattaataatgtcccacaaattgctaaagtcctgactttttttttccaagctttttttccttctgtgcttcagcttgggtactttttattttattttagacagggtctcactcgttctgttgccc

SEQ ID NO: 12529 - DNA, 746 bp, Homo sapiens
aaacaaggtaaaaaattacatctgaattctcacatttcaaatatatatgaaatatcaaataaaaatttatttttacaagaatttaggggaactactacatagctataaatgtaatatatatgttaactaagtatcatagataaaaaccatgctcccttcagcagcacgtgtaataatagatacaaagattgaaaggtaaaagatttaggatgaaaagaatcctctcttaaaaaggaaaacaaaattatatgtatgtgtatataacagttataatatccatcacacagctttatagaaacagcatctattcaaaaataccagtatttccaaaatatttaagataatatttaaagtaataataatatttaaataaataaatatatttaataaatatttcaataaataaaataatatttaaataattctatacccatgtttttcaaaataaaccaataaaatagatagtatatattagacgtgttagtatatatatctgaggcatgttaaaaatcacaactgaattctcacaattcagtcacaaacctaaacagcaaataaaaatttctatcaccagaattatgtttttttctggtggggaactaccaatagctataaatagaagagattattatggaagtatcatagataaaaagagtgctcgcttcaggagcacatgtaataatacagaaacaaatttaaagataataaaatatttaggataaaaagaattgtctcttaaaaaaaaa

SEQ ID NO: 12530 - DNA, 316 bp, Homo sapiens
cacgtgttagcgagcaatgatgtagatgtcaagtttgaaagggtaaagttcggcggtgagaacccaggctagatggaaaaagcagcagtgggaaacaagaacggttttgcctttaagatctggtatgtatctggcatgttacggcattctaacttaaagtatatctttttaccaattttttttttcctcaaaatcactgggagtcagatacagtttcacatgccagctttactgctaaattgcttgggtcttagtttcttcatttgtgattataaaacctactcatatctaggactgttttaagaacccatgaggg

SEQ ID NO: 12531 - DNA, 133 bp, Homo sapiens
caagatacgtttttatgtgaaaaaaaaaacaagctgaacaactcatagtgattctgcttacgtaaacaatgtctatgtatctgtacacatgtcctatgtcaatgcttaggaaaagatctggaagaatgtctgc

SEQ ID NO: 12532 - DNA, 513 bp, Homo sapiens
gggatattcaagttttatttctaacacatgggcttacaaaagatctttagttagaatagttttataaagagggaatctctcttttgtcacgagatcaacatctatcacttacaaattattttaataaaattaaacattaaacaaggaagaaaagtcccaggttccatgcctcctaaggcagcacagattcactcctctaacagtgagaagcagagatgatgggtgagatccagagtcacagctgctttggaagctgctgggctctcttgtcatttcagaagccttgctgcacacaggcacatttcaacatggccacctggattccctcctctcatggagggaggccaggttacagtggttccatccaccaccacgtcctgaaactaaaagggaatgctgctctgcaaggtgtttgctgcctcatatacaagttgatttttcaaataggggaataattataaagaaaaaaattgcactgcttcgtcccatccggccccaactttatcactaaag

SEQ ID NO: 12533 - DNA, 831 bp, Homo sapiens
gcccaccggggggaagctggaggtgaaggtgaggctgcgggagcctctgagtggccaggatgtgcagatggtcactgagaactggctggttctggagcccaggggcttgtgaggtgggcagctctctgggccttcagaacctttgccccctccttttactcaactaactactcaactcatatctggagagaaaacctaggagtttctcatctatgagaaagacctaccatgctgggtagggcttatgggctgagtttctgatgttcctcagtagaactgggaagagaaggtaaccttccaaggtttaactatctatctatctatctatcttcaggaaaccctttctaaaatctttgtgttttcactgcagtttagactgacttcttgtgctttgcaccctgtgtagccgatggccagcaccaggagaggagtcaggccgcgactgtgcaggagatgactttcccagctttgctgctttcagaagcctttgtacataagagatgctgctaccaagcaccaaagacctgttaagcatgtgcactactgaccacgactctggtctttcctgttgttggcccctctgcgtcgtacagaaacaggctgggttccaggagcccatctccccgctgtctccccctgccccgagtctggaagagggcaaggacacttccattcctctgtaccatggagtcctgcagccccttaacccctgcgtggcaactgtgtacagcttacccctgcctccagttgcaccacttctagatgtgcctttaaaagatctaactatgggatgggagaacttgagggtgatcggggaaccctccccttggt

SEQ ID NO: 12534 - DNA, 123 bp, Homo sapiens
tgtatagaccgattaatttttatatagcgatccaaactgatgaatccaagcaaaataatgctaatgtacatgttcatataaaacagtgttcccacaaccttgcacagaatcacacctagtgtc

SEQ ID NO: 12535 - DNA, 534 bp, Homo sapiens
  misc_feature (1)...(534): n = a,t,c or g
ggctgcagtggctggcctggggagccaggtgagagtcttcacgtcccagcagttctggtgcagaggcagctcagttggattattcgtcccggttcctaatgaaagtgaaagctgctggtacctgccagccctctcttggcacacagcgagctgaaaatgcagagactggagaacgttgccaccagagtcagcttgtcctggtgcagctcagatttggagctgagggttatcgatgcattggtctatcttattccaggatttcctaggcttcagttatctcccaactaggaaccacagctgctccttcctaacctggtccctccttgccaatctgtggcctgtgctatcagcagaacccctgtgccggacatagagctgcccaggtcagaaacccaaacctttccacagggacacagtcagatttgagttatgggagatcccacagccagggggtcagggcggatgcaggaaaccaggncaggaagttgtgggtgttcatttaagcaagagacagacattggtgaacacagggag

SEQ ID NO: 12536 - DNA, 318 bp, Homo sapiens
  misc_feature (1)...(318): n = a,t,c or g
tttttttttaagttaggaaaacagacaccaaaagcaaacagcggctatatcatgggtaatttttcttttttgttatcttccttttctagtttttctatgttaagcatgtctcatgtaatttttttttaagagatggggttatattcatattgttctgaagaaaaaaagaaaaatattaaannnnnnnnnnnnnnnnnnnnnnnnnnnnnnnnnnnnnnnnnnnnnnnnnnnnnnnnnnnnnnnnnnnnnnntgtctctcaaagtagctaggatcacaggcttgcactaccatgcccagcttcaatgtttgttttttgt

SEQ ID NO: 12537 - DNA, 478 bp, Homo sapiens
taaagacagaatcaggtcattgtttcttgaaggcagagaacaagcgaggacctcaaatttctctggaagctcgagttccaaatgctcaagcaataacagaagcccaaggctcattgaaagcaagctgacatatcttaaatttagtattcaacaacaacaacaacaactaggacttgttcctttgcctttctgtcactagaaaacaaatataccttgtcaggaaatttctctgatccaaaacaaattgacttctggccaaaaggcttcatcaagctagactggtaagcaatagactttgttggatcagcaagctgggtgcacacattcctgaaacaaaacaaactccagatcaaagttcatgacccaagaatagttatgggggaaaactgaactttcttttatttggatctagcttaggaagggagaaaatgggctttctcctcctctctggccaagtgcaaagttccttgtttaaaat

SEQ ID NO: 12538 - DNA, 236 bp, Homo sapiens
ctgggacagaggactgctgtctgccctctctggtcaccctgcctagctagaggatctgtaagtactacaaaacttaaactttacactgagttttcatcattgaagctatgcctccaatctgacctctgactgtggggccaccccagagggaacccagcgggcgaatccctgctaggaacgtctgtccggacctctgggtgacttcttgggacgatgggtttccagctaaacttaat

SEQ ID NO: 12539 - DNA, 1901 bp, Homo sapiens
  misc_feature (1)...(1901): n = a,t,c or g
gaattctgtgataagttattcaacttatgaaattcaagttacatgtgaattctgccaggcaatacaaggacctgtggaatatgagtgatgacaaaccctttctatgtactgcgcctggatgtggccagcgttttaccaacgaggatcatttggctgtccataaacataaacatgagatgacactgaaatttggtccagcacgtaatgacagtgtcattgtggctgatcagaccccaacaccaacaagattcttgaaaaactgtgaagaagtgggtttgtttaatgagttggcgagtccatttgagaatgaattcaagaaagcttcagaagatgacattaaaaaaatgcctctagatttatcccctcttgcaacacctatcataagaagcaaaattgaggagccttctgttgtagaaacaactcaccaggatagtcctttacctcacccagagtctactaccagtgatgagaaggaagtaccattggcacaaactgcacagcccacatcagctattgttcgtccagcatcattacaggttcccaatgtgctgcttacaagttctgactcaagtgtaattattcagcaggcagtaccttcaccaacctcaagtactgtaatcacccaggcaccatcctctaacaggccaattgtcccctgtaccagggcccatttcctcttctgttacatcttcctaatgggaaaaccatgcntggtggctattccctgcatcaattacaaggtcctaatggtgcatggttcctaggctgaaagtccccaactccgtttcggaccnaggtcncccatgggtgcccctagtgttccccaggaatcccccaggtcccttccctctcccccaacccagtacagtcagaagcaaaaatgagattaaaagctgctttgacccagcaacatcctccagttaccaatggtgatactgtcaaaggtcatggtagcggattggttaggactcagtcagaggaatctcgaccgcagtcattacaacagccagccacatccactacagaaactccggcttctccagctcacacaactccacagacccaaagtacaagtggtcgtcggagaagagcagctaacgaagatcctgatgaaaaaaggagaaagtttttagagcgaaatagagcagcagcttcaagatgccgacaaaaaaggaaagtctgggttcagtctttagagaagaaagctgaagacttgagttcattaaatggtcagctgcagagtgaagtcaccctgctgagaaatgaagtggcacagctgaaacagcttcttctggctcataaagattgccctgtaaccgccatgcagaagaaatctggctatcatactgctgataaagatgatagttcagaagacatttcagtgccgagtagtccacatacagaagctatacagcatagttcggtcagcacatccaatggagtcagttcaacctccaaggcagaagctgtagccacttcagtcctcacccagatggcggaccagagtacagagcctgctctttcacagatcgttatggctccttcctcccagtcacagccctcaggaagttgattaaaaacctgcagtacaacagttttagatactcattagtgacttcaaagggaaatcaaggaaagaccagtttccatttatgcgaaatctgtggttgtaaatttttttttttacttgaaattaaatttggctctaaagttggtgtagcagcagttgatcagactgaaaaacggtttttagtctctggaaaaagactgattttgctttttttataaatattattagatttattaatttttctgtgctcaatgtgtaaattgtattataattcattgtgatttatttcacttttaatttgctggtgttttaataaatgggggtgttactg

SEQ ID NO: 12540 - DNA, 614 bp, Homo sapiens
cgcggccgcgtcgacgaaaagtaagaccaagaaaaaacaaactaaagacatgtgacttattcaatgaaagtgaaaaagaagctctaaaacagtgtcattgattaaaaagaatatctggaatgtagccccactctttgagtgggattcatttcttactgcttatgaactttcaatttagtagtcagaaaccatggatttattttactgcacaatgtgaagtttacattttattaacacttgagtagtctgatttagagactagttacttctattttttaaaataatggagtaacaaattacagaatagctaaataattttttaaaaatattttacagttgtaaaaaatatccatcagaaaaatgacacacaaaacaaaatatctggacctttacagaagacgtttgctgacccccactttaaaggattggaacagtcttctagaattgaggaatatttattaaaatacctgtaaagaaaatagtgaatcactgtagcaatggctttgattcagaccttaaaatcacataagaagaattacaacattgttatgggatttttaagtggcaggtattgtaactgttttttgtgtgcaaaatactgagtaaccactggg

SEQ ID NO: 12541 - DNA, 428 bp, Homo sapiens
  misc_feature (1)...(428): n = a,t,c or g
ttaactgtgcatcacagcatcttttcaattgtttcttgtttatttccttcttttagcctaataattaatttacttttcattttacttcatttaaagatgaccaagatgttggtaataatattttttttgttgttgttattttctacaaactgtttttattccaggncttttgctttctgccaaggttacccctgaagagtggcacacggccctttgagacttccatggtgccctctcattttctcttttctcttagtcattaagacattaacctagtttgtctatgacgacagcttaatcctggacattgcggcccatgcaacttgtgtccattctgggcccatgcaacctgttcactggaacctgcgggccatgcttactcgggtgggcctaaactggaggaggacaaccggggttttttaaaatat

SEQ ID NO: 12542 - DNA, 312 bp, Homo sapiens
gatgaactgcacagcattttcttaaggcctgtggggttctgggagcctatgctttcagcaactggaagctggaactgtgtggttgttgctaacattggtgtatccaccactaagcctcagaaataaaactttactgatatctttgaatcccatgtgtgtccttccctgaatgcattgctttgtcacccagaggtaacagctatccagcattcagtgcttatcatccccatgtctttctttattggttttctaaatttggaatatccctggagacaactttggcaactgaagctaaactgtgatggttgttga

SEQ ID NO: 12543 - DNA, 631 bp, Homo sapiens
tgccctaatagtcacacagatttgcgtcggaaaggagactgaggccaggtgtgcacaatcattttgctcattggtctggaaattccctaagattggtcgtcctctgacacccgatctaaatacaaccagagagagccatgatggccaagtctccaagtcagaggcactgtgtagacacagcctgagtcagaagaatgtgaaagtggtcttccccttcctggaccgtcatggtgcatttcagcaagtggggaaaggacagcggtgcttggcggagcccctgggaagatacagccttggacagctctctggccaggaagggcagggaggtgggggaggccaagtatgctgcgttttccatccattacacaaaatcaaaccaaggaggagcaaccaaaggacacgaggaaatggacacaaccctacgtataaagagacaccttgacaaactccttggccggggcagacactgtgctctggtttccgaaacacagggcagagctggaagttgggggcccgtgagctggggcccctcagacttcataaattttgtcctgcaggtagctgaaaagggagtcaaggcctttggaggagctccagagctgcttgagcatgaggcattccttctcgttcc

SEQ ID NO: 12544 - DNA, 245 bp, Homo sapiens
  misc_feature (1)...(245): n = a,t,c or g
cgcaggagttgagggaggagtggacggagttacccacaggagtcgagggaggagtggacggagttacccgcaggagctgagggaggagcggacggagttacctgcaggagtcgagggaggagtggactgagttacctgcaggagtcgagggaggagtggacagagttacccncaggagttnagggaggagtggatggagttacctgcaggagtcgagaggggagcggatggagttctccgcacga

SEQ ID NO: 12545 - DNA, 709 bp, Homo sapiens
atgctttttctatgcttttatcaccaaatgatagtacatccatatataactctagatatttgttttatagtccacacacttgctagttaaaatgtattatcataagccacagtctgttcagaattacttgggtaaaatgctatgtcacctacaaaccctcatctgattaatatggaggttgtaatcactgtctcaatggtttcaggctcgtgaaacttctcatgctattttcttacgcctgtgctggctggctgacggccaagtcctctgcctctgccactgcctcaacccataagcatgctacagtgcagtccaaccttttttggtcttgccgatccaagagcagtgtaaaccagttgaatccaactggcatcacagtcacagcaggcaggaaatttcaaggatcgttaagtttaagatttgccaacctaatatcaagttataggttttaaagcgatttcattatcgcaaaaggatagcttggctgctgagtgtgattttcctatgttcacatgtactccatgggattctaaaacagaaaatcaaatctgaacataaatgatctgccagttctccaaatgacaggcttgtggcaaaataggagaggcagtgtcattttcaaatcatgtagctagaatctgatccaagtccataatcaacgtcttccctattttcctttggtccttcagtctgttattactgttattac

SEQ ID NO: 12546 - DNA, 536 bp, Homo sapiens
ctctcggcacctagggatggcggagcagagttgaagaaactgtgttccccccactctttgctatcgatcaagggtaaaattccattctgatatcaaaatgcagtattcgcaccactgtgagcaccttttagagagactgaacaaacagcgggaagcaggttttctctgtgactgtaccatagtgattggggaattccagtttaaagctcataggaatgtgctggcctcctttagtgagtattttggtgcgatctacagaagcacttctgagaacaatgtctttcttgatcagagtcaggtgaaggctgatggatttcagaaactgttggagtttatatacacaggaactttaaatcttgacagttggaatgttaaagaaattcatcaggctgctgactatctcaaagtggaagaggtggtcactaaatgcaaaataaagatggaagattttgcttttattgctaatccttcttctacagagatatctagtattactggaaacattggaattgaatcaacagacttgtcttcttact

SEQ ID NO: 12547 - DNA, 484 bp, Homo sapiens
cactttgaatatgtcattctacagccttctgacctctgtagtttctgatgagtggtaggcatttaatcttacacaggatcccttgtatgtgataagttgtttttctcctgctgctttaacgactgtctttgtctctggcttttgacagcttgattgtaatgtgtttagtaatagatctctgagtttatcctagttataatttgttgatcttcttgaatgtgtagctcatgtatttcattgaatttgggaagtctcagccattatttcctcaaatattatttctgcctttttcttttcattttctggaactcctttaatgcgtatgttggtaacttgataaaatgccacagatccctcaagctctgttcactcttcattcttttttctttctgttctctgtagtttctgatgagtggtaggcatttaatcttacacaggatcccttgtatgtgataagttgtttttctcctgctgctttaacgac

SEQ ID NO: 12548 - DNA, 281 bp, Homo sapiens
gttaacttctccagttgtgataatggttttgtgtttgtttaggaagatgtctttattctgagaaaatgcatgctgacacatttggggtgaactattatgatgcttgcaatcagtttcaaaaggtttagaaatgtatgtgtctatacacacacaaacacacatgtataaatacaggttgaacatccctatttccaaaaatctgaaacctgaaattcgtgctccataattcaaaactttctgagcaccaatatgatgctacatgtagaaaattccacatctga

SEQ ID NO: 12549 - DNA, 301 bp, Homo sapiens
cttcagtgctcatttcaactgtgtcgcaaacaaagggggtccatttctgcagtcaacatgttagtttcagcttcatcaggctttgaggttttggtagttatgccctcattctctgtttcaccatcatggccagtttcatccattgcctctccgatcatcatttcttcattatttttcattttggtattcgtttcttcagatgagtgtagatcagatacatcatttcctccatctagttccccagctgctgtttgttcagaaatctcagtttgagcattcaattttacaggtgtagtattat

SEQ ID NO: 12550 - DNA, 1012 bp, Homo sapiens
ttttttttttttataaagaatatgcaatccatttgggatttattgcatttaaagaaaacagattaaaacaggtatgataaatacagtaagaaaataactttaaatttcaaacaaaacagtgaatcagggacagaattcagtcaaaaagaataagcagtgtaaaggcaataaagtaataaaatcagttagtgcttaattagatatggcaggggaaaaggggtgggagggggagactgagtctatctcataattgtttcccagctatatttgaggactgaagttagctttagcaagtatgttttgtaacaagtagaaatacaataaagatgtaaatttgctttatttaaaggttaaagttatttgcttagtggtacataaaaggcttcagaaaattcaagtttaacaaaaaatggaagtgtaatcaaagaaagtgcacttaaagctgtttgccagcaattaaaaagtagcttctataaggcttctattagatgacttttcaatcacaaaaagagcatagtcataaaaacaattctttcaaaagtagcagtataaattttaaaataaaacaaaaataaccccaaatcatgaccctttgcattatcatctaccttattctcttagtagcttttgtaaaccctcactaggagtgaatgttctcttagatatgattgtggttgcaattccattttttaaaaattcacattaactccacagtagagagatgtgacatgcatgtgtgtacatatttttatcttaatatataaaacaccactgagtataaaagttctcaaataaactattcatcatttatggtattctcacagtagatatgtcatctcattctcacagtagactgtcaactcaataattggacctaaaataacaagtttgctaaaaagaaaaaaaaatgagaaaaaagtttactgcacattctaaatatattaaaaacaaatgtacccaagcgcctcaaaactagtgatattaatacacttgtaccttctaacagtgctta

SEQ ID NO: 12551 - DNA, 5284 bp, Homo sapiens
agatcttggaacgagacgacctgctctctctcccagaacgtgtctctgctgcaaggcaccgggccctttcgctctgcagaactgcacttgcaagaccattatcaactcctaatcccagctcagaaagggagcctctgcgactcattcatcgccctccaggactgactgcattgcacagatgatggatatttacgtatgtttgaaacgaccatcctggatggtggacaataaaagaatgaggactgcttcaaatttccagtggctgttatcaacatttattcttctatatctaatgaatcaagtaaatagccagaaaaagggggctcctcatgatttgaagtgtgtaactaacaatttgcaagtgtggaactgttcttggaaagcaccctctggaacaggccgtggtactgattatgaagtttgcattgaaaacaggtcccgttcttgttatcagttggagaaaaccagtattaaaattccagctctttcacatggtgattatgaaataacaataaattctctacatgattttggaagttctacaagtaaattcacactaaatgaacaaaacgtttccttaattccagatactccagagatcttgaatttgtctgctgatttctcaacctctacattatacctaaagtggaacgacaggggttcagtttttccacaccgctcaaatgttatctgggaaattaaagttctacgtaaagagagtatggagctcgtaaaattagtgacccacaacacaactctgaatggcaaagatacacttcatcactggagttgggcctcagatatgcccttggaatgtgccattcattttgtggaaattagatgctacattgacaatcttcatttttctggtctcgaagagtggagtgactggagccctgtgaagaacatttcttggatacctgattctcagactaaggtttttcctcaagataaagtgatacttgtaggctcagacataacattttgttgtgtgagtcaagaaaaagtgttatcagcactgattggccatacaaactgccccttgatccatcttgatggggaaaatgttgcaatcaagattcgtaatatttctgtttctgcaagtagtggaacaaatgtagtttttacaaccgaagataacatatttggaaccgttatttttgctggatatccaccagatactcctcaacaactgaattgtgagacacatgatttaaaagaaattatatgtagttggaatccaggaagggtgacagcgttggtgggcccacgtgctacaagctacactttagttgaaagtttttcaggaaaatatgttagacttaaaagagctgaagcacctacaaacgaaagctatcaattattatttcaaatgcttccaaatcaagaaatatataattttactttgaatgctcacaatccgctgggtcgatcacaatcaacaattttagttaatataactgaaaaagtttatccccatactcctacttcattcaaagtgaaggatattaattcaacagctgttaaactttcttggcatttaccaggcaactttgcaaagattaattttttatgtgaaattgaaattaagaaatctaattcagtacaagagcagcggaatgtcacaatcaaaggagtagaaaattcaagttatcttgttgctctggacaagttaaatccatacactctatatacttttcggattcgttgttctactgaaactttctggaaatggagcaaatggagcaataaaaaacaacatttaacaacagaagccagtccttcaaaggggcctgatacttggagagagtggagttctgatggaaaaaatttaataatctattggaagcctttacccattaatgaagctaatggaaaaatactttcctacaatgtatcgtgttcatcagatgaggaaacacagtccctttctgaaatccctgatcctcagcacaaagcagagatacgacttgataagaatgactacatcatcagcgtagtggctaaaaattctgtgggctcatcaccaccttccaaaatagcgagtatggaaattccaaatgatgatctcaaaatagaacaagttgttgggatgggaaaggggattctcctcacctggcattacgaccccaacatgacttgcgactacgtcattaagtggtgtaactcgtctcggtcggaaccatgccttatggactggagaaaagttccctcaaacagcactgaaactgtaatagaatctgatgagtttcgaccaggtataagatataattttttcctgtatggatgcagaaatcaaggatatcaattattacgctccatgattggatatatagaagaattggctcccattgttgcaccaaattttactgttgaggatacttctgcagattcgatattagtaaaatgggaagacattcctgtggaagaacttagaggctttttaagaggatatttgttttactttggaaaaggagaaagagacacatctaagatgagggttttagaatcaggtcgttctgacataaaagttaagaatattactgacatatcccagaagacactgagaattgctgatcttcaaggtaaaacaagttaccacctggtcttgcgagcctatacagatggtggagtgggcccggagaagagtatgtatgtggtgacaaaggaaaattctgtgggattaattattgccattctcatcccagtggcagtggctgtcattgttggagtggtgacaagtatcctttgctatcggaaacgagaatggattaaagaaaccttctaccctgatattccaaatccagaaaactgtaaagcattacagtttcaaaagagtgtctgtgagggaagcagtgctcttaaaacattggaaatgaatccttgtaccccaaataatgttgaggttctggaaactcgatcagcatttcctaaaatagaagatacagaaataatttccccagtagctgagcgtcctgaagatcgctctgatgcagagcctgaaaaccatgtggttgtgtcctattgtccacccatcattgaggaagaaataccaaacccagccgcagatgaagctggagggactgcacaggttatttacattgatgttcagtcgatgtatcagcctcaagcaaaaccagaagaagaacaagaaaatgaccctgtaggaggggcaggctataagccacagatgcacctccccattaattctactgtggaagatatagctgcagaagaggacttagataaaactgcgggttacagacctcaggccaatgtaaatacatggaatttagtgtctccagactctcctagatccatagacagcaacagtgagattgtctcatttggaagtccatgctccattaattcccgacaatttttgattcctcctaaagatgaagactctcctaaatctaatggaggagggtggtcctttacaaacttttttcagaacaaaccaaacgattaacagtgtcaccgtgtcacttcagtcagccatctcaataagctcttactgctagtgttgctacatcagcactgggcattcttggagggatcctgtgaagtattgttaggaggtgaacttcactacatgttaagttacactgaaagttcatgtgcttttaatgtagtctaaaagccaaagtatagtgactcagaatcctcaatccacaaaactcaagattgggagctctttgtgatcaagccaaagaattctcatgtactctaccttcaagaagcatttcaaggctaatacctacttgtacgtacatgtaaaacaaatcccgccgcaactgttttctgttctgttgtttgtggttttctcatatgtatacttggtggaattgtaagtggatttgcaggccagggagaaaatgtccaagtaacaggtgaagtttatttgcctgacgtttactcctttctagatgaaaaccaagcacagattttaaaacttctaagattattctcctctatccacagcattcacaaaaattaatataatttttaatgtagtgacagcgatttagtgttttgtttgataaagtatgcttatttctgtgcctactgtataatggttatcaaacagttgtctcaggggtacaaactttgaaaacaagtgtgacactgaccagcccaaatcataatcatgttttcttgctgtgataggttttgcttgccttttcattattttttagcttttatgcttgcttccattatttcagttggttgccctaatatttaaaatttacacttctaagactagagacccacattttttaaaaatcattttattttgtgatacagtgacagctttatatgagcaaattcaatattattcataagcatgtaattccagtgacttactatgtgagatgactactaagcaatatctagcagcgttagctgtccatatagttctgattggatttcgttcctcctgaggagaccatgccgttgagcttggctacccaggcagtggtgatctttgacaccttctggtggatgttcctcccactcatgagtcttttcatcatgccacattatctgatccagtcctcacatttttaaatataaaactaaagagaggaatgcttcttacagggaacagttaccccaaggggctgtttcttaggtaactgtcataaactgatctggatccatgggcatacctgtgttcgaggtgcagcaattgcttggtgagctgtgcagaattgattgccttcagcacagcatcctctgcccacccttgtttctcataagcgatgtctggagtgattgtggttcttggaaaagcagaaggaaaaactaaaaagtgtatcttgtattttccctgccctcaggttgcctatgtattttaccttttcatatttaaggcaaaagtacttgaaaattttaagtgtccgaataagatatgtcttttttgtttgttttttttggttggttgtttgttttttatcatctgagattctgtaatgtatttgcaaataatggatcaattaattttttttgaagctcatattgtatctttttaaaaaccatgttgtggaaaaaagccagagtgacaagtgacaaaatctatttaggaactctgtgtatgaatcctgattttaactgctaggattcagctaaatttctgagctttatgatctgtggaaatttggaatgaaatcgaattcattttgtacatacatagtatattaaaactatataatagttcatagaaatgttcagtaatgaaaaaatatatccaatcagagccatcccgaaaaaaaaaaaaaaa

SEQ ID NO: 12552 - DNA, 383 bp, Homo sapiens
atagcaaatggaaatggatggatggtaaagccaaactaaacatttgttcattagaaagcagagtagcagcaatggggaaactgactaacttggaatgatggtcatgcatatgtattgtctggaaatggtagcacttccgtttgcccacatatatggtagtaacttggcaagtttaccaaatactgtgtttcagtcagaattcctagtaaaatactgatttacagttctctagagtacctttaataacgctcttagtaggtcactaataggtggatgtcagttacatgtgaaaatggaagcctatgggatggtttaaggaagagtcaaaggaaagccttgcattcgttttgatttatttgaagcccacctatcagtggggcctc

SEQ ID NO: 12553 - DNA, 79 bp, Homo sapiens
aaattatttattactctgtacttctagactcaaaattctttatcaaagatagtctcaaagaggtagtacaagtcctgtt

SEQ ID NO: 12554 - DNA, 560 bp, Homo sapiens
  misc_feature (1)...(560): n = a,t,c or g
ggtctcggatctcttggaccttgtggatctacccggccttggcctcccaaagtgaaacttttctttaaaatagagatgggatcttgcctgtattgcccccagacctggtcctcagacctcccttgcccttaagcagtcctccccacctcagccctccctaaagtgcctgggattacaagcgtgaagcattacatccaagtgaaacttcttgagatggttacataatgtctaaatctgctggtgtagaagttaataaagtgtagaactgaataactattaaatattagatcaagtttctcatgtttatcttaacgtataacgatttatcttaaagcactgattttcacaaaataacatcagtgtgaaattggaaaagaagccaaatattttatttcatgtatctgggaaatgaggtgctttagtcaactgaatctgcccaaaactaaaaagcattaattaaaaagtacttaactcagaaattataaaaataggggacatcaataaaatacatttctacacagaatacgccaaccatacactantnttttttgataataaaa

SEQ ID NO: 12555 - DNA, 1116 bp, Homo sapiens
tatatgggaacatactgtttattcaataagaaattaattttttatcgttggatttgaataaattttcttctcccaagcaatctgattggcagtacaccattgcagcatatactttattattatcatcattattattttccacaacatttaataccaagtttccttctctcacatagaatattacccaatagaagtctccaaaaggggccatagcacattcataacaaagatagaaaagaaaactttcaatgtctgctttccaatatgatgattcaactaaaacaaagctgaatttctcagctatgaaactgaaaaaatgaaaatcagcccatgtgtacatcacggccagccatgatcattaacacctccatgaaatgagggagaaaagagagaaacaactgcttcttcttaccaaacttctatataacttcaaattactttaaaaaaatttcctaaaaggcattctgctgcctttctgaggcatgaacatttgggtgtcttctcaagaccaaccccgggcaagcaggtggcgcctgtgaaatggaaaacattcggaaaacagcagcccctcttcagctccatgtacaggagactttctgatttccaatcttggctcaggtcagaagaaaaaggggaaaggttacattcctggaaagaaaatacagcctatttgagggcatgcctgactttcagtccatgcactagtcctcttggctcgtagagttttcagtgccctgaaaccatgatccctctgcctccatggtcctctgagtgtagttattatgtctgcaaaccagtaatgtcacaagtcaaagggtctggggcttcccagggaaccactatgactgagtatattctgattttgagaaacctgtgacaagtcttctcagcactcgccttctaatttttggagccgatgcctgggttcccagcatccaggtcacagtagctggaaatcatgcaggaagggcaaaaagccagcagcccagaatggactgtctctgcagctctggcacattctctacacatcgccacaccactcaaatgtcctataaaatatcaaaaccaataacctggacatggccgattaatctgtacaaaaaggctttataaaaa

SEQ ID NO: 12556 - DNA, 868 bp, Homo sapiens
  misc_feature (1)...(868): n = a,t,c or g
ctcccatgaccgccgggctgttccttctcgtggctgggaccatcccgtccgagtctgcttcaactgcaataaaaagcccggtgacctttaaccccagccccctctccgagtccttcacaattccttaggttctcagggttagaaacagtcttgcgaggtaggccctcctcccagtcacctgctgtggtgtgtgtcctctcctctccgcatccagggccactttccctcagtgggggtgagcctggcggcaggcccgaaggtgtggacccctcagggcaggggaccttgcaacttatcgcaaaggggaatgaacctgaatccgttgcatttatttcagttaaaaataatgaatatatatgtgtatatctctctctcatatatacatatgaaaggcactcggggcgtatcgaggctgctgctggctgtgaagacttcgcacagtctcctccgcacagggtgaggtggcagtggcagcacgtcttcctcatgagccgagccaggtccatggccaccacgtggtgggccccttcctctgctgctcttggagccttggaagcctctcctgtccttggctcttccctccatgcctgtcagctgcctggggagtgagcctccctggtccttcctgcctgaaacagcctgaagggaattctccctaggtctcctgggagtcgagtcccaattcttggcttaagcctgttttagtcagagaccacccaacttagcgtgcaggtcaccggagtgggtggagggtcagaggtcgggtttcggccctgagaagtagaaatgcagggggccgtgctgtccctggtccccagggaacagcaaggaaggaatgagctttcacaggnttctgnccgatgttgtg

SEQ ID NO: 12557 - DNA, 157 bp, Homo sapiens
agtggttataacattgcgcaagcagatgtcagagaatttctgaaagacagggctatctctagaaactcactgtaagtaaggagacaattaacacttttgaagcccatttatccctgatggtcaattacacactaagaacttcctttttttttttttt

SEQ ID NO: 12558 - DNA, 932 bp, Homo sapiens
aaaaaaaaaaaattattttactccaataaccgtcaccactaggactatgtaataattagaagaaatctgccttcacgttaaaatgatttttcactgaaataaccagccaaacaaagtagtgagaaatttggtaagggaatgcacaccaaagcaaatttaatccgctgagactagaacatgctcctttaatagtagggcatcctatacacaaggcctttgtgtgggctttccaacaacagtctttggctaagacaagactcaggactaggacaactgcaagttgagccagcaggacccaagcaattgttttaaaacagagctgactactgacaaaaacaaggctattcagtgtctgtaacagaatgagctctttactctgggcccacaaatatgaaatggtatgttatataaaagaaagaagcacagaaatataaatccaaacatgtactctcatgtagactttattatgaattggcatatttttgtttcaaaggcaagattacaatttttaaaatcacaggtaaaagcacaagatgagagttgcaattcactcttctaggtagagaactaaatgaggttttttgttgtttttaaaccaccagaacagtaacagaagccattttgtattatctagaatcatcaattttcacaatgtggtgggcagaaacctggatgtccctctttcagggcatctgtgagatcaaaactattttcgtaatgacactaagatgttacttgctttttgcaccatgtcaacatttgtaccaatggtgtaaaagcaatggtgtgtagacactgctgaagccttaggagggatcgagcaaagctgtaagaagcgctgaattgtattcttcatcaccacccaaattggggttggagtaccggtttcacttaagaatgttcttgatgcagcagtaaaaattattcatttt

SEQ ID NO: 12559 - DNA, 920 bp, Homo sapiens
tttttttttgaaattatttcatctttctctttattctgacaacattatgacattaaataaaatccaagaggtattggattagtccttgtttggtctctggtgatttagataaggcagaactgagcccctcggaatgtattatctcaaagagctagtagcagctgctatgcaaagttctaaggcccgagtcaaatcctgggcatctccacagatgtgtggtagggcacgggctccagctcttgtgtaagaaagaacaggaatgagaacagctttattttgtagcgccaaggtctcactatgctcacacctgtaatcccagctttgaagaagaggatctggcaccagaagggtctggtagaagaaagtgggaaaggtgaaggacaggaatcttttcctttctgctacaacctaaggacagaggcacatgactccagcaaggggccaaagaaggtagcagctacttgggtcttgtgtgggagatgccagacgactccaaggcaggtcaactggctttgtcagggagtggaatgctggccataagaatggagacaaactgttccaatttctgtgcagcttgtttgccagctgctaagacttcttcatggttggccttctccaggctttcataatccatgatgaccttgttagtgatgagtgagaaagccaagactcgaagtccacagtgccgtgcaacgataacttctggtactgtactcatgccaacagcgttcgctccccggttactgcagcacacgacattctggcacagtctcaaagctggggcctgccaccaatcacataagtggccttcccttaggtccaggttggtcccccatttgttttagagtaatggagaagcctttgcctcaatgttcgggtcttaggatcagacattgcacgggaaacgcatctcccaacct

SEQ ID NO: 12560 - DNA, 471 bp, Homo sapiens
  misc_feature (1)...(471): n = a,t,c or g
tttggatagtatctacagtttgcattgtagatactggatacttggattggctggtgcaccctgtttgtgagactcactggagtttgaagagatgaccactggaaaatatccctaagcagtagctgcaattccacccccaccttggagagccaaaaccctcttcgttttcactctcctgtccttggtcttaggctacttaaagcagcctttagacatagggaaaaattgaaagcctctcttttaagaaaagcattaggtacttctggaatagagagttcaagaaattaggagaaaaatgaacttttgaagctttttctttcccttttttgtttacttcattctcttactcagttttaaaatgctggtaatggtctttttntctgtnttttttttcttgggtgattttaaatgctttgggaaaagatctcatgggttttatctccaaaggagggaaattaatttggnggccat

SEQ ID NO: 12561 - DNA, 977 bp, Homo sapiens
actgcaatgagctgtgttcacaccactgcactgtgggcctgggtgacaaagtgagaccctgtcacacacacagaaaaagagaagtgtgggcttcaaagttgaattcaagtaagtcagggtccttccacttgtaatgaacaacttccttaacctcattgtctcaggttcctccctgagaaatgcgaggagaacggcctactggtggcgtgggcttgcgatgaaatgagccattcacccatgcctcttagcacagggcctgcctggaccgcatactgtgcattgtcagctgctgtcggagctgggctagcggccgccttgagagccagcagtccacgggggttggcgacttctgggaagaaagggtggaacgtgactgtcaggtacagagctacagagaaccccagcatgaaggagtaggtggcaggggagaaggactcaacagagatggagaaagactaagcccaaaggtgatcaacaacaagagtgaaggaggaagtggtcagctgtggctggggcaaacaagcccagtaagttacattggcctgtgtttggtcatccagggacaaagtgacctttttagtgcctgtaggcccagcgcgttggggaagaatttagaatgcagtggggataggtgtgagaggagcgggggaagtgaagattgagttgagaccactggctggagaacttgaccgggaagggagggcagagagcagcatggggtgaggggagggaatggatccaacgagcgtcttaggatgagggagttgtgagcgctcaacaccattacaaagaagggatcggggattgatagactgacagatgcatgcacagaggcaggtatggatgcatgcacagaggcagggatggatggacggacaaatgcatgcatagaggcaaggatggatggatggacagatgcatgcacagagtcagggatggatgaatggacagatgcatgcacagaggcagggatgaat

SEQ ID NO: 12562 - DNA, 407 bp, Homo sapiens
cagcagaagagtgacctgattttattcaccttttattggaaatctgtgggacagaactaggcaatgagggtgctacaataataaaggtgagtgttggcagtggcttgaccagagcagaagtgggaatgaaacagttggattctgtttgttttcaaagaagagctcatagaacttactgatggattgttatgtaggatgtgaaagaaaaccacagaaatgactccaactaaaacagtaaaatgccattcactaatttcaagatgatgagagaagctgttttgcagagataatgaaagaaattctgtttgaagcctattaaagtttgaagtgcatattaattggactttcaagttgagatgtcaagtaagtagcagggtctctgagtatggaatacaaggctgtgggct

SEQ ID NO: 12563 - DNA, 778 bp, Homo sapiens
tttttttttgtagaatgatttgtgctaaagcaatacatctctttctatcatatactgatatcttgaaaacttttataacgtttctagtcacattcagtattttaaaaataggattgattctaagttttgagtttatggtgtatttgaatattagagatattatctcttatacatttcaaagctttgctgcattctaaactcagtcctgccttagccttagtaacggcaatgaagtgcggggatagaatgttcactatttttttatgtgctgttaaaatttcatacctcctgttctatcttgaagtcttacagttttggaatggtgagtgggggaaacaagcataaaactattacataattcatgcagttttcactgggcaacagtatctatcctctgaatggtgaaatggctacttttcatttatttatttttttctctcctggggtaaagcgcttgaaaactgcaccactgggaaattgcagctatagtccatgtttcaacatagtccatgcttctttgagttggccacttactgtttactctcatctccttaggtttagcagtaaagacctgtaagatttcttctgttaggatcatctagccattccaaacatttctcttagatttgattctttcaagacaaatcaacccaataaaaatctcataaataaaggtgagctagctaccacatttggtgttctcatctgaccaatccaaattatatgtatacatacaattatagttccatcccagactgtttgcctaagccctcgtgcc

SEQ ID NO: 12564 - DNA, 338 bp, Homo sapiens
gtcaacagccaatcaagttctgggatcccaagactgggcagagtcttgcaacacttcatgcccataaaaacacagtaatggaagtgaaattaaacctcaatggcaattggctactcacagcatcacgtgatcatctctgtaaactttttgatatcagaaacctaaaagaagagcttcaagtcttccgaggtcataagaaagaagccacagctgtggcctggcatcctgttcatgaaggactttttgccagtggagggtctgatggttctttgttattctggcatgttggggtagagaaggaagtgggtgggatggagatggctcacgaagggatgatc

SEQ ID NO: 12565 - DNA, 276 bp, Homo sapiens
tgaaaagtatagacactgtcctttccccctgactattacccacccaaagaacccctccccataaaaaaaaattaaacaataaaaaacccaagatatgaaactattgcccctgtaggcaatgagggaagggaaacaggagagttatcatacgtctggacctccatgtttcattatgtacatccatgtcccagcagaggactgggtaccacattatataacacacagaatgtatcaaatatttatatacattaaaatgtgtgtgtatagtatataaat

SEQ ID NO: 12566 - DNA, 267 bp, Homo sapiens
  misc_feature (1)...(267): n = a,t,c or g
aaggaagtaccttctgtgactgtctggcaaggtcagaggcatcagggaagtgcatctaagtcaggttttcccctctggcacagccttgcctccacagcccaatttccaccatgccacaggcaacccgcatttttatttannnnnnnnnnnnnnnnnnnnnnnnnnnnnnnnnnnnnnnnnnnnnnnnnnnnnnnnnnnnnnnnnnnnnnnnnnnnnnnnnnnnnnnnnnnnnnnnnnnnnnnnnnnnnnnnnnnnnnnnnagagtag

SEQ ID NO: 12567 - DNA, 567 bp, Homo sapiens
  misc_feature (1)...(567): n = a,t,c or g
ggcatcttctggatgagggactcattagtcttctcacaagagtcccttttgttcattagcttgtggaatttgagtgtctgtatgttttttttttaattgtttgtttggaggggagttgataagctaattagctatagagacaaatttcatttttgcttaactgaatctcactgcatgaaaaggcaatctaattctccaacctactttggtaaggtctgatgacttctgtgggcatgaccttcagaagactggttggtcctctgttttggaanatccttgagtgccaagcacatgatacattgatgatctgcttagtaagaataaatgttgctcctcagtttgagaggtttttgctgtctttgagaaatattttcccagacattctaatgtctaaatgccatttgagtagacaatcttcttcaatccatgcctggtaagtagtggggttctgtgtagccagcttattacactaacttctcctgactccagtcatagctccttattattttgtcatcaatgatgttaaccaaaccaaggaacatatttgctacttttcatatatctcac

SEQ ID NO: 12568 - DNA, 788 bp, Homo sapiens
attattatatattactccagtttattaaataaatgaaacaaggcttatgccacatattccaacaatgtttaaataaagagcttgaaatataaaggcttatgaaaacttcatactctttatataatgcatactatttctagcacatgaataaatataaaggacaggagccactttttatattatgaatccacaacattaagcatcaatgattacacaaatccataagcacacaaacaaaaaaacccattggttataaaaactagaattccttttggcatatttaagaaaacccaaaggtggggaggtacttatagccagaaccctgacaacgaggggaccaagtctcccaattccttaagttgtttcttggttagaagcttcaacaattgcattaactctttcaaaaaaacagaaaaagcaggttaagatcctgttcaataaggcacttaataagtctacactgaagaaatactatgcttttatcttaaatcgtgcttaagttttaccatgaggtttgaatttctttccaccttggtaggaacatgtatgtaatttgaataaactggtaataatactgtctgacattcgctctttacatggtcattaaaatgaatttgcttctactgttttaaaaattgtatgcatatttgaaaaagtaaaatttttctacattaaaaaaagagcgtttcaagaaaagcaatctttaaactcaaagaactcaaaagtgaaagcctctctatagaaagtctttataaaatcaatggaatgttttggaaagcctcgtgccg

SEQ ID NO: 12569 - DNA, 308 bp, Homo sapiens
tttttttttctttaggctgatgaattgttgttttcattctgttcatttgatagtgtactgacactttctattgtcaattcagacaactgccaacttagataattccaaacttaaaaatttattttctctacttaccatctaataattctagagtaactgtaggatccacatattcccaccaatgctttccatcagttgatacagggatctcccaattggaccatttgcaagccaaatgaatgcatacacatgctatcactgttggtttgtactgaagacagaaggttgtaagatgcagactgttgcag

SEQ ID NO: 12570 - DNA, 381 bp, Homo sapiens
gaatatgagacagattgtcctcacagagcctttgaagagtgtgacagtagttgagggccacgctgttgtcttagagtgaagtgaggagaacctacattggtttggtagtcatgggagtggaaggagggatgaaatgtgaaagctcattggaggcaaaatcaaaatggcttgctcttcatagtcaactattaagtgaggaggaggaattatttgctgacttgggaagaagtaaaagcttgccatctcaatcagggtaaagcttaagcattgtgtgattctagatagattattgagcagttttgttctatgtatttcatatcccatatcttctagttatgaccctacttctttatttcttgccatagccaaacattttttaaa

SEQ ID NO: 12571 - DNA, 588 bp, Homo sapiens
ggcgtatacacataatgcagtgccatgccataagggaagggtcagtaagagaagtttgccttggcagcaagtatttattgttgacattattcagaattagtgataataaaaagcagagtgattttggtcaattttattattaattcttaaattccctgcagagaatgccccctttattgctgcaccagggtgggcattgctcccactgagccctactccaccctgtccctgcactcccttggttgccaaaaaaatgataacttaaatcccttccagacttaagaattttatgggcatggcccaattgatataaacatttagaaggaaatgaaaagctaaaataggaagtaattattcctctaaagaaacattttgagcaaggcagtttagagaatcctaatgtctacactggcatagcacgagccatgtaagcttcttttttttctatgcaagagtattgatgtatgtgctgaatcttcacagacttgtcaatacacaggcagtattctaaaatagcactgaacagggagtcaggagactattgtctcctaaaacccaggactagagttccctcgtactggcacttcc

SEQ ID NO: 12572 - DNA, 1063 bp, Homo sapiens
aattttagaaggaaaaaatttattcagatgatgtgatagccatgtcactgttaagcctgaacttttctttcctgggtggtgtgaaaggtgcaagaaaacacaagctgcttttaataacactcttgcactgctttctccccaaagctagatatatcaaaacattaaaaaataaaaaagctttttaaggtgtaaggagcaaatggaatagtggataaagccttttcatctgtttagtcattttacacccaagtttctctggagtatttgcctggaagtttctaatcaaaaccattagactttgagtttcacaaactcctcttgaagctcttccagtgaggcctgcacatcggtatgaaacacattctttccaaaagctaccactggtagattttaagaacaagctcaggagccacatcactcaaaataattccaagtatttcactttttcccttcaaataacactcatgaatctggtccttgaaagactagccaagaaaattagacatttttagcattagtttgctcatacatacatttgctatatttttatggttgtatttttggcaagttttgtttgatgtatttcataatgaacggcgaaattggtgtttgccccattgacatttcagtgtcaatgtattttaagcttcagtgtgttaaaactctgttgaaaattttaacttttgaaatgttcaagtatagattatttttcattgttcttccaaccttggggttgttctgtccacaagttcagcagaatccgtttttctttggcaaccaagaaacttcaatatgtaacagaaaacatggaatggcatttagatcttcaaaaagcagggcaaactggaatggaatgtactgtttctcacagtggtctatgctgacagcaaggctgaagatttccagtaggttatgggtaatcagtgaaagttcatgcttggtggtgacagctgcagtacatcttgaataccagttttcttcaatctttgccaaaaacccaaatttaacacagtttgctgtagtgccattaagatatactcctatacaatttcctccaaactgg

SEQ ID NO: 12573 - DNA, 371 bp, Homo sapiens
ctgaccttcacttaacagactataaatacaaaaactttgaacacataaattatttcattttggtgagatggaataaatgtttaaaattagtatttaagaaagttcttaaacattttttttagttggcagccaaaagatttttcttacgtgctttggagacattgcataggtgtaaaattaagataccagaacttcattctgttcttgttgaagctgttgttgtggtgattcatgagcagtaagctggagttagagtggaagaagggtttaccaaaattcttcctgcagactagttgcttacagggtttctttgagaggcttaaaaatttcaaaagtattatttaagccactctaaccctgcatgaaaaatt

SEQ ID NO: 12574 - DNA, 739 bp, Homo sapiens
  misc_feature (1)...(739): n = a,t,c or g
gttcattctgtcataactttgctattgtaatatgtgaataccagtttatttaagctgttctcttttatactgtattaatttaatgttcatctgcgtttagtaccatttttgttattaaaactggcatttaccgtttttcacattaacccaccttgcaccttcccccaaacttatctccacttttctcacgcattctatcattgatttgacacacttcatagtgagtcatttaaatactctacgtttggttcaattaaccagtaggttacagttattgaaaattaaagtacagtttaaagctcagtctgttacactgaattgattgtgtttgtttttgccaagggtttagatatgcttttaaatattagaaacatctaagaacagaataacataattaaacttttttctggtaagttactggaaggtttcactgtttagggacctatcatatgagacttcttaaaggattaaaagaataggatagtctcataattgtgagtaaacatcaaggcattatattttacaatactgaataaaattccaggcacaatatattttttttaaatggtatttgttagtagtgcttcttccccttaacatttacagtgtaaatactgcaggtaaccgcaatctaagttagcccaaaaagcagctttttttcccatactgtatgtaaataatgtaggcccggggttttttgtttatttggggttgtttttttttttgaggnaccgggatc

SEQ ID NO: 12575 - DNA, 781 bp, Homo sapiens
gacaatggaagctgccccgtccaggttcatgttcctcttatttctcctcacgtgtgagctggctgcagaagttgctgcagaagttgagaaatcctcagatggtcctggtgctgcccaggaacccacgtggctcacagatgtcccagctgccatggaattcattgctgccactgaggtggctgtcataggcttcttccaggatttagaaataccagcagtgcccatactccatagcatggtgcaaaaattcccaggcgtgtcatttgggatcagcactgattctgaggttctgacacactacaacatcactgggaacaccatctgcctctttcgcctggtagacaatgaacaactgaatttagaggacgaagacattgaaagcattgatgccaccaaattgagccgtttcattgagatcaacagcctccacatggtgacagagtacaaccctgtgactgtgattgggttattcaacagcgtaattcagattcatctcctcctgataaatgaacaaggcctccccagaagtatgaagagaacatgcacagataccagaaggcagccaagctcttccaggggaagattcctttattctggtggacagtggtatgaaagaaatgggaaggtgatatcatttttcaaactaaaggagtctccactggccagctttggcaatttaccagactctagatgacgagtgggatacactgcccacagcagaagtttccgtagagcatgtgcaaactttttgtgatggattctaagtgggaaattgttggaa

SEQ ID NO: 12576 - DNA, 286 bp, Homo sapiens
gcaacataaaatatgacatactttgatttcatatacacaaggttcaaaaacacaaaactggacaatgtattgcttgaagatacatatgtctgctaaaactacttgaaaaaaacaaaagaatgacaaacgataaaaaacaatcagaataacttttacctctgaggagagcagggagaagatttttaaagattttaactttttaaaacttttaaaccttttataaaagaaaattttaactttttcttaaagtgaatggtaggtacatggatatttgctgtattttatt

SEQ ID NO: 12577 - DNA, 270 bp, Homo sapiens
gtgttgttgattttctttcccttttgaatatgagatatcagagtaagaaaactctgatcagagttttctgaaaactcttatcagagtaagaaaaatttgatcaatgatcaaattcagtgactcaattttggttaaattttatccatcaatagatggataaaagtgtaaaatgatttttttcacatttcttgtcccatttgatccgtcagcatcattttgccctgatgaaaatctcacttcctaatttcccctagttctcctcctacactt

SEQ ID NO: 12578 - DNA, 454 bp, Homo sapiens
agggagcaggtggcagcctctactcccagcaacaagtttgtgttctctccttttctctctttgcctcactctctccagttggttttcagctggggcttgaaatgcatttttagccctttgacgtggcttatgccattcaagaaataaaaagcaagagaatcagctttgggcaatgacaagaaatgagttcttactctgatttttttgtaaaaagataatttttgagacttgaaaaataccccgaccttgagattattcctgtttgaaaggtggtgcatgcagatggagaagtggtgttggcagcaagctttggctcatgtggatttggtttaagtggtgcttcttacccaagcttcaaggaagtgcttgggggacccccagcctcatcctcttagttggggtctcttgttccctttgtaccactgttttgccttccttttcctcttctctcttt

SEQ ID NO: 12579 - DNA, 396 bp, Homo sapiens
gatacttcagcatgtgttaaactataaaatacctactccaagtatctgcccagttccttgtcccctctccccaggcccttaaaggaagttctcgatacatatttgtagaataactgaatgttttcaggattcctgtactttgctgagttaaaatggatatggtacccttgctgattggttgagcccctaagagggggcagaatattaaatattccatatcagatatgcttttacaggtttgactttagaaaagtcttagcatgtgaagcctgttggataaagggctgtgtttgcatttaatctgtcacttttgtatctcctgtcctggctggccattttgatctcatgctgttcttttttccttttgaacttgtaggtcaccatgtacttgacaag

SEQ ID NO: 12580 - DNA, 457 bp, Homo sapiens
ttatactcatagggtttatatgtacgtattgtgctgctacttatgtacaagtaacatataactaaaaataagatattcataaaaacaagttttaatttgattgaaaataaaataacagtcgtctctgacagtggagaaactatgctcaaatgattactttgaaatagacctctaaattatgtacttttggatttgacatttcatactgactctcagatagcacataatagagaatcctccgtcttctaaatttgtctttctctgaaatctgtacaagtcctttgataacactatattattgaagtctctggagtgaaacactatacactaatttacagttataaatacaaaatattgtagacggggtgaaaaaaagttctgattgacttgctagctggtttctcatctcatggttgccaagtttgtttcagttgttatagtctgttctcagttttta

SEQ ID NO: 12581 - DNA, 724 bp, Homo sapiens
tttttttttttttacatatgcaaaataatcttgtttattagaaaatgaacattcacaatgtaaagtagaaattaaattacaaataagtcttcaatggtcaaaaatggtgcccagaatttcttctcaaaataagttaatctattcttaaacagatgcaggtaagtagtttatccttgtcaaaacaaaaaattaacagatttcactttatgtaagagataaggtttatatgaacaagaagagtttatttttaaatgtaaagctgaacaagatagaatggagatgctttgtgaagttataaatcccttcaaaatatgaaaatcatcctttcaagtttaaatttgttttcaaaaacatattttctcttcttaaatatgtactactcttaacaatatatcataccttaaaatctcctgttgtcattttctctttatacgcaacttggcctactcaagaagacatcaacatggtgattttttttcctcaaactttatctccttgctcttttcccaatcccatgttacttcctttcgccttcttttgtgccaagatgagcaaggtataatcctccaaagaagaaaatgctccaaagaaaatgctctcaataaaaaggaaagtaagagtcatttgtgtaaggttaagtttatctaaattttaatcaatattataaacctttgaaagctgggaaacttttttctgttatattcttgctggaaacaggttatta

SEQ ID NO: 12582 - DNA, 789 bp, Homo sapiens
agagttgacgggccaaaggataaaataggcttatttaaataggatgctacagaacacatccactcctaattgtagctgctttacactgggtgccattgtaccatatgcatcagccacccttcaggcaccccatggtgaaagaaaaggattcagaatagaagccaagcaggggactgttgttaaccccgaatatccattatgcatagaaacagctcacatatcccagggactcaaacagggcttcaaaatggttgtgaagggtcccaaatgacatctaggcctcagtttcctcctctgcctatcaatgtgtgtggggttgaaatcgctttgtaaactataaagcgtgggtgtacgtaaaggatggttattgtttataattttttttgagttgtaagaaaacttagcagttccccaatccttgggttttgaacctgggaaccttggattggagttggggatccccaaacttcctgaaattgtgggaatgtgcggtttgggggaatgatgggaatttgtgggaatgtgcgttttaggggaatgatgatccatcgctagcaagttttccaagggggctgtgacccagaagagttaagaatcacaatttcttcatgctacagagaggaaactgaggcctagatgtcatttgggacccttcacaaccattttgaagccctgtttgagtccctgggatatgtgagctgtttctatgcataatggatattcggggttaacaacagtcccctgcttggcttctattctgaatccttttctttcaccatggggtgcctg

SEQ ID NO: 12583 - DNA, 551 bp, Homo sapiens
agactcctgcctgccctctgccgatgctgcctcctccatgctcttgagaggtggagccatggtgctctgtggtggcgcatgattcactgagcaaacagcactttacagaagaaaatctttattttgtaatatgtgtgtccagcgggattgacactcaaaaaaagtctcacttagaaatcttcccttccttacctttgtatctcctttacatcatgagagatcaaaaatccattttgccttacatatgctaaggaagcgtgggcattctttctgttcataaaacaggactcatggacttttaagacaggacaagcagggccagaggctttttttttaatcacagatctcatgggaattagtggatgctaaatggcaattaaagcatgattcctatgcttttgagcctgttttatgacaaggtgttactttgtagacctggcccatacatttcttttttgtcaacactgaaaaagaacagtttctgagatcgaaatggaaggaaaggaagtgagtaatgacaaccaaaactgaatatttaaaaaatattcctt

SEQ ID NO: 12584 - DNA, 1578 bp, Homo sapiens
atcatcataaaaaatatttattataaaaaattatcacatttctctgtacatagcataaagacaaaaacacaatgtatacattaataaattaagtgggcctgagtattcagtatccatctactagaatcctaaagctcttccccagatttcacaaaggccaatgtagattatttctattttatcaaagttcatttgcacagttggtgtaattgagatactaacatttcttttttctagtgttttaaagatagttcacagtatttgagttaattaattaatcaactgatttaaatctttggtaaatacaagtatttacatgtaaaaatgtttagctcaaatttcagtaaaaaactggaaatgaccaataacctactgccaactgttttggtataatccagaaatgcatgagccggactcccaccattaagaaatgtcactgtctaggacttctgatgataaaaactgaaatccacaaaaaaatagttgagcttctattaccattaccagaagcaccacaacactaggccaccatgaaattacacacaaatgtcaaattcaacatataaaccatactgattattttacaatgcagaaaaatcctcctttttttctatatgccagtttaaatgttaattgacacgggtaagtttattatctcaaagcctactatcttgtaagagtgagaggcatttaaagaatccatactgctttcaaaacaccagttcttcctcttgccaatgacatatcccagaaaatacagattttttttgaaataatttgtggggaaaatagaaaaatgcctgccttctgcttccctctcttcctatatcctttctttccttcctgccttctttcatttttccatttcttcttctctaagagtaatcagcacaactggtctgccaaccttcaaattataccttaactctcccaaaaataccatatgcatttcaggtgtcattcattatctctcagtcacaacaactgacaaatgaaagcatgctggcatgagaatctcttacgtccaggctatttgcttaaaataattactctaaaaggtacttaaattctaatgttcttgagccatttgagaattagtaatttttaaacagacatattaatgctggagtgtagagaatatcattaaatatatcaaaaatatatcttttaagcctagaaaatggatgcctttggattaccttcatttcagggtagagaaaagcccttcctactgaattaggctctgaacatgtgatttctttccctaacactagtttttccaatctactaatttatttataaacaaagcaaagtaagagatatttttgctgttactttggcaattctctctctccaatccccaacatcccgagttcagtgcacatctaacaattcactcaagactaggcacctgacaataagtgtttacttagtgtgtaaagtgaacaagaaaagcagcataataaaggagctgtgtttttatcagaggagccttccttctgagtttttacataagttgatgccttcactgcaactttgaatacagtgctttgaatgttgaaacacttgaataaaatg

SEQ ID NO: 12585 - DNA, 364 bp, Homo sapiens
tacctcctagctctgttcatctctcacatagtgtttctgataaagttttgtagtgtatctgttgaagagatactatgattcaaagtgctgggtttttgttgttgttgttgttgttttaagattttgtaatgattttctgtagtgattcacaatggggttggcccttggcagtttttatgtgagtgaaagcctgccttatccttgcacgttttgtttatgtccatgactgaccagtttcgtgggtaataaagcgacaaagcaagaatgactaataaactatcaggggttaactactgtgcttgcttttcctttccggggagtgtgtgtgagagaaagaaaaacatacgactctctcctcgcatgg

SEQ ID NO: 12586 - DNA, 304 bp, Homo sapiens
cccaccttagaacagtatgccatgagagcgtttgccgacgcactggaggtcatccccatggccctctctgaaaacagtggcatgaatcccatccagactatgaccgaagtccgagccagacagatatgaagcaacagcatgtcatagaaaccttgattggcaaaaagcaacagatatctcttgcaacacaaatggttagaatgattttgaagattgatgacattcgtaagcctggagaatctgaagaatgaagacattgagaaaactatgtagcaagatccacttctgtgattaagtaaatgga

SEQ ID NO: 12587 - DNA, 567 bp, Homo sapiens
taaaccaacctgtctatggtatttgttgtagcagcctgcagctctctatcactcttgtttataagaggctgaagtttactttacctcaggcagagctaagcaaaaaagattacatcccgattacaagatgaaagtaaacagaattgacaagagaaatttattactaaaaataaagcagctgaaggttttcccagggaaaaccatcaccacaggaccttccatgatgaaatacgttagtatcttctttacttctgaattgctgccttctttcatatacccaaaattttagtttaagttaaattaatcacgacaaaaacgatgtggcatctgatcccttcttgttcaatctgaagactgaattgggctaccctgtgatggagacttcaagtgctgcaggtgagtatctaccaagggttcatgtgtcaggtacatgggctggtaagaagacacaaaggctgcaggctgaagctctgggaggtccaaggatcctggcagaaggggatcattctgatcttcatcaaagatctgtctctgaaaggcttcaaagctcatagctgcatcattctc

SEQ ID NO: 12588 - DNA, 41 bp, Homo sapiens
tttaactcctcagtgcatatatttattgcagcatctggatc

SEQ ID NO: 12589 - DNA, 280 bp, Homo sapiens
gttttttagaacataactattatacagtaaataatgacaattgactgcgtgttactttgagaaaagtactaaacctttctgaatttgtttccttaagtgtaaaatttgtgaatctctatctccctgtgtaggaacttgcaccctacagaatttgtctttgtttttctatgacaaagtcttccctaggctgagttggatattggactgaatgcgtcaggttagagcccagaggtttgactggagttggcagggctgcttgggtctgctggagttcttggtc

SEQ ID NO: 12590 - DNA, 415 bp, Homo sapiens
  misc_feature (1)...(415): n = a,t,c or g
tctggtcccacagctgagtttattatacttgttttcttttacaaaattaaaaacatctaaaaccaggcccaagtggcagcttgagtccctccatttctggaaactgagaaggctccacctggcttgatatggacacagggtgtggggtggaggggaggaggtatggtgcccgaccaaggaggcaaggggcaagggtggcagactgaggagggagcaccgccacgagccacagtccctgagttataattcacagtaagaaggctcaggctgcagggggaggtcaaggctcagtgaggttctggggtgaccaggggtttccctggggaaggtggccggggccaagatgctctcgagccagtttagaggccagggcccttcctggccatctgtcccgtggcctagccganactccgtt

SEQ ID NO: 12591 - DNA, 535 bp, Homo sapiens
  misc_feature (1)...(535): n = a,t,c or g
tttttccccataatcaggaaaaggacaataagaaagaactgctctcccagaacttctctcaggctcctggacaatcttcccaatctaagaacaattttttcttttattttaatttcaaccaaagaatcacatggttagaaaaataataaccccctgccacatacctcgccatactgagtcctcctctccaggggcaaccattattactcattattacccacgtccgtttatgtttcttttgatgattatttccatatctctaggaaaacatgctggatactactactcgttgatttatcaggatctaggacattattttactaaattccttccatggataggacaggggaatttatctcacataacggatccccactccttcacctccataattttgatgggggggcaaattattaggttttaacctcctctactggtatcaggttctcatactttaggctggcaggggggaatcaccccnggccatcttggttaaaccggggttgcggggccggggcacgggtgggggctcaca

SEQ ID NO: 12592 - DNA, 100 bp, Homo sapiens
cctttccagaaaagctacaccagttacacttaacacccgcagtgtatgagcatgcccgtgtgatgggcacttcaacagcatggagtacccctgttgtgtt

SEQ ID NO: 12593 - DNA, 317 bp, Homo sapiens
gattagatgggcttttgggggtctgaaccctttgacacattcacaaatactgtgtggagatgtactttcaagcctggagatgcagagcattcatcagactgaccaaataagtaaagagccccagcctagataatgagtatgagttcctcaccggttctcaatgctgcctgctttttcacatgggccttcaagacacggctggggctcaggtagatgtgccactgagcacttctgtacctcgtacaagttacttagctatctaagcctccagctactcatctgcaaactggagataatgatccatctaccacaggtgc

SEQ ID NO: 12594 - DNA, 380 bp, Homo sapiens
gatctgccctgtgttatccagttatgagataaaaaatgaatataagagtgcttgtcattataaaagtttccttttttattctctcaagccaccagctgccagccaccagcagccagctgctgctactcttattgtcattattagggtatgttttcaaaaataatgctgtggtttcagtataaaacctaatgttatcaaaaggatttctttcattaggagcagttctaggagacttcattttctttccttacttggccacctttgccctctgaaacttgtagatccaaggtgtggaaaattagttgtgcaattttaattattaaatcttgtcattattgtgtattttagggatgtgagagagtctttgaaaattttttttt

SEQ ID NO: 12595 - DNA, 155 bp, Homo sapiens
ctacatcattgtttgtacaaacattgatgtagttctttcatggttctgaagaaaaagatataaatctgatgttaaataaaaacattaaaaaattataaattacataaggatgtaacatatatttttaaaaagtaaatctgggctggatgtggtag

SEQ ID NO: 12596 - DNA, 346 bp, Homo sapiens
  misc_feature (1)...(346): n = a,t,c or g
aagggcaaaagcttcaagacattggatttggcagtgatttctcagatatgacaccaaaagcacagacaaaacaagtagatcaattggacttcatcaaaatttaaaacttctggtctcgaactcnnnnnnnnnnnnnnnnnnnnnnnnnnnnnnnnnnnnnnnnnnnnnnnnnnnnnnnnnnnnnnnnnnnnnnnnnnnnnnnnnnnnnnnnnaatttttattttcnnnnnnnnnnnnnnnnnnnnnnnnnnnnnnnnnnnnnnnnnnnnnnnnnnnnnnnnnnnnnnnnnnnnnnnnnnnnnnnnnnnnnnnnnnnnnnnnnnntagctggngaccacaggcgcac

SEQ ID NO: 12597 - DNA, 1943 bp, Homo sapiens
attccggttgttgcaccatggcgtccatggggacccatcgccttcgatgaatatgggcgccctttcctcatcatcaaggatcaggaccgcaagtcccgtcttatgggacttgaggccctcaagtctcatataatggcagcaaaggctgtagcaaatacaatgagaacatcacttggaccaaatgggcttgataagatgatggtggataaggatggagatgtgactgtaactaatgatggggccaccatcttaagcatgatggatgttgatcatcagattgccaagctgatggtggaactgtccaagtctcaggatgatgaaattggagatggaaccacaggagtggttgtcctggctggtgccttgttagaagaagcggagcaattgctagaccgaggcattcacccaatcagaatagccgatggctatgagcaggctgctcgtgttgctattgaacacctggacaagatcagcgatagcgtccttgttgacataaaggacaccgaacccctgattcagacagcaaaaaccacgggtgggctccaaagtggtcaacagttgtcaccgacagatggctgagattgctgtgaatgccgtcctcactgtagcagatatggagcggagagacgttgactttgagcttatcaaagtagaaggcaaagtgggcggcaggctggaggacactaaactgattaagggcgtgattgtggacaaggatttcagtcacccacagatgccaaaaaaagtggaagatgcgaagattgcaattctcacatgtccatttgaaccacccaaaccaaaaacaaagcataagctggatgtgacctctgtcgaagattataaagcccttcagaaatacgaaaaggagaaatttgaagagatgattcaacaaattaaagagactggtgctaacctagcaatttgtcagtggggctttgatgatgaagcaaatcacttacttcttcagaacaacttgcctgcggttcgctgggtaggaggacctgaaattgagctgattgccatcgcaacaggagggcggatcgtccccaggttctcagagctcacagccgagaagctgggctttgctggtcttgtacaggagatctcatttgggacaactaaggataaaatgctggtcatcgagcagtgtaagaactccagagctgtaaccatttttattagaggaggaaataagatgatcattgaggaggcgaaacgatcccttcacgatgctttgtgtgtcatccggaacctcatccgcgataatcgtgtggtgtatggaggaggggctgctgagatatcctgtgccctggcagttagccaagaggcggataagtgccccaccttagaacagtatgccatgagagcgtttgccgacgcactggaggtcatccccatggccctctctgaaaacagtggcatgaatcccatccagactatgaccgaagtccgagccagacaggtgaaggagatgaaccctgctcttggcatcgactgtttgcacaaggggacaaatgatatgaagcaacagcatgtcatagaaaccttgattggcaaaaagcaacagatatctcttgcaacacaaatggttagaatgattttgaagattgatgacattcgtaagcctggagaatctgaagaatgaagacattgagaaaactatgtagcaagatccacttctgtgattaagtaaatggatgtctcgtgatgcatctacagttatttattgttacatccttttccagacactgtagatgctataataaaaatagctgtttggtaaccatagtttcacttgttcaaagctgtgtaatcgtgggggtaccatctcaactgcttttgtattcattgtattaaaagaatctgtttaaacaacctttatcttctcttcgggtttaagaaacgtttattgtaacagtaattaaatgctgccttaattgaaa

SEQ ID NO: 12598 - DNA, 360 bp, Homo sapiens
cacctggcctgttacgtttttttaaaagaactggccaagaaaagatttcattaacactggcataggaaaccagttgtgactgctgaagatatcagtaataactggaaatccagattatatttacatttaaaagcaacaacaacaataaaaaactagggtcagaagatggttaatttcaaatttaactatcatgactaggttttccattctctctgttgatcatgtcccacagttttgggcaatactgagcaataggtgccacttcacatttgcctcaaaagatttgtgttttacatgtcatttcctcatagtgtctttgttcttcaatttttaaaattaaacacatggctggaaacagta

SEQ ID NO: 12599 - DNA, 213 bp, Homo sapiens
  misc_feature (1)...(213): n = a,t,c or g
gccagcagtgctgttggaactgctctgccaaaatttgccatccgagggatgctgaaaacctttgggcttcatggagtcgtcttagatgttgattcagtgaatgaactggtgcaggtagaaacgtacctccgcagtgaaggtgtgctggtgcgatacttggtatcctatttgacatgttgggaaagggcccccagcaggctaccgaanggactt

SEQ ID NO: 12600 - DNA, 638 bp, Homo sapiens
tttttttttttgtacattcgtttttattgtcctgagtgggatgaataagtttctaatatacaaatttccccctcctcatacatggaaaagaaactgacagaggcccaaatcgtttcctggcagcccagaattcccaggtaactgaccaaagtctcctgccttctgtcctcatgctgatctgtttgtatgagcaactggggcaacccctcgcttggttgctgggacagccgcccacagcctcagctccaggaagcactagggggtcactgagggctggacagcaacttaggaagtggcccctaagtgactctacccatggggttcaggccatcggtgtggcctgaacatattggtcctggggtggaggaacactgcagagccacagaaatgccacgaaacagccagctactgccccccacaatccccgcgactagttaaaatgcagattcctgaccccaccctgagtaaggattcagggtgagtgtgggatctgcaaacttaaatttcccagtgattctgatgtgggatagtcctagaagaatagttccagaggcaatcatttagatcctaaaactgtggggagtggggacagggtgaacgaaggtgcccccccaggttccacccacccctcactctag

SEQ ID NO: 12601 - DNA, 322 bp, Homo sapiens
gactacacttgctgaactggctcctggggccatgaggctgtcactgccactgctgctgctgctgctgggagcctgggccatcccagggggcctcggggacagggcgccactcacagccacagccccacaactggatgatgaggagatgtactcagcccacatgcccgctcacctgcgctgtgatgcctgcagagctgtggcttaccagatgtggcaaaatctggcaaaggcagagaccaaacttcatacctcaaactctggggggcggcgggagctgagcgagttggtctacacggatgtcctggaccggagctgctccgga

SEQ ID NO: 12602 - DNA, 376 bp, Homo sapiens
ctcctggctccttttttttttatttttaataacagaagggtatttcttttgaatgtgaaattttaccacatggtatgaattagtccaagtgtttttatactaaatttacataatatacacttttcaagtaagtacaaagaggtataaacactgcttatgaattgaatgttaaaaaataaatctctatgcattacttttgtctttccccataatctcacgtatacacataaaacaaaaaacaaggagacccagttatagttgtggtatctgctgtttctgccttgaaatttccagcttacagctaagcaacaactactgtgcatccagaacttacatctatgttcctagagtacttgaaccccattctcaagtgcac

SEQ ID NO: 12603 - DNA, 434 bp, Homo sapiens
gctttacacatttgatagggaacatagaagttgtgacctttcatttcagtggaaagcattgagccagaatatatttattcctaaaccatcgagccacacatgcattgatgaaccctgaaagaatccacagtaattgactaacaggcagtactgaatgaaagatgtcatatgtggtgaaaaatatttaatatatcagtttcttgggctcacatacagccctttagttccaagtgcttggttagattagaaaatgggatgaacacaatttgatgctgaagcagctgctgagcagcacccagggagtctaggtcatacgccctatattgttttcggcccacttattgttgagttgaaaagtctcatatttgtagactagagtgtatgtgtttacaggcccatgttgtatctgagttttctctggcaactaagatctc

SEQ ID NO: 12604 - DNA, 257 bp, Homo sapiens
ctctatgtcttcttctttttgcttctcctcaagtagagcctgacttttttgaaggttagcttcttctaagagttgcatgctatttctggctcttacaatagcctcatatctctcattttctaattcattgcactttgcttgtagctctctggtctgtttttccagatgtgtattttcggttcttaattggttggcttcttggattgtcacacataatcttatttctaattgttttatactagactgtaactgctgtg

SEQ ID NO: 12605 - DNA, 136 bp, Homo sapiens
tataacagtgctgggatcaacatacttgcaaatgtgccaacaaatatgccagaatatataggacatggcatttcaaaattcccactccaattcttaacttaagtcaactttagtcatttctccactttttatttct

SEQ ID NO: 12606 - DNA, 214 bp, Homo sapiens
gcagaagcccctgcgctggctgcctcaatgcctcatcattgttaaaaggactcagaaatcacaagtgagaaaaatgaaacaaaagcagccatcccatagcttcagggtgagccttcacaggaccagatggataaagcagcagcactagtggaggtctgcaccttcctgcttttttacctatttagcttctaaaatttttcaacactgattttaa

SEQ ID NO: 12607 - DNA, 595 bp, Homo sapiens
ttttttttttttttttatgattgtaaaaattttattctcaataacaattccactaaaattatacaaagtacattcaatacttaagaatggcaaaggtggggagaggaggagaggaagccagtttggcctggaagcatcaacagttgactccaacaaaggaagcccagctgggctggaggaagttgggggtggaggtccggttgtaaaaaataaaaaaggggatcggtaaaaaaaggccacccacaaggaagcagagtgagcgtgcatgttcctgggggagggcaggaggctcagctgacatgctgctgctgggcactggagctcaggcgggctccgagttggtggggggcaggtttttatgcttgaaatactgcacaacttgttggggcagctccgccagcacagctttggccaaggtctcttttgctgcgttgcggaactctcgaaagggaacgaactgcacaatatcgcgggctgcctcctcccccgtgtgggagcgcagcatgcggctgtccccatccaggaactccatggcagcgaagtccgcattgcccacgcccacgatgatgatggacatgggcagcttggaagcctg

SEQ ID NO: 12608 - DNA, 545 bp, Homo sapiens
gcaaataagtttacttttatttttggtaatactttactggattgtctgaatattgacaatcagtatgcatcatgaagctacatggctaacattgagtactcactgtgtgtgccaggccctgggttcaatgctctacatgcacttatatttcatttaattctctctgcaacctgagatggtatagccacctcattttacagagttgaaactgaggctcagagactgaaagttaagcctgaggttgcagtcaataagaggcagagctggaactgaaacctacctgtgtctgaccaccagttcgtgttctgacggcaggctagtctgcatcacagagtgtggagtagatggtgcatgcctgctaggatgggctaggtatcactgtaggtaagaaacagccccaaactatggaaatgtacaccactgaaggctcttttcctgcccatgctgcacatcctccatggctctcctgtgccctgtgccccacatgccctcatcctgccacgagaataaaggagcagcctccatatgggagctgtcagctgctc

SEQ ID NO: 12609 - DNA, 838 bp, Homo sapiens
gctttcttgggaagatggcggctgtgtcggtgtatgctccaccagttggaggcttctcttttgataacctgccgcaggaatgccgtcttggaagccgattttgcaaagaggggatacaagcttccaaaggtccggaaaactggcacgaccatcgctggggtggtctataaggatggcatagttcttggagcagatacaagagcaactgaagggatggttgttgctgacaagaactgttcaaaaatacacttcatatctcctaatatttattgttgtggtgctgggacagctgcagacacagacatgacaacccagctcatttcttccaacctggagctccactccctctccactggccgtcttcccagagttgtgacagccaatcggatgctgaagcagatgcttttcaggtatcaaggttacattggtgcagccctagttttagggggagtagatgttactggacctcacctctacagcatctatcctcatggatcaactgataagttgccttatgtcaccatgggttctggctccttggcagcaatggctgtatttgaagataagtttaggccagacatggaggaggaggaagccaagaatctggtgagcgaagccatcgcagctggcatcttcaacgacctgggctccggaagcaacattgacctctgcgtcatcagcaagaacaagctggattttctccgcccatacacagtgcccaacaagaaggggaccaggcttggccggtacaggtgtgagaaagggactactgcagtcctcactgagaaaatcactcctctggagattgaggtgctggaagaaacagtccaaacaatgg

SEQ ID NO: 12610 - DNA, 406 bp, Homo sapiens
  misc_feature (1)...(406): n = a,t,c or g
cttgaccaacaggggtctgtccccnaattgccctgctcctcagttaaaagcagagtttctaaccctcggcaacaacagagactttgaacnagataattctttgttgtgggggctgnccctgggtaccgcagcagcatccttggactctactcacctaagagccagtggcatcccctagctgtgaaaaccagaaatgtctgcaggcattgacatgttcccctgggggagggaaatcctccctggttaggaaaatcctccctggttgagcttcactgagttaaaataatagggcagttacctctttaagtaatttaagtgaagactatcttttaactttcnaaagaagggagcaatacgaagccnnaaaactatgagcgtttgtctctaagttctgaatgctcgtgcc

SEQ ID NO: 12611 - DNA, 1130 bp, Homo sapiens
cagaactccaagatgtttttatttatttcaaattccaatagaatgaatatgttttatctaaatatttttatcacacaactaaaacattgaattactttttcagaaatagttaaatacatcaatctagttacaaattctaatataaagagtacaaaatataatgttataaattgtattttaaaaaaagaaatacaaattctatggtcttttgcattttactgcctcaaagcagaattaggcaaagctgatgaagaatgaacattttcccttggggcgggtggccttggtcactcccacaggcacgttaccgggctccggcgtgtgctcccaccaaccacggcaaacaaaggcgtcctcctcacttgaagtcctggcctgtggttgtttcatctgtttttttgctcagtgaacaaaacgttctgaaatttagaactcaccaaagttaaaagcagtaaaacaacatatgctacttaagacattttgaagcggaaagtaaagctatgtgaatgccgtccttccttccttcctttttctacagcttggaaacctctgagaatttgctgggggtggcagaggagggtttgtctagtttgaaggaaggaatgttggtagacagtctccagccacgaaagcccaggaggtgccctcttccacacaacagactaagcactgcacccactttctttgatccagaaagcatccctactgaccctgtaacctacaccctctctgtccaaagaacagaggccgaccagagttgcccagcctggagaggcaccatggagatgaagcttgccctttctgcactcaacccctgcagcctgaaggagtgtgagacgatgaaacccacatgtgccggagcccctgcagaggtgttctcacaccctcagcgacctgtgcacagtggccggatcaggggtgggggcctgtcatactgggcgctcctttctctgacgaagtaactgtatgcaactcccaattgctacttcctgaagcacctgcttttcagggaaccagtgtctttcttggtttaaaaaataaataagtaaatattgggggacctcttaaaacacttaatacttttcagacctcaaaggcaaaattcacctggctttgaagccaaatctgta

SEQ ID NO: 12612 - DNA, 710 bp, Homo sapiens
gcaggccagccccatggggaagcgcagacgccggagcctgggcgctctgagattgtcactgctgttccaagggcacacgcagagggatttggaattcctggagagttgcctttgtgagaagctggaaatatttctttcaattccatctcttagttttccattttgttgtgtttcagaggaacatcaagaaatcatgaacaactttggtaatgaagagtttgactgccacttcctcgatgaaggttttactgccaaggacattctggaccagaaaattaatgaagtttcttcttctgatgataaggatgccttctatgtggcagacctgggagacattctaaagaaacatctgaggtggttaaaagctctccctcgtgtcacccccttttatgcagtcaaatgtaatgatagcaaagccatcgtgaagacccttgctgctaccgggacaggatttgactgtgctagcaagactgaaatacagttggtgcagagtctgggggtgcctccagagaggattatctatgcaaatccttgtaaacaagtatctcaaattaagtatgctgctaataatggagtccagatgatgacttttgatagtgaagttgagttgatgaaagttgccagagcacatcccaaagcaaagttggttttgcggattgccactgatgattccaaagcagtctgtcgtctcagtgtgaaattcggtgcct

SEQ ID NO: 12613 - DNA, 291 bp, Homo sapiens
agccggacagggaagcagacctgatgccctccttcctcatttactccctgactagcggttccttcctggccaagccattagcttcttttggtctttagtcttgatcttagagttttgttgttaactttttaaaaattattgatgatgcaaaatttaaacaaaaaagaaaatagctcccaaccactgatcactcaggttcaataagtaccaatgttctgccattcggtttttgtttgttttaatttaatttttttccaagtggacagggtctcagctactctggggcatact

SEQ ID NO: 12614 - DNA, 662 bp, Homo sapiens
tttttttttttttttttacagttttcataagatgtctttactacatgcattttgctaatatttccctaaaatattcaccaactctacagagttatactttgtgttaaggtactattgagttataagggaaatagccgtatcaggtagctagtgacataataccagttgtgaaaattcagacaaaatgagtcgacaaatccccaaaaatggcaaattaagccctgtgacaaaataagttattggatcatacagaaatagcccaaatctggaaattttgaattaaaattgtaatcctgtaaaacaagttttgggggtgaatggatttctttaataccaataatatttttaattcccaccacagatggatttgctgaatatgctaatgctgtgaatgagaaaacaattttggggtaggtatacccacaagtaatctgatgacaaaataaaccacagactgatgtcaaatggacaaaaaactgaaaatatgctgtgagaaatagacaaccaaaataatatagggggttgtggggtgtggcacagttaaggcatctaaacaaaaattccacatggctttggcttattaaaatattttacactatttttttaaaaaaagatttgaaagcatctgaaaaacatgcaaattgtttgaaaaccttgcatgg

SEQ ID NO: 12615 - DNA, 420 bp, Homo sapiens
tttttttttcttggttattgacacaggaggtttttcagaataatgcaaacgtaatcttatttcagtctgacatgtcagccatccagaatccagagtttcaacaccattgtggattccaaattgtccatcgtcaataataatttcgctttctagaatttaaggaaaatagaaaatttagttaaaactcttgatgcatacccagtgaacaactgagaaattacccaccttaaagatcgtttataatattaaatctacagcttaaaagcagcccaaggtgaataagcatatttattgtagccctcaataaagaattccctttaaaggaggctagcaaacagtaatggttcttacatacttcgttgattgtccattatgttaaaaagaagagaaagaaaactcttcagaaaggtgctctagagg

SEQ ID NO: 12616 - DNA, 368 bp, Homo sapiens
caagacttgagtgacttcaagtttgggtgaagtgctcattccatcggaccttctgggaaggcagaaaaaaattctgcttgtggcttgaaagtctccttgcatcggttccatttggcctttgaactataagctcaccctgagagctctctttctgctgctctttaatacgcaagtattagaacatgcctttatttcttccatgcaatggaccgccccaggacaactgcttaataaaggaacaaataagaaagccctgaaaacaccatctgccaagagggatgtttgatttgggggttcacttattccctttggtacacacagtcaaatccaaagcatcctttgttctgggcagaggttcttcagggagt

SEQ ID NO: 12617 - DNA, 650 bp, Homo sapiens
  misc_feature (1)...(650): n = a,t,c or g
cttgctcagggtcaagattcacattagcatttatagccatggatgttgattagctgttngtcactccctgtgtttatctgcctccccaaagaggaagaaccaagaagaaactcttactgctctcaggatgactggtatttggtttcctgatgccacttctgcctggaaacagatcatatacatcacagaaacatgcttctgtaattaacaacaaaactatgcatttaaagaactttgttcttctgaagacctaaaataatttcataactatcttattctttttaaaaaaattctttcatcatgtcacagtaattagttcaatagctctttaaaggattataaaatgtttttttaaatatacggttgtccgtgtaaacagattttcacctgttttccaatttccactgtgccatctccaatctgagtgctaattcaaagccaaaacacccatttagctatcagtatgcacttgttttgcatatacatgtgtacacatgtgcaatttttgtgtttctgtgtgtttactcatttctcagccaaatatcctagaaaatcaccctaattaaagggcatgtgtccagcaagtcctcatcagctgtacaccaatggtgaccacggtaatggaatggngatgtaaggttctgcactaa

SEQ ID NO: 12618 - DNA, 1853 bp, Homo sapiens
ggccgcctcgtggatcacaagcaccatcttcttccaccctccaatgcatgaatatgcagagaagcttgccgcacttcttcctgagcctcttaaggtcattttcttggtgaacagtggctcagaagccaatgagctggccatgctgatggccagggcgcactcaaacaacatagacatcatttctttcagaggagcctaccatggatgcagtccttacacacttggcttgacaaacgtagggacctacaagatggaactccctggtgggacaggttgccaaccaacaatgtgtccagatgtttttcgtggcccttggggaaggaagccactgtcgagattctccagtgcaaacaatcaggaagtgcagctgtgcaccagactgctggccaagctaaagatcagtatattgagcaattcaaagatacgctgagcacatctgtggccaagtcaattgctggatttttccgcagaacctattcaaggtgtgaatggagttgtccagtacccaaaggggtttcctaaaggaagccttttgagcttggtgcgagcaaggggaaggccgtgtgcattgcagatgaagttgcagacaggattttggaaaggtttgggctctcactttcctgggggcttccaaacccacgatgtcctgcctgacattgtcaccatggctaaaagggattgggaatggctttcccatggcagcagtcataaccactccagagattgccaaatctttggcgaaatgcctgcagcacttcaacacctttggagggaaccccatggcctgtgccattggatctgctgtgcttgaggtgattaaagaagaaaatctacaggaaaacagtcaagaagttgggacctacatgttactaaagtttgctaagctgcgggatgaatttgaaattgttggagacgtccgaggcaaaggtctcatgataggcatagaaatggtgcaggataagataagctgtcggcctcttccccgtgaagaagtaaatcagatccatgaggactgcaagcacatgggactcctcgttggcagaggcagcattttttctcagacatttcgcattgcgccctcaatgtgcatcactaaaccagaagttgattttgcagtagaagtatttcgttctgccttaacccaacacatggaaagaagagctaagtaacattgtcagaaataaataaaaccacaagtctcaagaatttgccacgtatgttcaagggtgaatttgaagaatttcagaaccactggtatccagagaaagcctgcagctctccacaggagctgtaaaagtcatggttgactgcctaccaaccatatttgttagcagagcccctcttatcttgagaactccattcttcagggaaaggatctccctagctcagagaataaatcctaattagtttatgttaggtatggtaatttgattcccctttgcagtgattggtttatgcatgaatatgtgatgtatttttgtccagtgaatcttgaagaaaaatcttttggtggaggtgccttcagggaaagttttcttcaccctcactcttcagttcaagaagagatgtcttcttgttgcgctgagaacaccatatgttcatgacgagattcctggcaccatgtcagccggcttgtagtcatgaggacaaccctttttggtgaggttggaagatggatggaagccaagtgcttagtgatgtcaaagaagcactcacttaagcattcctggagccaccctacctcagggcctcttgatatttgaggtaataaattcattgttctgtataaggcttttttatttttcactgttacggtcaaaagcatactgagaaatgaggcagaaaatactccc

SEQ ID NO: 12619 - DNA, 334 bp, Homo sapiens
ctaacaagtcatgttttctaacccttctttcactaagcaaaccagaacagatttgaactgttatgggttatatattagtatggagatcagctcagatgacattaaaaatgccgtagtgttattcttgtatgccaaatctttttttccccaaaattagcactttaattttatttactgttataatattggttttcttagattaggtaggaaatcttaatttggccaccgcctactttgacaagtaaatattacatcatacgattttgcaacattaaattagaacactagaaactaaaaaattatgtttcagtggaatgctacaactaagcatttt

SEQ ID NO: 12620 - DNA, 762 bp, Homo sapiens
taccaacttccataaagcagtttatttttcttaaaaaggaaggtacatggtcacagtccaaaatgttttatacagctctcagcctggaaaatgcaactgatgaaaaaggcactgtttctagaacaaatggaaaaagaataaatatgtcatcatttaccctgcacagctttgagtaacaccataggaccctgtcacacgttcagggtcaattttaaaagcttgagaagacacagcaaggtgatgtcctagactagccaggctccgaaaggaagagctgtctgtccctcctcactaactgtcctctctctgtcacaggtgtccatgtcactgttcctctagcagatgtggaaagtggctgctcagtgaggactcagcccccaccaacctgactgagggtcacacgacaccatggtggaaagtcacaaagggtaacgggccaagagggtgaggggggctccctgaccctgaggacccctgaggcactgctgcaccttccacggattctgtgtctagcgttgccctctttgcagatgcccctcgtggtggtggcacaaagacctaaaaatgatttctgtaaaatgggtacaaggagctccctgataaagcagctcatcctagacagccttttggagttagcgtaactgtccttcctcatttctagttctcaatagcgaatggtagacctggaggccccatgtgcacctgccagccggggcgagggcagggacggccagccgggcgatgggcggggcagtcggggtg

SEQ ID NO: 12621 - DNA, 188 bp, Homo sapiens
ccttataaatttataggtacagaagttataattggttgaatagccccaggttgtccatcgggcccttcacaatgcaaaatataactactttgatatactacagggactttaccaagtccaactatgttaaattgagcggtttgaactgggcacgtggatggccagtgctgtatagaaatgattgaaat

SEQ ID NO: 12622 - DNA, 678 bp, Homo sapiens
tttttttttttaagtgttacaaattttattaaaaattaacatttcaagaggtcatacgtatacaaatcaaactgcaaaaaattccaggcataaaaactattatctgggttagtgtgccatctttcttctccaaatgtcaaaatgtccacaaaaaaagtctttagaaagtcaaatccactgtccatttgtgttgggtaagaaacctatgtcttcattcactgcatggaatccatgttaaaagaaccctgtcttggttgtatattatcacaggactcttgtattaatccatttttcctcaattccccatagtagactgccatcttgatttctcagtggtagggtccatttgaaactcttcaagctgactgggtgtaaatgtttccaccaatgtctacttcattgtatggggcctttagaggattcagtttgaggttcatatttttgctatataaaatactgactttcccaaagatttcctttatcctctaggataaaactccaacgtctcagtcttcaaaatggcatacctcaaataaaagaactcattatttgttcagaaccaacagcaaccaaattaattttaatctcttaagtcacctttaaaaaaaagaagaaagatgatattaatgttttgattttcaagcatttcttggccaacgattcagtgtgatgaaacaa

SEQ ID NO: 12623 - DNA, 418 bp, Homo sapiens
caaagcctcccctacccccacctcaccggggccccgccgggaacctggggcccccctggggactacccagatcgtgggggtcctccctgcaagcccccagcacctgaagatgaggatgaggcatggcggcagcgacgaaagcagtcgtcatctgagatttccctggcagtggagcgggcccggcgacggcgagaagaagaggagcggcgcatgcaagaagagcgccgggcagcctgtgctgagaagctcaagcgactcgatgaaaagtttggggcacctgacaagcggctcaaagcagagcctgctgccccacctgctgccccttctaccccagctccaccacctgcagtccctaaagaactccctgcacctccagctccacctccagcatcagcccgaccaataaacctgcttttct

SEQ ID NO: 12624 - DNA, 507 bp, Homo sapiens
ttttttttttttttggggaagaataaactttattggcccacagaagggatgagggaacgagaaggggctagggataagaatgaataaaagtggaaaaactaaaacagaatgatttaaaatgtgcaaatacactttgcaacctccaccattcaatttagggattgatatgtatgtacagtgagatccatgtaggctaaagtgagtttcactttgtagttgatgctacttgtaccagttctatcattagtaagtcaccgtttaattctgccaaaatcagacaaggatctttctggttagtgcaaacaaggttttccatcctgggctgcagtctgacccgccagtgctcagtaggcatgcttgtgatgaattcgcacactttccagttccccacctccaatggcggccagggtctccagcctgtttaagcgctccaagcttcttccaagaacttcttctagccgactgcgtaacacctgagccccttccagttccacctgcagagttcgg

SEQ ID NO: 12625 - DNA, 663 bp, Homo sapiens
tttttttttttttcaaatcacatatggcttctttgaccccatcaaataactttattcacacaaacgtcccttaatttacaaagcctcagtcattcatacacattaggggatccacagtgttcaaggaacttaaatataatgtatcataccaacccaagtaaaccaagtacaaaaaatattcatataaagttgttcacacgtaggtcctaggattaccagcttctgtgcaaaaaaaggaaatgaagaaaaatagatttattaactagtattggaaactaactttgtgcctggcttaaaacctccctcacgctcgtctgtcccacacaaatgtttaagaagtcactgcaatgtactccccggctctgatgaaaagaagcccctggcacaaaagattccagtgcccctgaagaggctcccttcctcctgtgggctctcctagaaaaccagcgggacggcctccctgctgataccgtctataaccttagggggccctcgggcaggcaacggcagtggactcatctcggtgatggctgtagatgctaacactggccaattcaatgccacacctactggttaccctttgagggcatttctccagacagaagccccttgaagcctaggtagggcaggatcagagatacacccgtgttgtctcgaagggct

SEQ ID NO: 12626 - DNA, 383 bp, Homo sapiens
aaaatgtacagcatgagactccaaaagattatctggatgggtgactgaacatcgttattatgacttagatgcttttaccttatctaacatgtaagagtcaaaatcaaacttgcctggaatggcttctatttcccatagctttctacctatctacttggcattttccctttgtgttgtgactattaaattcctatttaaaagaaaatgattgtgggcaattctcgcccttcacttttgcttttaaaagaaaaggccacaaaggagagtatattggcaaatacccagttctgttctgcctccccttccttcactgccaaaaagcttcctctgaagaacccatcctgtgtcatagcagtgctactttacatttatatagttctatg

SEQ ID NO: 12627 - DNA, 508 bp, Homo sapiens
tttttttttaaaaaggaggtagaaaagggtaggaggaggcaggcattaagaaacatttaaggaccaatacacagtctaaggccaaatgaacttgtgaagcctactgattttggaaaaaatcttcattttggtgggtaacttgaattattaatataaaataaaattaaggcatacagagaaaaggcactactaaaaattaacaattggattgcttttcattaacatttaaccaatcttaaaattcaaataaatatgaacattacatttgtaaaacaaaggccaaacttagtaataaaacagtatgatctcaaggaactgtcctgatcttagtataaataacactgttgacagagttcaatttctatcaaatgttttgggtattttcacaatttagaccaaaataaagtatgttttctttaaaagagacactggggaaaaaaaaaaaaaagaacaaaaaaacactgttatggaataaatgctccccatcaccagaactgttgagtagagg

SEQ ID NO: 12628 - DNA, 848 bp, Homo sapiens
ttatggatattttaactggaattgcagttctgatttttatgttgtgtttcattaaggcagtttttgaagttgatctcaatgaagaccagagagaacaaagttcatgttcacttgtttgtctgccagctctggaagttatggatacagtttccttatgcaaatagaataaactttcttcctgttatcaaaaagtcttggggctaaaatatttcatacttggtccttgcctcaaactatttgttatgaatatagaacagtgttccatgtatggaaaaatagctgcttcttaaatttccaaattcactaattcactgttccaaatccaaggcttgtcttttcagtaatggcttttccttcttttttttttttctttctctctaaaacagatagtctgtactactaaaagttaaatgcttaacatggtgcagttctcaaagttataatgtatctggatactgaataatttgaatattactaatttgtcattttttgcatgtaagcagatagctaggatacgttctcataatgatttgtcatttaaaaatatacattttttattgagtatgaatcagattgtctgaaataggtactagtacaaggctatgaagagcatttctagtttcttattatatatattaccaattggcttcctaaaagtggtgacacttttactggatacacatagtaatcattttactatggatatggcatagtagttacatcttttggcttctagttgattactttttttttccctgcaaatttgggttttgattacttgagcatagtgatcaaaaaagatcactgggcatccatataccgtttcattaatgattaatggactacaa

SEQ ID NO: 12629 - DNA, 714 bp, Homo sapiens
cccgggcctgcagcggtggtcggctgttgggtgtggagtttcccagcgcccctcgggtccgaccctttgagcgttctgctccggcgccagctaacctcgctcctcggcgccatgaccacaaccaccaccttcaagggagtcgaccccaacagcaggaatagctcccgagttttgcggcctccaggtggtggatccaatttttcattaggttttgatgaaccaacagaacaacctgtgaggaagaacaaaatggcctctaatatctttgggacacctgaagaaaatcaagcttcttgggccaagtcagcaggtgccaagtctagtggtggcagggaagacttggagtcatctggactgcagagaaggaactcctctgaagcaagctccggagacttcttagatctgaagggagaaggtgatattcatgaaaatgtggacacagacttgccaggcagcctggggcagagtgaagagaagcccgtgcctgctgcgcctgtgcccagcccggtggccccggccccagtgccatccagaagaaatccccctggcggcaagtccagcctcgtcttgggttagctctgactgtcctgaacgctgtcgttctgtctgtttcctccatgcttgtgaactgcacaacttgagcctgactgtacatctcttggatttgtttcattaaaaagaagcactttatgtactgctgtctttttttttttt

SEQ ID NO: 12630 - DNA, 1064 bp, Homo sapiens
gccgttctgcccctaggtgagtttgatcctgtgtctgatcccatctgcaccctgactgggcagtccctacagaaccagtgttaatttgaagggcctccactcaggctccaaatgtggcagccaaagagaacaatccagggaacctacatttatttttaaggacaaatatttcctcctcagtggtcctaatgttcagggctttagagggaaccgaggtggtctcttcaccctgtgtcctagaatgggagagtaagtagacagtggtgataaccccacactgcttataagtgcatctttatagtatttggggctttcctacccctttagccttctgtacctagtaccatattccagttttaaagaactggcagaatgtgatggataacagaggaagagctcaatttatgtttattggaagaacattttacttaaatgatttgaggggtgggagggagtgaactactgagtttgccagagtgaaaatccatctgaaaaactcagctacctttagtttttagtcctcatttttggtcttgtctctgcggactgtgaagaatcacaatgctctatatgccctggactgtgtggcaaatgcaggttgcagcgtgtgtgttacatgaggatcttccacaatttcagaatgcacgccagagctgaagggggaaacttggtaacttgcccattattctctgcttttagccagagttaaacagactgatgggtctggtagccaacaacttggcaacttccactccttctcacctcgtgagattaagggctgtgaaaagaaatctagtctaactccaacagaaatctgtctctgttaagtgttttaccttctgtaagtagagatggtagagccaagatttttcttttggtaatttccctgtctataaagtgagaccaaagggatatctgttccctgttacctttttggagaattcataacatttgaagatcaaaaaattgaatgataaatatgaatggcttttcaattctgtggactttgtaccatttggcttcaccttgtactgcaagatgaatttgtaaacaaaacaaaattg

SEQ ID NO: 12631 - DNA, 1166 bp, Homo sapiens
gtaatgccttaatcatctttttgaatgttttctcagagctggaggttgctgggcacctaaatgatgtttcatgatagctttgggtgattttactgctatttataatttgctgtataaagtgagcattacttaatttgcaagctgatgtctcacagtgtaaatttgttcattcctgggtagtctattttctataaaaatgtatttttgcacaacatttttaaaaactggtgtaccttcatctatgacgtgttccattttgacaaacagctttcaggcgtaaatccagagaagtgctttatatgaaatgtattattttgaacagagtttgtgatttggtagttattttatgttgttgaaatttgaatttcacaattcttagataattatttcaaatggatattgatgcattcttgttaccagatgtttggcccattccattttgatgaaacagagctgttgttttggaagtcattatttttctagaaatggcgaatcttttaaagaaaattacttaatggaaggttgtgggaaggtgtttttttgtgttttttttttggtttttgttttgtttttcctcttttaagggatagtagcaggtcttacttgaatgaaagtctgatatttgctgatggcagaatgattattctggtaccctggttgatgtgtagagtagattgtctggtgctctcagttgtttttatttacatttgtcacgttgttgtaagagaatgttaacatggtataaaactctgtgacaagataagcctcctgctttatataacttcttgaatccagctaagagatttataaactaatggcataaatgtctggagccaaccttggcagttatagcaggagaacactgtcttaatatttcctttacattcctttcaaaaggcaaaataggattgccctgtattgatgtagaaatgtctgtaaacagagcttgtatggtttgctgggtcaaacaatgtttccaacttaaaatcaatctcattgccactttaactacttttagtcatatttattaagtaatgcagtttgtactttttttatttcgtaacattttgtgatttttttgtacaaaactgtatttgtacaatagagcaattcccagctgatggaatgaatgaataaaatgcaaaattatacttttaaaaaaaaaa

SEQ ID NO: 12632 - DNA, 597 bp, Homo sapiens
gtggatcctccccgtctttaccttcccaaagggttgggattaacaggcctgagccactgcacccagtcccattttacttaaatatcaaattcaaatcttcagtgttctacttattttgggtgttaattccattatacaccgtcttatttcattaatttccatattgtgccagacaagatataaaaataattcaactccagtcaataataccatctgtcttcatgtgaccaggatgaaaagcttctgctcccaacatggaagccacagtaagaaaagaatctgtctaatccactagcaacaagcagttaatactgtagttcggaataatactaggacattaacattctaattccagcaaacaaggactgactcttttcaaaattcaactttggttaagaaatgctgagtacaactttggttaagaaacactgaggtcatggataaagagtcacagatgccgatgccaagggtacagacactgacaaaagtagccccaataagatggcaggatttgggggtggtgtctttccttcaataacaaatgcgttcagaaggttcaggagcatgatttagtttttctcaaaatgtcatgacatc

SEQ ID NO: 12633 - DNA, 600 bp, Homo sapiens
  misc_feature (1)...(600): n = a,t,c or g
ggagctagcaccatgagcttcaataccctgttggtctntgttctctcccttggagctgggaaatgaaaaaggaggagagacccacagatagagagaacagagacttggggtctgttcccctctcttcccagctccaagctggcctctgcctgtctgaanaggtgtctgtgcagggccttgaatgccaggctgagggcttaagctttacgcagaaggcagcagcaagccccaaaaagctgagaaaattcaagcagcagcaaggtcctgggcagcacagatgtgcgctgtanaaagggccctgtgannnnnnnnnnnnnnnnnnnnnnnnnnnnnnnnnnnnnnnnnnnnnnnnnnnnnnnnnnnnnnnnnnnnnnnnnnnnnnnnnnnnnnnnnnnnnnnnnnnnnnnnnnnnnnnnnnnnnnnnnnnnnnnnnnnnnnnnnnnnnnnnnnnnnnnnnnnnnnnnnnnnnnnnnnnnnnnnnnnnnnnnnnnnnnnnnnnnnnnnnnnnnnnnnnnnnnnnnnnnnnnnnnnnnnnnnnnnnnnnnnnnnnnnnnanccttancgacagaatgaaaattcttgtcttaaaaaaaaaaaaaa

SEQ ID NO: 12634 - DNA, 1725 bp, Homo sapiens
tcatgaaagccactgactttattgatctaaaaaactttacaaggacagtgactgttctgccaaaaaaggagccaaatggtatcaaacggattgaaagtgagggtgggggtgagggatggggccgggaatccattcaggaaagctggtaactgtcaccagggaactggcaagggaaaaaggacgggggaggcatgcaagagcgagaatccaaaaaaaagttgaaatggttaggggagaaaactccccaaaagaccccggagtacgtcggaggtgagtacgacaatagcaatcttttccttcgtagaggacaggggaggagtccctactcggctgcaaactctggatgagggctggggattgagagcttcccagagagcatcacaagaaggcgtcgcaccactctcgaaggcatccgaagcagtcccgggactgcttggcgttggccgcccacaagtgtctttcagccattcccggaagaggtcttcatctttctttagcaccagaaactggccaaggacaacataggccttgtcaaaacccctttcctccagcttcttgcccaggacttcaccaatcccagccaggctccccactggcttctcccccatgggctctgccacgaagtctcggtgcttttgggaggttgtcatcttgatcaggcttaatctcaagccactagaactttcttccacttccgcttccgggtcgcttcaagagccgcctttaaaaaagaaacattccacgttgggcacttctagccagttagagctatagagttgaggcgccccggacctcgacggcgtccttagtaggcgctcctttccggtccttcgcgggaagcgctgccttctaaggtctcgcttctcgcgccgttctgagggagataggcctccagggagaggacttcctttctctgctgcccggacccggaactcaaggacttaggcttgacggacctggcgtggggaagagttagaagacggacaagggaggggacgggaggcctccgagacagcgccggaagtacggttttcggagggatcagactcagactcacgtcgcactcctcgcagttggactggtgggaactgggaacactggagacctgatttctaactgacgctaccgtcgcggccgccggcaagttcctttactgtgttttcttggttcagccttgaagtgagtcgtggacgatcctctctcagcgtccagcctagacggcggtgttgctccggcagcgttcctgggagccgagggccagagactaagtaacagtcctgggttctgagcctgccatccaaggaactcaggaggaggagttgacagtctcttcgttcctaaccagtgtgggacgacttcagcatgtctcaggccaccaagaggaagcatgtggtgaaggaggtgctaggggagcacatagtgccctccgaccagcagcagattgtcagggtactcaggaccccagggaacaatctgcatgaggtggagacagcccaagggcagcgcttcctggtgagcatgccctccaaataccgcaagaacatctggatcaagagaggggactttctcattgttgaccccattgaagagggagaaaaggtgaaggctgaaatctcgtttgtgctctgcaaggaccacgtgcgctctctgcagaaggaggggttttggcctgaggccttctctgaagtggctgagaaacacaacaacaggaacagacaaactcaa

SEQ ID NO: 12635 - DNA, 1688 bp, Homo sapiens
tttttttgataacatcaaatttggtttatttcaagtttgtaacaaaatatattctaggcaacttttcagacattgttttatagcatcataaaccccataccactgctgtcattccaaaagctgccaggacactggaagttatcaagtggtccagcccaggaatacaggtagaattcacatgataggtgataagaaagcaatgtctgtgggccactctgatccctctttttaccttggtaggtaaggtatgatcttaagactatatgtactgagtcctattagtcagtgaaaaagattaaagtgacaagttatgtgctttgttcctatagctttgaagttcatccacctcaccagcaattggaaggtctcaggtcttgcaggctctacccatgtgtaatcctggggcaggtgtgaatcttgatttttttaagagattactcaagggagagaacaacagaaacggaagccatgagtactgccccaattctagattaggttagaggttagaataaattaactaatggggagtggtagtgggtagcagtcagacccaggagacagatttgtgtggtttcctgatctcagcaaggtctaaggaaaaaagcctccccgcccccccaccttaaatagtggcatcaagtcatgaaggccagtgaaacgtggttagtctcgtaaaatgacttccagttcttccaggtccttctggatagccaaatcctccttcgtgacatctggcagctccagggccaacttcatccaccatctagcttcagagtttttccctagttctctgtagcacttggaaatatatacccttcctgctttggaaaatcctggctgtagttcttcagcctttaggaagctctggagggcatcttccacagtggcactgagagggctttcaagcaaggctgtagcagtttttttttctagccagctcaggtgagagacctgatagcaccacctgccaagaagaaagtgagccatggggttttctggctggagagcaatggctttgtccacatgctccttgaaagttaaagccactctggatgcgcctctggatgctctcatgctcagccagctgaccacaaagcaccggcataccacaggtgacagtcagcactctcatcccccttctccagagcagcctctgcttcttcttttccatctagggcatatgacttcttctcgctcacctcctcagtgagctcacacatgtcactgtaggctcgggccaggcgccagagaaagtcctgccggcttccatacaccagcttgttgttgagcagcagctggaagccctcccgcttgccttgctcatcacccctgtgcagctcgtcggcctgctgcaggaggggcagcacatcctccaagcctgaggaacctccagcctcccagggcactggaggcacctgaagctgcctcttcctccaagtcaagagaatcctttctccccatcttcacagtctcacagctcacttcatcttccccgtcctcactttctttgtcagagtcccgctcattgtcagactccgcattggctgttgtgtaacccccttcactctcagcatctgtgaacgtggctcccgaggaggccgtgaagtagacagagctggagccagtggagtcactcctctcccggacaaatggaaaccttcgccgccgagccactctctggttctctt

SEQ ID NO: 12636 - DNA, 1012 bp, Homo sapiens
gaatctttgattcttcctggaataataagtattcatcctgttgtaagaaacctggctgttttatgcttgggatgctgtggactacagaatcaggattttgcaaggaaacacttcgtattactattgcaggttttgcaaattgatgatgtcacaataaaaataagtgctttaaaggcaatctttgaccaactgatgacgttcgggattgaaccatttaaaactaaaaaaatcaaaacacttcattgtgaaggtacagaaataaacagtgatgatgagcaagaatcaaaagaagttgaagagactgctacagctaagaatgttctgaaactcctttctgatttcttagatagtgaggtatctgaacttaggactggagctgcagaaggactagccaagctgatgttctctgggcttttggtcagcagcaggattctttctcgtcttattttgttatggtacaatcctgtgactgaagaggatgttcaacttcgacattgcctaggcgtgttcttccccgtgtttgcttatgcaagcaggactaatcaggaatgctttgaagaagcttttcttccaaccctgcaaacactggccaatgcccctgcatcttctcctttagctgaaattgatatcacaaatgttgctgagttacttgtagatttgacaagaccaagtggattaaatcctcaggccaagacttcccaagattatcaggccttaacagtacatgacaatttggctatgaaaatttgcaatgagatcttaacaagtccgtgctcgccagaaattcgagtctatacaaaagccttgagttctttagaactcagtagccatcttgcaaaagatcttctggttctattgaatgagattctggagcaagtaaaagataggacatgtctgagagctttggagaaaatcaagattcagttagaaaaaggaaataaagaatttggtgaccaagctgaagcagcacaggatgccaccttgactacaactactttccaaaatgaagatg

SEQ ID NO: 12637 - DNA, 439 bp, Homo sapiens
gagactattttgtccagcttcctttcatacaagagaggttagggaccggcctaaagacatacatttggcaactccataccaaggcctagatcatgattcagatggctccatcctctagagaggcatctttctcagctgcaacctagttcttttcctgccgcattattatgtctaacacattgtaaactgagagagggtgcacctagcatcactaccccagggagtgcctgtctctaggacaggtacaccaggattcttggaattttttttctaatgttgataaagtaatctggagcaacaacttgagtagtgacactaaatgtgaagaaaggactgtcaccttggcagagggtgcttctgtcaaccttatgaagagtttattgggacctgcaacagggctgaatgagtaaacaaaatgactgtcctacaatggaaagag

SEQ ID NO: 12638 - DNA, 959 bp, Homo sapiens
gcattagggctcggaggctgtgcggtctgccaggagctgcggccccgtccggcccgggctggcatgggttggaattggagcctatcccccaacccgaaggctaacagcatcatgtggttactaactgttcctcattcaccggttgatgcctcccagaaaaaaacgccgccagccttcccagaaagccccgctgctgttccaccaacaaccactggagggccccaaacacagctgtgcatctacacagcttcccatcactcacactcgacaggtgcccagcaagcccattgaccacagcaccatcacttcctgggtatcacctgattttgatacaagcagcaggaagcttggttcccagcctaccagaaacaccaaaaccgggcgagacacttcaaagtcgaaaacctaccacctccaagtttccacatctaacttttgagagtccgcaatcttccagttcagagacattgggggatccccttaatccgagagtgccccagtgaatcagaaaaggatgtttccagaagacccttagttccagtgctcagtccccaaagctgtgggaacatgtcagtgcaggcacttcagagcttaccttatgtgttcattccacctgatatccagaccccagagtcatcgtctgtgaaggaagaactcattccccaagatcagaaggaaaacagccttctaagctgcactcttcacactggcactcctaatagcccagagcctggacctgttctggttaaagacacccccgaggacaagtatggaataaaggtcacatggaggagacgacagcacctgcttgcttacctcagggagagagggaagctgagcagaagccaattccttgtgaaaagctgactgccatcagtaatctcaatagaaaagagatatgttttctggagtcataaaggaattcaattcctagggaaaaaaaaataaaaaaaaaaaat

SEQ ID NO: 12639 - DNA, 853 bp, Homo sapiens
ggtctttcccatctggcggccgcggctcctgtccagaccctgaccctccctcccaaggctcaaccgtcccccaacaaccgccagccttgtactgatgtcggctgcgagagcctcgtgcttaagtaagaatcaggccttattggagacattcaagcaaaggttggacaactacttttccagaacagaaaggaaactcatgcatcagaaaaggtttcagggatataatcagaaggtgactaataaaggtaccagaagaatatggctgcacaaataccagaatctgatcagataaaacagtttaagggaatttctggggacctacaataaacttacagagacctgctttttggactgtgttaaagacttcacaacaagagaagtaaaacctgaagagaccacctgttcagaacattgcttacagaaatatttaaaaatgacacaaagaatatccatgagatttcaggaatatcatattcagcagaatgaagccctggcagccaaagcaggactccttggccaaccacgatagagaagtcctgatggatgaacttttgatgaaagattgccaacagctgctttattggaaatgaggactcatctgatagaatcccctgaaagcagtagccaccatgttcaaccatctgtcatgactgtttggcaaatggaaaccgctggagaaacaaaattgctatttaccaggaataatcacaatagaaggtcttattgttcagtgaaataataagatgcaacatttgttgaggccttatgattcagcagcttggtcacttgattagaaaaataaaccattgtttcttcaattgtgactggttaattttaaagcaacttatgtgtt

SEQ ID NO: 12640 - DNA, 1792 bp, Homo sapiens
aattcggcacgatgggggcaacaaagctatggagcagctatggacagcagagtagctatggtcaacaaagcagctatgggcaacagcctcccactggttatactactccaactgccccccaggcatacagccagcctgtccaggggtatggcactggtgcttatgataccaccactgctacagtcaccaccacccaggcctcctatgcagctcagtctgcatatggcactcagcctgcttatccagcctatgggcagcagccagcagccactgcacctacaagaccgcaggatggaaacaagcccactgagactagtcaacctcaatctagcacagggggttacaaccagcccagcctaggatatggacagagtaactacagttatccccaggtacctgggagctaccccatgcagccagtcactgcacctccatcctaccctcctaccagctattcctctacacagccgactagttatgatcagagcagttactctcagcagaacacctatgggcaaccgagcagctatggacagcagagtagctatggtcaacaaagcagctatgggcagcagcctcccactagttacccaccccaaactggatcctacagccaagctccaagtcaatatagccaacagagcagcagctacgggcagcagagttcattccgacaggaccaccccagtagcatgggtgtttatgggcaggagtctggaggattttccggaccaggagagaaccggagcttgagtgggccttgataaccggggcaggggaagagggggttttgttccttggaggcttgagcagaggtgggcggggaggaggacgcggtggaatgggcagcgctggagagcgaggtggcttcaataagcctggtggacccatggatgaaggaccagatcttgatctaggcccacctgtagatccagatgaagactctgacaacagtgcaatttatgtacaaggattaaatgacagtgtgactctagatgatctggcagacttctttaagcagtgtggggttgttaagatgaacaagagaactgggcaacccatgatccacatctacctggacaaggaaacaggaaagcccaaaggcgatgccacagtgtcctatgaagacccacccactgccaaggctgccgtggaatggtttgatgggaaagattttcaagggagcaaacttaaagtctcccttgctcggaagaagcctccaatgaacagtatgcggggtggtctgccaccccgtgagggcagaggcatgccaccaccactccgtggaggtccaggaggcccaggaggtcctgggggacccatgggtcgcatgggaggccgtggaggagatagaggaggcttccctccaagaggaccccggggttcccgagggaacccctctggaggaggaaacgtccagcaccgagctggagactggcagtgtcccaatccgggttgtggaaaccagaacttcgcctggagaacagagtgcaaccagtgtaaggccccaaacgctgaaggcttcctcccgccaccctttccgcccccgggtggtgatcgtggcagaggtggccctggtggcatgccggggaggaagaggtggcctcatggatcgtggtggtcccggtggaatgttcagaggtggccgtggtggagacagaggtggcttccgtggtggccggggccatggaccgaggtggctttggtggaggaagaacgaagcgctggggggcccccctgggacctttgatggaacagatgggaggaagaagaggaggacgtggaggacctg

SEQ ID NO: 12641 - DNA, 1820 bp, Homo sapiens
ccaggcgtcggtgctcagcggtgttggaacttcgttgcttgcttgcctgtgcgcgcgtgcgcggacatggcctcaaacgattatacccaacaagcaacccaaagctatggggcctaccccacccagcccgggcagggctattcccagcagagcagtcagccctacggacagcagagttacagtggttatagccagtccacggacacttcaggctatggccagagcagctattcttcttatggccagagccagaacacaggctatggaactcagtcaactccccagggatatggctcgactggcggctatggcagtagccagagctcccaatcgtcttacgggcagcagtcctcctatcctgggctatggccagcagccagctcccagcagcacctcgggaagttacggtagcagttctcagagcagcagctatgggcagccccagagtgggagctacagccagcagcctagctatggtggacagcagcaaagctatggacagcagcaaagctataatccccctcagggctatggacagcagaaccagtacaacagcagcagtggtggtggaggtggaggtggaggtggaggtaactatggccaagatcaatcctccatgagtagtggtggtggcagtggtggcggttatggcaatcaagaccagagtggtggaggtggcagcggtggctatggacagcaggaccgtggaggccgcggcaggggtggcagtggtggcggcggcggcggcggcggtggtggttacaaccgcagcagtggtggctatgaacccagaggtcgtggaggtggccgtggaggcagaggtggcatgggcggaagtgaccgtggtggcttcaataaatttggtggccctcgggaccaaggatcacgtcatgactccgaacaggataattcagacaacaacaccatctttgtgcaaggcctgggtgagaatgttacaattgagtctgtggctgattacttcaagcagattggtattattaagacaaacaagaaaacgggacagcccatgattaatttgtacacagacagggaaactggcaagctgaagggagaggcaacggtctcttttgatgacccaccttcagctaaagcagctattgactggtttgatggtaaagaattctccggaaatcctatcaaggtctcatttgctactcgccgggcagactttaatcggggtggtggcaatggtcgtggaggccgagggcgaggaggacccatgggccgtggaggctatggaggtggtggcagtggtggtggtggccgaggaggatttcccagtggaggtggtggcggtggaggacagcagcgagctggtgactggaagtgtcctaatcccacctgtgagaatatgaacttctcttggaggaatgaatgcaaccagtgtaaggcccctaaaccagatggcccaggagggggaccaggtggctctcacatggggggtaactacggggatgatcgtcgtggtggcagaggaggctatgatcgaggcggctaccggggccgcggcggggaccgtggaggcttccgagggggccggggtggtggggacagaggtggctttggccctggcaagatggattccaggggtgagcacagacaggatcgcagggagaggccgtattaattagcctggctccccaggttctggaacagctttttgtcctgtacccagtgttaccctcgttattttgtaaccttccaattcctgatcacccaagggtttttttgtgtcggactatgtaattgtaactatacctctggttcccattaaaagtgaccattttagttaaaaaaaa

SEQ ID NO: 12642 - DNA, 748 bp, Homo sapiens
  misc_feature (1)...(748): n = a,t,c or g
ggggctctgttctgtagtatgtgccaatgttgatcagggatatcatgatgtaaatatacacccagctctgtgtcctacaccatatgagactgatgttccttataatgaaccagagccattaaatggtttatgtttcatatacggtacttcatttacagagacaaacaaatgtaagaaatatccatacggcaatgtgtaagtattttaaaagttactttttatccagaagatctcaatctgcaaatacttaacaaggtcaggcatcatgggagatatttaaaaaacatgtgtgtgcctttgagccgtttactaagttgagaccaaacatatacaaatgggaagttgactctcagtaccaggcagtacaggccaactgcttatagacagtaactgctgtggacttcagggatggccagcttcctaggatcttaggtagtccggaaatcttttcaggttcttgagctggcctaagcaggatttaggtgggctcaacataatgccagatctgcagaaacattgtcttttgccctttgggaagttgcagtgtgtgacctgctctcataaactcctccccaaaacaggcttatgcacttagcagtaatagattgaaccatcaactccttaaagcacacctggttgataattagctcaatcacattgtgtttcggcattacccttggtttccaaggatgagtttattcatctccacattaaagtgagtgccncatgaccaaaactcacagataga

SEQ ID NO: 12643 - DNA, 522 bp, Homo sapiens
caagaatgcctgaataaattttccacccgggattatatcatggaaccctccatcttcaacactctgaagaggtatgtgagaaaggtgtctgtattgggaggaggctgggggtaatttagagaaagttttgtaatacacccagaaggtgctatgtaaagcaagagtaacgcgaactgaactaaaggcttcaagggggggtcccaatacagacacctttctcacatacctcttcagagtgttgaagatggagggttccatgatataatcccgggtggaaaatttatgcaggcattcttgctgaacctccgcatcatcctctccttctccagaatcatcctcctgctgttggtaaatgcgaagagccaggatatttttttcattaatacaaataccctaatctcaccttaaatcgtataatgctgcccattttgaaagtattctacacacattatttcatttgactttcatgacaatttcatgaaatgggctggacagatagtgagtggctaggaaaaatgggat

SEQ ID NO: 12644 - DNA, 633 bp, Homo sapiens
ttttttttacgatagatcacagttttttattcttaatgtcacaagcaggagaaaaatctcacattcatactaaaaattccaactagactcaacaggaatgaagtctctatttgtaatggaaagtcccagcctcccgctgccgtccagtgtgtgtactgtacacatccacactcactctcactcagggttcccggaccgggctgtcctgcctgcggaactgaggtaaacaagctcaggtactgacactaggagggtctaccttacataaggtacaggtagaagcttgattgattgctaggcccaggcccacccagaccctccaatcctaacaggtatttaggcttgaggttcactccctcctcagctgcacacgcagccaggtataacactcgccctcagtcacaacggggagggggcaccggttacatctacatcacattatttataaaataagaattacatttcatataacatggccagaaggagctctagtcccccaggaaagctgccggggacagcatttgagcctcttctttgcacaggcataacttaactatacagctaattcctagttaatagcatttatacttaaccacctcaatgaaccaagcttgaaggaatttaaaaggcaat

SEQ ID NO: 12645 - DNA, 1010 bp, Homo sapiens
gcagccctccacctcccagccaagatctgtcttccttcatggtgcctccagggagccttcctggtcccaggacctctggtggagggccatggcgtggaccttcacccttctggactgtgtggccatgctggtcatcggcttgcccaggctccagcctctccagattctgaggggtctcagcccaccgcccttggtgccttctttgtagagcccaccgctacctccctctccccgttggatgtccattccattccccaggtgcctccttcccaactgggggtggttaaagggagccccactgctgctacctggggaatggggcacctgggggccaaggcagagggaagggggtcctcccgattagggtcgagtgtcagcctgggttctatcctttggtgcagccccattgccttttcccttcaggctctgttgctccctcctctgcagctgcacgaaggcgccatctggtgtctgcatgggtgttggcagcctgggagtgatcactgcacgcccatcgtgcacacctgcccatcgtgcacacccacccatggtgcacacctgtagtcctccatgaggacatgggaaggtaggagttgccgccctgggggagggtcccgggctgctcacctctccccttctgctgagcttctgcgcacccctccctggaacttagccatactgtgtgacctgcctctgaaaccagggtgccaggggcactgccttctcacagctggccttgccccgtccaccctgtgctgcttcccttcacagcattaaccttccagtctgggtcccactgagcctcaagctggaaggagcccctgcgggaggtgggtggggttgggtggctgctttcccagaggcctgagccagaaccatccccatttcttttgtggtatctccccctaccacaaaccaggctggaacccaagccccttcctccacagctgccttcagtgggtagaatggggccagggccaggtttggccttaggtttagggagggccctg

SEQ ID NO: 12646 - DNA, 1770 bp, Homo sapiens
cccacgcgtccggctctcggcacaagcatgtacggcaaaggcaagagtaacagcagcgccgtcccgtccgacagccaggcccgggagaagttagcactctacgtatatgaatatctgctccatgtaggagctcagaaatcagctcaaacatttttatcagagataagatgggaaaaaaacatcacattgggggaaccaccaggattcttacattcttggtggtgtgtattttgggatctctactgtgcagctccagagagacgtgaaacatgtgaacactcaagtgaagcaaaagccttccatgattacagtgctgcagcagcttcccagtccagtgctagggaaacattcccccagggagatggcatgccagtaggtcctgttaccaccagggttctttcagccttttatgtcacctcggtaccctggaggtccaagggcccccattgaggatacctaatcaggcacttggaggtgtcccaggaagtcagccattactccccagtggaatggatccaactcgacaacaaggacatccaaatatgggtgggccaatgcagagaatgactcctccaagaggaatgggtgcccttaggaccacagaactatggaggtgcaatgagacccccactgaatgctttaggtggccctggaatgcctggaatgaacatgggtccaggtggtggtagaccttggccaaacccaacaaatgccaattcaataccatactcctcagcatctcctgggaattatgtaggtcctccaggaggtggagggccaccaggaacacccatcatgcctagtccagcagattcaaccaactctggtgataacatgtatactttaatgaatgcagtacctcctggacctaacagacctaattttccaatgggtcctgggtcagatggtcccatgggtggattaggaggaatggagtcacatcacatgaatggctctttaggctcaggagatatggacagtatttccaagaattctcccaataatatgagcctgagtaatcaaccgggcactccaagggatgatggcgaaatggggggaaatttcttaaatccttttcagagtgagagttactcccctagcatgacaatgagcgtgtgatccattaccaagtctcctcatgaaaaccacagtgagtcagcccttcacagaactactacggaagaaaattattcatcacagtgtacagttaaacaaaggaatctcagtcacaccaaaccaacctttttatttcctgctctctcccctcttttgtgaagaaagcgggtccaaatgtgattcaaacaactgtacggagtggcatattagaattgccctaaactgaactgcaaataattatgtgtgtatgtatatgtgtgggaaagagaatgtactgtatatgtgtatgttatacagacatatacacatacatacattgacccacaggacattgtaaaatattatcacatgacatcttaagtagaaataagtagggacttttattccatcctttttttcacgtttacattttaattattacaagttgctcctgccccctccctgaactattttgtgctgtgtatatcactgctttatataagttattttttaaggtgaactcagatgttatggttttgtaaatgtctgcaatcatggataggaataaaatcgcttatttgagagctttcattaaattgcgtctgatgcaagttatcctgtgaatcacaaagtgtactgtctcaaaaaatagaagaaaatgtgtcttcgtcttta

SEQ ID NO: 12647 - DNA, 522 bp, Homo sapiens
cgtcggtccccgggggatgtggagagctggcagcatgtcggccgagctgggagtcgggtgcgcattgcggcggtgaacgagcgcgtgcagcaggctgtggcgcggcggccgctggggatctcccagccatccagccccggctagtggcggtcagcaaaaccaaacctgcagacatggtgatcgaggcctatggacatgggcagcgcacttttggcgagaactacgttcaggaactgctagaaaaagcatcaaatcccaaaattctgtctttgtgtcctgagatcaaatggcacttcattggccacctacagaaacaaaatgtcaacaaattgatgggaaagtctgagttcttaataaaaagagaaaacatcatgccaagaacagaatgaattcaccattttctgggttatatatacttggaaacctacccaacctcatgtttattattatttggtggtctttcagaaaaattataaagaattgtagcccataaatttttttaactagcaaaagagacatttc

SEQ ID NO: 12648 - DNA, 2393 bp, Homo sapiens
tgaagcggttgggaaagtgtcggtttatcttcgcgccccttgcgttcttgccgcggcttgcctgggcaggtaaagcgcgattgcgagagctcggcaaccctgccgactcagccggaaccggctcccggcccgaggggcgtggtgtcctggtgctccgactccttccgcaggctccttgggacccgcggttccgggagtcccttgctcagggtccctttcctgcagtgaggcgccgtccgccttccctgtgtccccgcagacccccatcatgggcaataccagcagtgagcgcgccgcttgggaagcggattggtgggccataagacgccccggagatcaagcttcggggggcaacaaggacggggacaggcccaagatcctgatggacagccccgaagacgccgacctcttccactccgaggaaatcaaggcaccagagaaggaggaattcctggcctggcagcatgatctggaagtgaatgataaagctcccgcccaggctcggccaacggtgtttcgatggacggggggcggaaaggaagtttacttatctgggttccttcaacaactggagtaaacttcccctcaccagaagccacaataactttgtagccatcctggatctgccggaaggagagcatcagtacaagttctttgtggatggtcagtggacgcacgacccttccgagcccatagtaaccagccagcttggcacagttaacaacatcattcaagtgaagaaaactgactttgaagtatttgatgctttaatggtggattcccaaaagtgctccgatgtgtctgagctgtccagttctcccccaggaccctaccatcaggagccctacgtctgcaaacccgaagagcgctttcgggcaccccctattctccccccacatctcctccaggtcatcctgaacaaggacacggggatttcctgtgatccagctttgcttcctgagcccaatcacgtcatgctgaaccacctatacgcgctgtctatcaaggatggagtgatggtgctcagcgcaacccaccggtacaagaagaagtacgtcaccaccttgttatacaagcccatatgaagagctgggggcggatggtggcccaggagacagcacaccaccaggctccacacgtgcatgctttccccaagagggaatggactgtacattgctcatttcacactcttcagaagacatttcatacctgccctggtcctgcttgaaggtttgtcccaggcagagcagctcctgcagcgcctcggtctgtgacagtcctcctagcacccccatggctttgagcctcggggactcatcaagtccaagaaaagagggaggggtggcagaggatctgcagccctggccccgcggtgcatgaggctgggtgcagttctaaacctacattctcgatttttcttaagccaaaaatgaatgctaactcctttgccagtaaaattctgggaaacagggactgaggccacacatcatttccagtcatctgtgtgtttttaaggccagccacttgtccctgttgaggcctggctatggaactaaatacagtgttggtcttgcctgtccttcaaaatcaacaacagattgtctctcggctccagggaggtgtcatttctatagaaattagaagctttctgatttctagatgaggttttacaattgtttcttacagtcatgtgcactaagtactctttttgtaagcagaggtggctggctctgcagccttaaggccattttttaagtcaccacgtctagaagtcacatgaactctgctcagcaataatctgttctcagaacagacttttcaacctgctgccggatttctccattcagctggatgatcctcaggactgaccagttagctggcaggttgtccagctttttattccagtcataataggtgacagtgttaaccgtgaaaacttgagaggcactctgccctcttccctataaaatcacacagcgtgattttacaaggtcccgtggcaccttgctcaggacctctgcccctagttagcaagactgcagcagttgctgttgcttattctgaaaggaatgtagaacttgacagcagccttctgagtctgggtcaggaagatgtcctttggaccaaagcagacttctttatacgcagctcagtttcccgggagtcgccacagatgtacccactagcccaggttgctgtgagtcagcggaagctcccgttatgccctttgctcctggtgggagagggaggagtgagctccctgggttccagtatttacttggtatacctgagtttgggggtacccttttttgtgacttttcaaaacagtgaattactgtcaccttgatggacaagtttcaataaaactttgtaaaaataattggaaaaaaaaa

SEQ ID NO: 12649 - DNA, 513 bp, Homo sapiens
  misc_feature (1)...(513): n = a,t,c or g
tttgganacccttggagnnnnnnnnnnnnnnnnnnnnnnnnnnnnnnnnnnnnnnnnnnnnnnnnnnnnnnnnnnnnnnnnnnnnnnnggcacgagccaagactcccaacttcctgggtggagcagcgtggcacaagcccaggaatcaagctgcccattccctgcagtgtggtctggggctactcacccaccttctttgccttgtccttgtcactggccaaggccattatgatcctattatactctagggttcctgggaggtgaggaatggaggacattagagtccatattttgtgcacagaagagggactgatacatagtaaaccttcagtaggagttggtcattttaaatatttttcttaaggtattgttattatctattctcaaggggaattcttaagagtaaggaaggtcagatgagtctcacaaataaataatgtcttagcgtgaatgcttagaagagtcaataattgaatcaagaatgagccctttttgaccatcttacattctcgg

SEQ ID NO: 12650 - DNA, 472 bp, Homo sapiens
  misc_feature (1)...(472): n = a,t,c or g
acgagtcacggaaccagctcatgatctcaggatgtatggaaaaataatctttgtattactattgtcagaaattgtgagcatatcagcattaagtaccactgaggtggcaatgcacacttcaacctcttcttcagtcacaaagagttacatctcatcacagacaaatggagaaacgggacaacttgtccatcgttttcactgtaccagctcctgtagtgataatacttcattatttttgtgtgtgatggctggtattattggaacgatcctcttaatttcttacagtattcgccgactgataaaggcatgagggatgtgggcctgcatgctgcctggatcttcctaggaaccgggctgcacctggctgttctcttgtttatggcaaactgggctngcacctgctatttccttttgcttatggcccctacccnggggctattccnaatttncctgtttttcctggcctcactat

SEQ ID NO: 12651 - DNA, 448 bp, Homo sapiens
tattttaaaatgacatttctactaatatgagcaagtcatgtaaacattgaagaacctggtaacatattagtaaatggatattaccaaatgttttcatcgttaattactttgcgttccaccaaaatatctttactaaaatgtgcttggtgtagtttgtttattgtctaaattagtaccagtcatcttatttctgcaaaatgagtatcaatgtgaaaaagacacgtgaagattaagcatgtttgaaaataaaatggtcaattacatttcaatttacataggccaacaactgttccatactttgtttgtaaacatttaatttctctactggacaaaattaatatttggctttacattgaattttgagctgtgaagaataaattatgtatcattttagcatattaaacagtagtaagtctagcacatagtctcagccacttaaaacaaaagt

SEQ ID NO: 12652 - DNA, 609 bp, Homo sapiens
  misc_feature (1)...(609): n = a,t,c or g
gagtgctgggattacagacgggagccaccacgccaggcctacgagatttgacttgtaaagaattaattatattgactgagagagaagcccagaagaggaagaagaggaaagaaaaggagtcagggatggctcttacacagggtctattgacattcagggatgtggccatagaattctctcaggaggagtggaaatgcctggaccctgctcagaggactttatacagggaagtgatggtggagaactacaggaacctggtctttctgggaatctgtcttcctgacctgagtgttatctccatgttggagcaaaggagagatccccggaatctgcagagtgaagtgaaaatagcaaacaatcnnnnnnnnnnnnnnnnnnnnnnnnnnntcgtagagtggcaatcatcagtggcaatcgtggcttaactcatnnnnnnnnnnnnnnnnnnnnnnnnnnnnnnnnnnnnnnnnnnnnnnnnnnnnnnnnnnnnnnnnnnnnnnnnnnnnnnnnnnnnnaaaaccacactttgagtttctgtttgggagctctctgcaagtgagagaattctttgggaaaataaaagtttaaatcctgtgaaaaaaaaaaaaa

SEQ ID NO: 12653 - DNA, 480 bp, Homo sapiens
tcctacttagtcgtgtgtacatcattgggaatggagggaaataaatgactggatggtcgctgctttttaagtttcaaattgacattccagacaagcggtgcctgagcctgtgcctgtcttcagatcttcacagcacagttcctgggaaggtggagccaccagcctctccctgaataactgggagatgaaacaggaagctctatgacacacttgatcgaatatgacagacactgaaaatcacgactcatccccctccagcacctctacctgttgcccgccgatcacagccggaatgcagctgaaagattccctggggcctggttccaactgcccactgtggactctgaggcctctgcatttgcgggtggtctgcctgtgatattttggtcatgggctggtctggtcggtttcccatttgtctggccagtctctgtgtgtcttaatcccttgtccttcattaaaagcaaaactaaagaaaaa

SEQ ID NO: 12654 - DNA, 713 bp, Homo sapiens
gattcgaagattcctttggagtggaatccatataatgtgttaatggtacttctttgtccgctctgcgatcgtggtttttagtgggctaccgagctgtggacatatgtacgttggtacactcagttgagacgtgttttaatcatcagctttctgttcagtttgggatggaattggatgtatttatataagctagcttttgcacagcatcaggctgaagtcgccaagatggagccattaaacaatgtgtgtgccaaaaagatggactggactggaagtatctgggaatggtttagaagttcatggacctataaggatgacccatgccaaaaatactatgagctcttactagtcaaccctatttggttggtcccaccaacaaaggcacttgcagttacattcaccacatttgtaacggagccattgaagcatattggaaaaggaactggggaatttattaaagcactcatgaaggaaattccagcgctgcttcatcttccagtgctgataattatggcattagccatcctgagtttctgctatggtgctggaaaatcagttcatgtgctgagacatataggcggtcctgagagcgaacctccccaggcacttcggccacgggatagaagacggcaggaggaaattgattatagacctgatggtggagcaggtgatgccgatttccattataggggccaaatgggccccactgagca

SEQ ID NO: 12655 - DNA, 609 bp, Homo sapiens
gaaaagtccataaataatcattcaatttttaaaaagtaattttatgaccttcataagggagagacctctaacctcccgcagttgagcaaatacactctgagagacattagggactgtggcaaaaagcaggcaatccatgtgtgtcacttaagccttgagcacagttcagtaggcaacaaaccaggaactgtcctggcagataagacagactgtgcaaggtcatcgtcatcggcatgggaagggcattaattaccaaagtggagacacagtcactgtctccaagagcatttggaatcacttcacagagttctcaaggaggggaaggctatctgtcagctcctggcgggactgctgccccatatactgtgatgaattgcttcacatatctgagttctgatgggaaggagtccaagtgcggtagctgtagagaacgctggggaagcccagttctatgtagctcacgtatgaaaggaatattcatgaagagcaaaacagaggcattatttgagattaactgcctgagaaacctagtctaatcccaagtctctaggaaaatgttgacttacttgccatgtgcccagtcaaggtgcttcggagctttatcatgca

SEQ ID NO: 12656 - DNA, 2284 bp, Homo sapiens
  misc_feature (1)...(2284): n = a,t,c or g
ggcacgagctgaccacagaagcttatgaatgggagccacgtgttgtgagtacagaggtggtcagagcccaagaagaatgggaagctgtggacaccatccagccagagacagggagccaagctagctcagagcagcctgggcagctaatctccttcagtgaggccctgcagcacttccagactgtggacctttcccccttcaagaaaagaatccagccaactattcgaaggactgggctcgccgccctccgacactacctcttcgggcctccaaagctccaccagcgccttcgggaagaaagggacttggccctgacccattgcctcaagtgtggcctggatagccaagacccagtgcatggccgagtcctcccagaccatctataagaagctgaccggctcccaagtttgactgtgcccttcatggaaaccactgggaggacctgggctttcagggagcgaatccagccacagacctgagaggcgcaggcttccttgccctcctgcatctgctctacctggtgatggactcaaagaccttgccgatggcgcaggagattttccgcctgtctcgtcaccacatccagcaattccctttctgtttgatgtccgtgaacatcacccacattgccatccaggccttgagagaggagtgtctctccagagagtgtaatcggcagcagaaggtcatccccgtggtgaacagcttctatgccgccacattcctccacctcgcacatgtctggaggacacagcggaagaccatctcagactcgggctttgtcctcaaaggtgtgctctttcttctggggaggcctaggctgaatgcacagtgtcccaggtccagagagcccaaggtggttgctagactggttttggctgcagttcttccccatccacactttctcaaattccagcttaccaaaatctccatcacccaccccctgggagtctgctagttctcctttctctgccctgactgtcgcccttttctggtcttatacttatgacaagcatatattctgatcaaaaattggggagccaggggtccaattagttgggactatttcaaagttgcaattgtggcaggacaaggtagagtgtgtggtccctgtggctgtagctggctccctagcctacctctctggtgatctctccatctgaggctccttcactttctctccatgggataggggttgggggtactccctagagctgctaggcttgaggccttgactgttgtgtcacccagagccccctcaagccttctgctccccaattctctctgttgcagagttggaagtattggccaagaagagcccacggggncttgctcaagaccctggagctgtacttggccagggtgtcaaagggacaggcctccttgttgggagcacagaagtgctatgggccagaagccccttccctttcaaggatctcaccttcacaggtgagagtgacctgcagtctcactcatccgaaggcgtatggctgatctgacctccgagatgaatggaggcttaaaggctgagctgcaggggctttcagggggtcagtggagccatgtcaggagcctggccaggccgcaccccttgctgtctcagcagatgggatataggaagctcctgggcttagctgtgggaagccaagtaccctcaccggcatgggacatgaggggcagctagacttcacccccttcccgcagacctgcctccagagcaaggagaattctgccttaatctgttgggctccagtctccgggttgaattccagtgtatcccactgggagtgaatggatcatgaggtgggatggccccatctggatgttctgcagatccccacatgggaggagattcccaagtagaggcagccagaattctgactccctggcagcagcagggctttcaggcaccagtgtctgtgttgttagaactcagaggaagaggcaggggcagcagccgacagggggcagcatgacccaagcaaggggcctgaggcctcagtgggggtagggcaaggaggtacctcacaggtgggtgtgaggccccctctggagtttctggccattcacttacccactctcttctccccctgacccccgctccattgtttatgatggaaaaacggacatttggctaggtgtctctcacggctgctccatcctagcccccacaagctggggcttcctcctgtagatgctgtgcatgccccatgatgagtttctggcctaattgagggaaggaggaaattcataccagcagttttcaaataaaagaattgttcta

SEQ ID NO: 12657 - DNA, 1981 bp, Homo sapiens
  misc_feature (1)...(1981): n = a,t,c or g
gtggcgctggcggttgctgtcagctgattcccggggttggtggcagcggcggtacagcaatggactttctcctggggaacccgttcagctctccagtgggacagcgcatcgagaaagccacagatggctccctgcagagcgaggactgggccctcaacatggagatctgcgacatcatcaacgagacggaggaaggtcccaaagatgccctccgagcagtaaagaagagaatcgtggggaataagaacttccacgaggtgatgctggctctcacagtcttagaaacctgtgtcaagaactgcgggaccttccacgtgctggtggcaccaggacttcgtggagagtgtgctggtgaggaccatcctgcccaagaacaacccacccaccatcgtgcatgacaaagtgctcaacctcatccagtcctggggctgacgcgttccgcagcctcgcccgatctgacaggtgtggtcaccatctatgaggacctgcggaggaaaggcctggagttccccatgactgacctggacatgctgtcacccatccacacaccccagaggaccgtgttcaactcagagacacaatcaggacaggattctgtgggcactgactccagccagcaagaggactctggccagcatgctgcccctctgcccgccccgcccatactctccggtgacacgcccatagcaccaaccccggaacagattgggaagctgcgcagtgagctggagatggtgagtgggaacgtgagggtgatgtcggagatgctgacggagctggtgcccacccaggccgagcccgcagacctggagctgctgcaggagctcaaccgcacgtgccgagccatgcagcagcgggtcctggagctcatccctcagatcgccaatgagcagctgacagaggagctgctcatcgtcaatgacaatctcaacaatgtgttcctgcgccatgaacggtttgaacggttccgaacaggccagaccaccaaggccccaagtgaggccgagccggcagctgacctgatcgacatgggccctgacccaggcagccaccggcaacctctcatcccagctggcaggaatgaacctgggctccagcagtgtgagagctggcctgcagtctctggaggcctctggtcgactggaagatgagtttgacatgtttgcgctgacacggggcagctcactggctgaccaacggaaagaggtaaaatacgaagccccccaagcaacagacggcctggctggagccctggacgcccggcagcagagcactggcgcgatcccagtcacccaggcctgtcctcatggaggacatcgagcagtggctgtccactgacgtgggtaatgatgcggaagagcctaagggggtcaccagcgaagaatttgacaaattcctggaagaacgggccaaagccgcggaccgattgcccaacctctccagcccctcagctgagggccccccgggtcccccatctggcccagcgccccggaagaagacccaggagaaagatgatgacatgctgtttgccttatgagtgtggggtctggcaccctgcagcccaggtccccactgctctcacacccttaggctgggacctccctccctcctctggtgttaaggctgctttgggggtggcttgttacccccttttcctcctctttgaagacggagctgccccagctgtggctgggggtgtggaggcagtgggatgaactgggggacaggtctgcgctgcagtgggatctggctgctctgccttcctttcccaccccagctgaccatgagactttgctgagaagtgggaggccccagggacaggctgggntggctggctggctgcttgacccagtgttgactctccttcactgagtgattaccctgctccgggcccattgccccaagggagccctttcagagcccacaatttgccagttcggagggcntgggttgggaggcttnggccaacagttgggaaatt

SEQ ID NO: 12658 - DNA, 1841 bp, Homo sapiens
tcacaacaacggtttaacattttactaaatcaactcacacaaattccaaattgcaaatataattaaggacaacagattctgctttgccttattaaatctttcattttcaaatccatcaataagacaaaaagtaaccaaaaattaggtctgttgcaaattcatgattcttctgaggggggaaaccaaaagaacattagagtaaaaagaacgccactggaggatgtacaataaagcaccacaacacacgcttacaaacggggcttcctggcttcggtgacaggtaaaagacgctgttctccccactgctgtgcgtcaatcagggtttcattaaaaaaaaactataaaatctcctaggttacactaagtcagacacggtctggaacacagtgcttaacaacagtaatgccaactatcagtgctaacataaaaacattttagaaggtcaaaaacaattaaactggaaaccaaagccttattttccctagatgagcaaaactgaaaatgaaaggggtcccacctcccagtaggagtgaaggggattttttttttcttttaaactgaaggtggggtacatggtgcagctggttctgtcattgctcagcctagttggcgtccagcttggccatttcctgcacatagatgcctatactctcgctgtcaaaaagcacgaagtacaccgttttgatggaagaggacattgtagacacgaagtaactggagatggccttcagaatcagctgagctgctgtctgctttggaaaaccgttcctgccgctgccgatggatggaaatgcaatggatttcagcttcttatcatcagccagggccaagcagtttttcactgtcttttccagaagttcttcacacttgtctgcaccccaaactggactattacagtggatcacaaacttggcaggcaggccatggcctgcgctgacagcagctccagctacttccaagggcccgttctttttccggagttccaggacagcttccacaaactccttgccacctttcttctccagcgtgtttcctaggtcatctttaaggtcaatgtcagcattggtaggattgattatggcctccacctcaaagccggctaaattactgatttcactgtgaataaggttcagcttctggccaaggaagaggctcttggtggagaggactgtgaagccgtcggcaggtgtgccctcggttgtgctgtcggcgctggctgccttactgacttcaccctgcttcttcttggatttccgggcccctttcttgcctcctgcttttttagatacaggcttcttctgggatggagacttggcctttttggctgggggtggtgtgatgatggcttccaactttcctttggatccccgcttcttcgctagcaactcggggtggatgttgggtaacacacccccactggctatggtgactccttttagcagctgattcagctcttcatcattggccacagccagcaggatgtgccggggtgtgaacccgtcccttcttgttgtctctcgctgcattgccagccagctccagaatctccgctgtcaggtattccaggacggcggccatgtacacgggtgcccccactccaatcctgtacttggggtggcctttcttgatgtaccgcagcatccgccccacgggaaagatgactcctgctttggcagacctggacgtcttggtggacttcttcttcccaccgcggctcgacatggcggtggccctggaggcggatcagtgagcacagcggcggctcggtggcggcggcggcagctgcaaggtgtctcggcctgagccctcctggccgctcgcgccttttctctccgcgctcc

SEQ ID NO: 12659 - DNA, 884 bp, Homo sapiens
ttatttgaaaatccagtcctttattaatacgaatggaggaaagcctgaatatagtcaaatacactgcttttctctataacgatcagctcatctggagtggattagaacaagatgacatgagaattttatacaaataccttaccacctcccttttcccaaggcacatcgaacctgagttagcaggaagggattctccaataagagcagaaatgccaggaaatcttcaacactatggaagatttcttaccggacccttgaacctcaatgatccagatgcaaaatgcagattccccaaaatttttgtaaatacagatgacacttatgaagagctccatttaatcgtttataaggccatgagtgcggctgtgtgctttatgatcgacgcctctgtccacccaacgttgggatttttgccgaaggactggacagcatcgttggggccccagcttcacagtggctgggcctctggacatctgtggaacagttttaacatcaacaagaggatgtccgggtctgagaaagaaccccagtttaagtttatctacttcaaccacatgaatctcgccgagaagagcacagttcacatgaggaaaacgcccagcgtgtcgctcacttccgtgcacccggatttaatgaagattctcggtgacatcaacagtgactttaccagagtggatgaagatgaggagatcattgtgaaggccatgagtgattactgggttgttggaaagaagtctgatcggcgggagctctatgttattttgaatcaaaaaaatgcaaacctgattgaaagtaaatgaagaggtcaagaaactttgtgcaacgcagttcaacaacatcttcttcttggattgacggatgacggctcactgagagcatatcta

SEQ ID NO: 12660 - DNA, 1566 bp, Homo sapiens
  misc_feature (1)...(1566): n = a,t,c or g
gcttgctccaagtacccttcagcatcccattctactgcaacgtggccaatgccttcctcgtagctcctcagatctactggttctgtctgctgtgcngaaaggcagtccggctctttgacactccccaagccaaaaaggatggctaaatgctcctgggagtcaggcgcactcancaccagctgcctcctccactcagcattccatggaccaaattgtgccctgggtagcctcagactttgggtattgataagccgatggatttgagtttttctaaagaatattcatattacctccttcttctaacttgccctatttgcaaacgcacttttgtagtaacaactattggggtcctgtcagacctccacggacagcaaagtggttttaatgcaagcccaagggatccttcttaaggtcttatctcaagagctctgggaggtggaagcatggggtgggatcggtggaccagggtggtaagtgtctgcacatctgcctgtccctgtatcagcggctacccaccttccaaaccactcaggacagtacccgtggcactgggcccgcagaagcaagggatgacttggttctttggaagtaatgtcgtcttgtgacattggcctgggacaatcattgtgggtaggtagttattgatcgtttactagataacccattggttctttgcctcatcctctcatccatgggtcagagttgaattcttatgtctatagacttccaatcagaagtctcactggtggggctgggggtggggtcaggcaggaggcatgggatggggaacctgagtaggtagtgtggccaagagatcagcacaacctttgcaggctgacttgctaagtctgacagtgacaaacttgtgagcttactgcagtcagtcacagaggctgttctttttcacacaccccttcatgcccggctttccccatatccacatgcagagggcgagctcataaaactacagggaagcgtgaaatgatggctttggtagctgtttactgggtaaccccactgtgacactgtccttttcatgtgatgtggaaacctacttctgtcctccaaaccatgaaatgtgtcatctagactgcagagtacttgagtgctttgcctcccgatatgccagagcttgtggtccaaagcccattcctgtgtgtccgtcctgccatttagccacagaaggctgcggagtgaggcggcagctagcctggccagtggctggtcccgtggaccgacacctgcgcccccttctgcaagcaggattttctggtgccaacactcattcatcattcccgatcaactaggatgaatttaagactgtgctaccatgtgttctcaagtggtagtttaaaaagtggatttttaaagtgcctttcaattgtctgtgaacgtctaaaggactgatttgtctcattttgactgttgagtctttaatgggtgccatttaaaaaacaaaatgctattttttaattgtctttttttttttaactatcagtgtatctttaaaagtcacccttacggtgattaaattgcactaacattcccaaaaaaaaaaaaaaaaaa

SEQ ID NO: 12661 - DNA, 2275 bp, Homo sapiens
  misc_feature (1)...(2275): n = a,t,c or g
gatggcggctgggttcaaaaccgtggaacctctggagtattacaggagatttctgaaagagaactgccgtcctgatggaagagaacttggtgaattcagaaccacaactgtcaacatcggttcaattagtaccgcagatggttctgctttagtgaagttgggaaatactacagtaatctgtggagttaaagcagaatttgcagcaccatcaacagatgcccctgataaaggatacgttgttcctaatgtggatctaccacccctgtgttcatcgagattccggtctggacctcctggagaagaggcccaagtggctagccagttcattgcagatgtcattgaaaattcacagataattcagaaagaggacttatgcatttctccaggaaagcttgtctgggttctatactgtgatctcatttgcctcgactacgatggaaacattttggatgcctgcacatttgctttgctagcggctttaaaaaatgtacagttgcctgaagttactataaatgaagaaactgctttagcagaagttaatttaaagaagaaaagttatttgaatattagaactcatccagttgcaacttcctttgctgtgtttgatgacactttgcttatagttgaccctactggagaggaggaacatctggcaacaggaaccttaacaatagtaatggatgaggaaggcaaactctgttgtcttcacaaaccaggtggaagtgggctaactggagctaaacttcaggactgtatgagccgagcagttacaagacacaaagaagttaaaaaactgatggatgaagtaattaagagtatgaaacccaaataaacagccaccacattttcaaaacagatttgtaaaaattgtatttgttaacactgtgcacaaacgttttatactaaataaatatcaaactacattcttctgaaagatgtttctattatttcttaggtcacttccatatatattatgtatagtgaaaccatttttaaaaagcaatgacttaggcaaaccaaccctagtttgttaaaccatttccctgtttttatttaaaaatgataaggttgtgcttctgtataaagtttgtacatctagcaatgtaaaatactgacacattaaaaaaaacaaaaagtagaaactcaattcttttgattcagtgctcttgtgtttttaaaaaaggaacaaaaagtaatgcaagactcaaaattttggagtggttggcatgcctctcttcattttactttttgactggctgcctgtatgccgatgatgatgtagctgagctgtttgtgctgctgctgctgccatagccatttgatgctgcaagaatcgcaactgcagctgcctgtgactgcataaaacttcctactccagtaaggttaataacagcagcttgctgagcagataaggcctgttcttgactggttgaaccttgctcagaaccctgctcccctggctgttgaggactacaagttgtgggctgctgaggttgttgtggtgtaaactgggagagctgctgttgctgctgctgcagagtgttaaaaataagtgaaccacctggaagctggagtagatttaagggcctgagacttgaagtattttttaaaccaaatggaacacctgcttgagaagctgcctgcattgcactgggcagtgcatttggtagcagacctcctgagggtagaaggccgctcaggtttattcctgcaggagttatggcaccagtgttacagcccagcatggggtttgaaccactcatcaaagcctgggccccacaaacagagcccactacattgatgaagttaagtccagcagagtttgccatgacctgggtggccgtggttctttgtgatgagctggcaggtgatagggcagctggagaaagcatgctaacttgattgagatccacagatgatttccgaggaatacttgatggcttagaagaaggaggaggagttggagatttgagaaagctgcttgtctgttgtggtgtaaaatagttacctgaggaactatttcctgagcttgagggaagtttgattggtgggggtcgatgttttacacccttccccaataccgaagactgaactgacacggtttcagtttgatctgtttctttccctggagaaacctgactcagactggctgagccactggagctgtgtgacatcttgaccggacatttggcttcattctggactaattcttggtactgattgactaccctctcagcatcggtctttganccaataatgaaccaatttgaatgat

SEQ ID NO: 12662 - DNA, 1287 bp, Homo sapiens
tttttttttttttgcttttaaaagtccttttaatacagcatgaagaggctatatttctataggcgagccgtatacagattctccaggaataaggcacacaacggaatgccatcccaagggctgcacttcggagacgtcggagccttctccacgcaccttccgagctgggcccacgggttctgttttgtctttttagctggactcacacgtatggacagacacagacacggacggggtcaccgcatgggggcggaggaggtcggacggcaaggttggcaacagagaaggataagtccgctgccacagcccccaggggaccgcttggccatctcgctgaaggctggaacacccccatttcagggttagtcgttggactgagctacaatgtagtgaggttggattaaatattcgtttagagtagattcaagtctattagatgctggagggctggtgtaagggctccggttgacatttccaagttcaaggagcatggcctggaggaggcgtggctcagatggcaaagctcccgagcggcgaggccaggctttgccccacttcttcttccctcctggggccctgctgattgagagccctcccaccaagccaagacgctggtggaccacagaggggctggttagtcaaataagctgcttcttccccttgcccactccctgtccctctacaaaattaataaaaccgtaataacaagataagaagaagaaggtgcaagagaatggattacaatgctgtttgttatcctcagtggaagaggcacaaaggggtcacccattccctttttcactatgtatcgaattatagcttcccttaaaaaaggcaatactttccaaaatacacatatgtataaatacaggacaagaacatattaataagtctaaacacttgaataatatgctgtctacttaatactgatattttcatcccagggaaaacaacacagaaaaacaacaatatggcttaaagaattgcaaagattttttttcctcatcagaattatgtaccaacttcatataatattctatgtagacaatatttccttctgaatgtagttcagttgcatatttttacagaccaaagcatagtaaaaaacaaacaaaaaccaaccaaaaacccaataacgggaaacagaaaagttctcaccataaatattttcttgcagctcaaccagaaggttggcaaaatacttccagaaatctttgtttgatattctcttgccctcctgaaagttctgaaattttgaaaatgcctctctttttgtttgttttaatc

SEQ ID NO: 12663 - DNA, 1644 bp, Homo sapiens
  misc_feature (1)...(1644): n = a,t,c or g
tttttttttttttttttattgtcaacatttttatttaagaaaacaggatttaacatggcatttttcttccctctaagggcagcagcacataaatcatacatcagtcatccagtgatacaaagaggtggccaattgtgtctgaagtagtcacttgtaaaggatcacaacccaggcagtgttgcttttctgcaaacagaaggaaacagaaggctccatggtccttgaagattatccaagttttccactagttgtcaagatttctgtcccaacctcttagtcaccatttacagcaagaagagccagcaagtgaaaaactgttaatttattgattcaaagttgttttttttctttttaaaaaacaatccccaatacatgcagttcagggttaagtatcacatttgtagcacattgttgagtctcaaaacaaaaatatgcatcacctgtataatcccatcacatctttttccagcctctacaatacctagttgggggtgttttcatttatacatccacatagctcagaagcatgttattaacggttgatctggcccgatgcttctccgccacctcccctgccctggtctccacctcggggttatttttttctaaaggcaggatgttactcagtcttaatttattaagatcactgacaaactttggcttcttgtgtgctcatgtggtccctgcttttgctttcggaagggtttatattgaaacgactgtgactctgatcggttattatcccctcattttttgtaggaaataagtttgcttgtttctgtgggtgctcacacagtaacacaggttcctaaagtaaccatttaatctgaactggtattaaaggaaactgttaaccaggctctcttagatctatttcagttcatataaaaaaactcttccaattgttgcttgtgtctcaaagtagttctgcttccatccttatcaacagagcacctgggagaacctaagtcatttccctgagtaggcacagaccacgaggacccgcggcacccagctctctctgggactaagcgcctgactcgagagcaccacctttcagtccactgggaccaatccagtgggcagcgccctccccagggtacattccagaacataaacttggtaccctctaatttatcccctcaagaagttaatttcctcctcaagagctacctttagatggattttcttattggtcccttttcttttaacagcccttcccctagccactctcttcaagtccccaaggattacgagtttgtctgtctcctctaatctatcagtctgagagcaccttcctctctgcaagggaacacatttgctttaaaccttgtgagtgctgacatgttacagaatgtctgggaggaggcctggctgagtgactggtgtttaagtgcctcaatgaacgacatcagcgcttctctagttggtgagaaggcccaggaaagcttggtctgcgtcatacactcaatagcttctcctacccagccacctaccctgcctacagggataggatgaaagcaaggcccagctgacagcatccaggggagagtgaacctcgtgccnnnnnnnnnnnnnnnnnnnnnnnnnnnnnnnnnnnnnnnnnnnnnnnnnnnnnnnnnnnnnnnnnnnnnnnnnnncaaa

SEQ ID NO: 12664 - DNA, 2558 bp, Homo sapiens
  misc_feature (1)...(2558): n = a,t,c or g
ggtttttttttttacaagtgtgctagttattttcatagttttgaaatttcagtattgtttcttgttaaggaaatacttttcagtaaacttgttctgaatataattcttgtggaatacttaagttggctaacctaaatatcgaaaggttctgaacatgcgtattatgtgaacagaactgtatttaaaatttgaaagcagaaagtaagatgtattgaaggaattgtgatgtttgtaatttacaagaagcttgagcacgtgtcgggagcacagtgggaataatacaaagggtatcatcttttgtaacattaatgttaaagttttgggatatttgttcaccatgaaacattgtgtttattttccttgtcttggcttttccacggtggctcatgccnggtaatcccagccgtggataattcttatatgataaatggaatttgctttttttcctccaagaatgtggatatactgaaagatcctgaaacagtcaagcagcttggtagcattttgaaaacaaatgtgagagcctgcaaagctgttggacacccctttgtaattcagcttggaagaatttatttagatatgcttaatgtatacaagtgcctcagtgaaaatatttctgcagctatccaagctaatggtgaaatggttacaaagcaaccattgattagaagtatgcgaactgtaaaaagggaaactttaaagttaatatctggttgggtgagccgatccaatgatccacagatggtcgctgaaaattttgttccccctctgttggatgcagttctcattgattatcagagaaatgtcccagctgctagagaaccagaagtgcttagtactatggccataattgtcaacaagttagggggacatataacagctgaaatacctcaaatatttgatgctgtttttgaatgcacattgaatatgataaataaggactttgaagaatatcctgaacatagaacgaactttttcttactacttcaggctgtcaattctcattgtttcccaggcattccttgctattccacctacacagtttaaacttgttttgggattccatcatttgggctttcaaacatactatgaggaatgtcgcagatacgggcttacagatactttttacactcttacaaaatgttgcacaagaagaagctgcagctcagagtttttatcaaacttatttttgtgatattctccagcatatcttttctgttgtgacagacacttcacatactgctggtttaacaatgcatgcatcaattcttgcatatatgtttaatttggttgaagaaggaaaaataagtacatccattaaatcctggggaaatcccgtttaacaaccaaatctttcttccagggattatgtgggctaatctccttaagtcggccttccctcacctacaagatgctcaagtaaagctctttgtgacagggcttttcagcttaaatcaagatattcctgctttcaaggaacatttaagagatttcctagttcaaataaaggaatttgcaggtgaagacacttctgatttgtttttggaagagagagaaatagccctacggcaggctgatgaagagaaacataaacgtcaaatgtctgtccctggcatctttaatccacatgagattccagaagaaatgtgtgattaaaatccaaattcatgctgtttttttttctctgcaactccgttagcagaggaaaacagcatgtgggtatttgtcgaccaaaatgatgccaatttgtaaattaaaatgtcacctagtggccctttttcttatgtgtttttttggtataagaaattttctgtgaaatatccttccattggtttaagcttttggttttggtcaccttaattagtttgcatgaagttgaaaattaaggcatttttaaaaattttacttcatgcccatttttgtggctgggctggggggaggaggcaaattcgatttgaacatatacttgtaattctaatgcaaaattatacaatttctcctgtaaacaataccaatttttaattagggagcattttccttctagtctatttcagcctagaagaaaagataatgagtaaaacaaattgcgttgtttaaaggattatagtgctgcattgtctgaagttagcacctcttggactgaatcgtttgtctagactacatgtattacaaagtctctttggcaagattgcagcaagatcatgtgcatatcatcccattgtaaagcgacttcaaaaatatgggaacacagttagttatttttacacagttctttttgtttttgtgtgtgtgtgctgtcgcttgtcgacaacagctttttgttttcctcaatgaggagtgttgctcatttgtgagccttcattaactcgaagtgaaatggttaaaaatatttatcctgttagaataggctgcatctttttaacaactcattaaaaaacaaaacaactctggcttttgagatgacttatactaatttacattgtttaccaagctgtagtgctttaagaacactacttaaaaagcaaaataaacttggtttacatttaaaaaaaaaaaaa

SEQ ID NO: 12665 - DNA, 1250 bp, Homo sapiens
  misc_feature (1)...(1250): n = a,t,c or g
gggtgggtatgttccacatctccctttaaaaaggaacttccactggtctttccctctggaggttctgtactcagccacgcccccagcatacttcttcatggccatttcagaactcattccatagaagagcttgtacttcttgccatccctctcgatgagctcaccacctgactcactgtgcccagccagcatgccacccagcatcacgaagtcagctcctgccccaaaagccttggccacatccccaggacagctgcaacctccatctgaaatgatgtgcctttgaggccatgagcagcatctgcacactccatcactgcgctgagcttgtggataccccactccagttttcttccgagtagtacacacagagcctggcccaattcccactttgatgatgtcagccccagaaaggatgagctcttctaccatctctcctgttaccacattccctgccatgatggtgtgctgggggaagcgcttccgtacatcttttacaaattcaacaaagtgttcagagtagccatttgccacatccaggcatatatacttcacctggggaatagcttccaggatctgttccagctgctcaaagtcagaagagcctgtgcctgagctggcagccagatgctcaagacaatcaggattctggccagcaaactcttgccactgaacgaggctatagtgcttatggacatcagtgaagagagagaacttacagagaaccttggccatctcaaaggtgcccacagtatccatattggcagcaatgatgggaacccccagagtatgtctgctttgagttccgaaatgaaaaggatcttgtgagatccacctcacttcgagacttaagggtactgcgtttgggcctcaaaaggacatccttgaagtccagtttcacatcgttgtcaatatgaggcatggcgcttagcctcggggtagcgatgaatctgagggctggaaggcaggaagtcataaggaccaatcttcccctgggctttaacgccctgttacggctggtggcctctcttcgcttaagttgtggaaggtcgggcaaaggccgaagtgtggtccctgaagcctgtcacctcgacccatcccgtggctgcgattaccctagggctccatcccaggtactgtttgttggggaggagagctgggaaagggttgtgagagaccctgacggtgcattccttaccncgctacacttccttcttctacccctgcaaagagcaatggggcaagaggct

SEQ ID NO: 12666 - DNA, 987 bp, Homo sapiens
gtcgccgccgtcgctgccgctgccgctgccgccgtcgttgttgttgtgctcggtgcgctgagctccgcgactccgcgagccggttccgtccccttcccgccgccgccatgaagtggatgttcaaggaggaccactcgctggaacacagatgcgtggagtccgcgaagattcgagcgaaatatcccgacagggttccggtgattgtggaaaaggtctcaggctctcagattgttgacattgacaaacggaagtacttggttccatctgatatcactgtggctcagttcatgtggatcatcaggaaaaggatccagcttccttctgaaaaggcgatcttcctgtttgtgggataagacagttcccacagtccagcctaactatggggacagctttacgagaaggaaaaagatgaagatggattcttatatgtggcctacagcggagagaacacttttggcttctgagggccattgctggggctaggtgcaccgtaactgcttgtgtatcttgtaaatagccagccattttcagttattataccagaacctcttcacatagacctattagtgcatttgtaactggatttatttcttaatatattggaaggttttgtttccttagactagtaaattatcatacagagttttattttgagtttttctttttgtgcattgtcctcatgcctgtattctccaggaaacttgtccttctggaaatcatattgaatgatatttctatatcgaagtgaggtaggtgcggtattaaagtgaaagggaaggtgatgcatttattctgggttatgcttgaagtgttagatggctaagtattaaaattatccaaattaaatccttagcagtcagaacacttgcttcactagaatatgccaactgccaatcatgttggactgagctaatttgttcctctttctgaaactattaaggtaaataattaacaataaaaattctcttataaaggcaaaaaaaaaaa

SEQ ID NO: 12667 - DNA, 4488 bp, Homo sapiens
ggtaaagggaaagggggggaaacaccaaatctatgattggacctgggcttctttttcgccaatgcaaaaaggaatatgcagcacatttttgccttcttctgcaccggtttcctaggcgcggtagtaggtgccaatttccccaacaatatccagatcgggggattatttccaaaccagcagtcacaggaacatgctgcttttagatttgctttgtcgcaactcacagagcccccgaagctgctcccccagattgatattgtgaacatcagcgacagctttgagatgacctatagattctgttcccagttctccaaaggagtctatgccatctttgggttttatgaacgtaggactgtcaacatgctgacctccttttgtggggccctccacgtctgcttcattacgccgagctttcccgttgatacatccaatcagtttgtccttcagctgcgccctgaactgcaggatgccctcatcagcatcattgaccattacaagtggcagaaatttgtctacatttatgatgccgaccggggcttatccgtcctgcagaaagtcctggatacagctgctgagaagaactggcaggtgacagcagtcaacatcttgacaaccacagaggagggataccggatgctctttcaggacctggagaagaaaaaggagcggctggtggtggtggactgtgaatcagaacgcctcaatgctatcttgggccagattataaagctagagaagaatggcatcggctaccactacattcttgcaaatctgggcttcatggacattgacttaaacaaattcaaggagagtggcgccaatgtgacaggtttccagctggtgaactacacagacactattccggccaagatcatgcagcagtggaagaatagtgatgctcgagaccacacacgggtggactggaagagacccaagtacacctctgcgctcacctacgatggggtgaaggtgatggctgaggctttccagagcctgcggaggcagagaattgatatatctcgccgggggaatgctggggattgtctggctaacccagctgttccctggggccaagggatcgacatccagagagctctgcagcaggtgcgatttgaaggtttaacaggaaacgtgcagtttaatgagaaaggacgccggaccaactacacgctccacgtgattgaaatgaaacatgacggcatccgaaagattggttactggaatgaagatgataagtttgtccctgcagccaccgatgcccaagctgggggcgataattcaagtgttcagaacagaacatacatcgtcacaacaatcctagaagatccttatgtgatgctcaagaagaacgccaatcagtttgagggcaatgaccgttacgagggctactgtgtagagctggcggcagagattgccaagcacgtgggctactcctaccgtctggagattgtcagtgatggaaaatacggagcccgagaccctgacacgaaggcctggaatggcatggtgggagagctggtctatggaagagcagatgtggctgtggctcccttaactatcactttggtccgggaagaagttatagatttctccaaaccatttatgagtttggggatctccatcatgattaaaaaaccacagaaatccaagccgggtgtcttctccttccttgatcctttggcttatgagatttggatgtgcattgtttttgcctacattggagtgagtgttgtcctcttcctggtcagccgcttcagtccctatgaatggcacagtgaagagtttgaggaaggacgggaccagacaaccagtgaccagtccaatgagtttgggatattcaacagtttgtggttctccctgggagccttcatgcagcaaggatgtgacatttctcccaggtccctgtctggtcgcatcgttggtggcgtctggtggttcttcaccttaatcatcatctcctcatatacagccaatctggccgccttcctgaccgtggagaggatggtgtctcccattgagagtgcagaggacctagcgaagcagacagaaattgcctacgggacgctggaagcaggatctactaaggagttcttcaggaggtctaaaattgctgtgtttgagaagatgtggacatacatgaagtcagcagagccatcagtttttgtgcggaccacagaggaggggatgattcgagtgaggaaatccaaaggcaaatatgcctacctcctggagtccaccatgaatgagtacattgagcagcggaaaccctgtgacaccatgaaggtgggaggtaacttggattccaaaggctatggcattgcaacacccaaggggtctgccctgagaggtcccgtaaacctagcggttttgaaactcagtgagcaaggcgtcttagacaagctgaaaagcaaatggtggtacgataaaggggaatgtggaagcaaggactccggaagtaaggacaagacaagcgctctgagcctcagcaatgtggcaggcgtgttctacatcctgatcggaggacttggactagccatgctggttgccttaatcgagttctgctacaaatcccgtagtgaatccaagcggatgaagggtttttgtttgatcccacagcaatccatcaacgaagccatacggacatcgaccctcccccgcaacagcgcgggcacggcaccgagcagcggcggcagtggagagaatggtcgggtggtcagccatgacttccccaagtccatgcaatcgattccttgcatgagccacagttcagggatgcccttgggagccacgggattgtaactggagcagatggagaccccttggggagcaggctcgggctccccagccccatcccaaacccttcagtgccaaaaacaacaacaaaatgaaacgcaaccaccaccaaccactgcgaccacaagaaggatgattcaacaggttttcctgaagaattgaaaaaccattttgctgtcccttttccttttttgatgttctttcacccttttctgtttgctaagtgaggatgaaaaaataacactgtactgcaataaggggagagtaaccctgtctaatgaaacctgtgtctctgagagtagagtcactggaacactaatgaggaaactgcactgttttattttaattcagttgttagtgtgtcttagtgtgtgcaattttttttcttactaatatccatggtttgcaggttctgttaggccctttccttctccttacttcttatccccaactccctacccacccctcttcagttttcagattggagattcaagatttgttccactttacaagcaagaggaaaaaaaagcaaccttcaaactaattctccatgggggctctccatgttaccctccactccttggcccaaacctctgatggagatagacattgttggagaagtggggctgccttccccaagtggggcactgcttaagcacttattcagtggagaacacaggtgaaaagcaactcaggatgagggtggtggagaggggcaggggcagatgtgccagtcagagaaggactcctgaagttactgctgctcagaaaaacagttcctttaatgtgggaagagccatttcataggtcataggtggtatggtatatttcttcagagtcaaccttggccctgagaagtatgtcctcctggtgtgctcaggctcaacggcagtctggtggctgaaggcacttggcctcctaaaccaagcagaattttgggaagagataacagccagggagatattgcccatgattctcactttttctttgcctggcatctaagcaggaacccattgtggagtagactctcttcttctatggagcctctgacatggggagcaatgctaagcaagctaagtgtaaaagaaaagtgacagaataattttgggaagaggaagcctcatcaaaagcttcacacaaaataggagcttcccatgggtgttgccctatcctagggtttaagaaaacacgtatgaagtttatggctgatgcaaagaacttgggtttttatgttaatataaagtgttgttttagcatgtggccagatgatgctctgtcatctttagaaagtgagataaccaaggaaataattgaaggagtatagggagatggattaagttgataatgacatttagggcaacttaagacctttgatcccaggttctaactcaaagaggctgaccttcccccagctaagatagcatgaggacgttgtattccaatatacgtatgattggggctacaaagctgaactaaagcaagattggtgaagtggcagggtttatagagagaagcccaggctgagttcagcttttgttggaagtgagaatccctgacatatagctttcttggagatcccaactctcattcttggtgcaactggcttccagctctccagcagtcactctcctaggtgcatgattcagtgcgtgccatgtgtcaattagcttttactgataaccatattctggcttg

SEQ ID NO: 12668 - DNA, 863 bp, Homo sapiens
  misc_feature (1)...(863): n = a,t,c or g
tctatacggaatattaaacacattactgatatcccatataattctgaaggacaagccatagtggaaagaatgaatctctccctgaaacagcagttgcagaagcaaaagggggaaaacaggtactacaggacaccccataagcaattgaatcgcattattaactttaaattttttgagcctgcctaaaggccggatcttatcagcagctgaacagcatctacagaaaccagctgcaaagacagaagcagaacaactggtttggtggagagacctgataacagaaagttgggaaataggtaaaataataacttggggtagaggttatgcttatgtttctccaggccaaaatcatcagctgatttagataccatcaagacacctgaaaccttatcatgagccagatgctggaggaagagattccgggaggatcccgagggacccccccagttgcagccatgtcaagactgatgctgaggaggaccccaactgtcacgagcaacacccgtcgaacacagccacccacctggggacagatcaagaagctgtcacagatggtggaagaaaacctgaggaaagcaggacaaccactcacagtgaataatttaatggtagctatgatggcagtgatcaccatttctgtgagtattccttcaacaaaggctgacacagagaacaattgtacttattaggcatatttatcaatcttagctggtaataatgcctggatgtaaatcactgtatgacacagttacacatgctttctgatctcagtatttaccataataaatctgctcctgtaattgaggcatacaacccccaaaaacctatttgtaaacaggattggactcagttagcnnnccaaa

SEQ ID NO: 12669 - DNA, 1070 bp, Homo sapiens
gatatcccatggaaagtgataattcatttgatctgtttgattcctcccaggcagtgacaccaaaatcagtttcagagactcctccactctctgggaatgacacggactccctctcctgcgacagtggcagttcggcaactagcactccgtgtgtgtcccgcctggtcactggccaccacctgtgggccagcaagaatggccgccatgtcctgggcctgattgaggactatgaggccctgctcaaacagatcagccagggacagaggctccttgctgaaatggacattcaaacccaagaggctcccagctccacaagtcaagagctgggaacaaagggtccacaccccagcaccactgagcaagtttgtgagcagtgtgagcacggccaagctgaccctggaagaggcctacaggcggctgaagcttctctggagagtctcactccccgaggatggccagtgcccccttcactgtgagcagattggagaaatgaaggcagaggtcaccaaactacataaaaaattgtttgaacaagaaaagaagttgcaaaacaccatgaagcttttgcagctgagcaagcgccaggaaaaagtcatctttgatcaattggtcgtaacccacaaaatccttcggaaggccagaggaaacctggagcttaggcctgggggagcccatccaggaacatgcagtcccagcagaccaggctcctgagaagaactttcagccaataaagcttgtgcttcccccaccgagctcacgctgtctctttgttccaagtgtggttcctatttattgaggaagaaagagctgtctggccaaaggaaatctattttttcccttcatgttttctctctgaaagttggcttgagagttgttgtcagaaaggtgcaggtgctccacaaacgggtggtaaaaaggcctcgagctcttggatgttgtatttcagatcaggggcaggcaccggagttgaggctgtgcgccttggtgggcttcacgtcttcccctggatttgcttagtactcagccagtgccacagtttgaagattctcattaaatgattcatttcattt

SEQ ID NO: 12670 - DNA, 1504 bp, Homo sapiens
ctatggcggcaattcccccagattcctggcagccacccaacgtttacttggagaccagcatgggaatcattgtgctggagctgtactggaagcatgctccaaagacctgtaagaactttgctgagttggctcgtcgaggttactacaatggcacaaaattccacagaattatcaaagacttcatgatccaaggaggtgacccaacagggacaggtcgaggtggtgcatctatctatggcaaacagtttgaagatgaacttcatccagacttgaaattcacgggggctggaattctcgcaatggccaatgcgggggccagataccaatggcagccagttctttgtgaccctcgcccccacccagtggcttgacggcaaacacaccatttttggccgagtgtgtcagggcataggaatggtgaatcgcgtgggaatggtagaaacaaactcccaggaccgccctgtggacgacgtgaagatcattaaggcatacccttctgggtagacttgctaccctcttgagcagctcttctgagatggccccagtgaaccagcttctagatgacatagaatgacatgctaatgctaaattcattttgggctttgcaagtcatgaagcttaggaggcctggcatcttgggtgagttagagatggaagtacattttaataggatgcttcttttctcttcccccagtgcctaggttgccagagcatttgcacaaatgcccctgtttatcaataggtgactacttactacacatggaaccattaatgctgcttctttgttgcatgtctgctctgatatacgtcgaacaatgtagcagccactgcatttctcagtggttttgcctaaccaaacttcttcctaaggagatttatattctggcctacacagcagtccttgatggctgacagccacagaattccaaaccaagtagtgtctgtcagccctcttaactctgtgcacgccctatttcagtcttttacatttgttcttctagggaatgtatgcatctctatatatattttccctctcaaaaccagaacatcaacagtgctgtttctgacacttcagacatcccacgcaaagccacattgaatttttgccaaatgaaaaacacatccaacaatcaagtttctaagaaggtgtcaagtggggaataataataatgtataataatcaagaaattagtttattaaaaggaagcagaagcattgaccattttttcccagagaagaggagaaatctgtagtgagcaaaggacagaccatgaatcctccttgagaagtagtactctcagaaaggagaagcgccactcaagttcttttaacccaagactttagagaaattaggtccaagatttttatatgttcagttgtttatgtataaaaataactttctggattttgtggggaggagcaggagaggaaggaagttaatacctatgtaatacatagaaacttccacaataaaatgccattgatggttgaaaaaaaaaaaaaa

SEQ ID NO: 12671 - DNA, 1384 bp, Homo sapiens
aagtggcagggcttgtgctggcccatgatggacttcctgcgctgtgtcaccgcggccctcatctactttgctatctccatcacggccatcgccaagtactcggatggggcttccaaagccgctggggtgtttggcttctttgctaccatcgtgtttgcaactgatttctacctgatctttaacgacgtggccaaattcctcaaacaaggggactctgcagatgagaccacagcccacaagacagaagaagagaattccgactcggactctgactgaaggcctgggcgggtgccttggcaacctgagccacacaggcctccacccctgcgcctcacaggggtcgctggcgttggagcggaggcctggacttctgagttgcagagggggctgcggacacagcaggccccctacagcctcaggttctgcctgagcccagcctaccaggcttgccctcagctcagcactgttgaccacgctgcgtatgagggcatcttgggtatcccactccttctccccatttctgtcccacaggccttcagccctttaacgtctctgccaaaaaccagcacaaggagacaaagcagagccttgtctgtatctgggcagcaggtgttccatgctgctaggtggcgggggtcgggggtcttctgtttcactaacaggaacaaagacagaaaccatgacagggctgccccgccaggccccggtggggtttgtctgcacttggtgctcctgcccacaccagccactttggtgacaatgacccttccaagaatctttggttcaaggagcaccagttccctcttcattcttgaagcagggagaaattgacctttgccttgtcgcccaggaagtggggctcggcacccataactaacacctcccacccttggaaaccatgtcttctgggggtgagatgaccattctgggtctaagactgtttcaaagaagagctcatagactgactggtccagaagacagagggtacaacagtggcatcacagtgacagtgtcatggggagctgggcgggcccagccaaaccctccttcttcctagagcccagccagcaggcaggagttcctggaccctcaggacagtgaacttccagacctcagggcaggtctatgggccactgcaggagatgagaccagccttctgtgttcacctaacgatttatactgtgtatctgtctttgatggaattttgtaactttttatatttttttatgcaaaagcagcttcttaacagatggcattttctgtgactctaggcctcacaaaagagccagagttctggacccatgtttggagcatttgtagccttattctcttgcgtgtgaatctcttaccctgaaaaaaagccataatgaattaagccagactg

SEQ ID NO: 12672 - DNA, 1426 bp, Homo sapiens
  misc_feature (1)...(1426): n = a,t,c or g
ttttttttttttcagtaggtcaggtaacaaagtccagtctgttttatttttaacccaaatattccaaatatacagaaaattaccagtacaaagttaaacacattcagatttatttacacaatgctaaagaaatttgagttttatttccattttgtggaattttatcatggggtctggctttaatgtgtaactgacgtgggtcactggaaactcgattatcccacctcacatgcaattttctgtcctaagggaataggaaaacttgggtttttagggcacatgcaggtaatgatcttaatactgctttacactttcgtggggaagggcagctgtcccacagccctggggaaggaccacatgctcagaaagggaacaagagagagggctgaacaacaggcacatggggaccctgagcatttctgtgcacgaggataaggagagtatgaccaaaaccctcctccctagaggtccaaacacaggaggtgggccaaatcatcagggaacagtcagtcacccgcttgtggctgagggcatgccggaggatgagaactacattaaggatctggggcatagcaataaatcattaccatgtacactatacagtttatatatgtatatatgtacacacacatatatataaaggtacagattagtttatgttattccttataaacaagtacacttaagaatgtactggtgtgaagaaatgcatactgcaagttgtttcgaattaatgttctgactcttgttattataatgcaacctaaccaagaaatcaacatgctcctgctatttcaatgatgcttcatgagggcaagggccctgggctctgcctagggcaggatggtgctccctagagctacctgagctggacaaacccatggcagacagaacagaaagtctggcacctgctgactccggccctccctgtcacttcatcacacagcaaatcttaaaactttggttttttcaaagaacatttaagtccatgttcattttcctgcttcagggaagatggtagcaaagttgaaagccgaatcccttcctattttagcacttccaagtatcctggatgaatataggggcgaggggctacactgacaatgagcaggatgcactctaggtcattgtggaacaggcacggagctcttgagagcactgcctcaaaggaaagagggaatctctatctggatggttggcctggaaactaaataatgactaatgcccaggccagccccgttaccctggggtgggtatggatggccctgggctcccctccgtatcctggtatcgtgacgaaggccatgagaaccagctctggtttacagactcgatgcaggagctggaggtggccagcacattaccagcctgtcaaggatgaaagaccaccttgggcatggagagncccagaggcaagcatcagagc

SEQ ID NO: 12673 - DNA, 1360 bp, Homo sapiens
ccttcgccgacgtcctctcgctcagcgacgggcccccgggcgcgggcagcggcgtgccctatttctacctgagcccgctgcagctctccgtgagcaacctgcaggagaatccatatgctacactgaccatgactttggcacagaccaacttctgcaagaaacatggatttgatccacaaagtcccctttgtgttcacataatgctgtcaggaactgtgaccaaggtgaatgaaacagaaatggatattgcaaagcattcgttattcattcgacaccctgagatgaaaacctggccttccagccataattggttctttgctaagttgaatataaccaatatctgggtcctggactactttggtggaccaaaaatcgtgacaccagaagaatattataatgtcacagttcagtgaagcagactgtggtgaatttagcaacacttatgaagtttcttaaagtggctcatacacacttaaaaggcttaatgtttctctggaaagcgtcccagaatattagccagttttctggtcacatgctggtttgtttgcttgcttgtttacttgcttgtttaccaatagagttgacctgttattggatttcctggaagatgtggtagctacttttttcctattttgaagccattttcgtagagaaatatccttcactataatcaaataagttttgtcccatcaattccaaagatgtttccagtggtgctcttgaagaggaatgagtaccagttttaaattgcccattggcatttgaaggtagttgagtatgtgttctttattcctagaagccactgtgcttggtagagtgcatcactcaccacagctgcctcctgagctgcctgagcctggtgcaaaaggattggcccccattatggtgcttctgaataaatcttgccaagatacacaaacaatgatgaaactcagatggagcttcctactcatgttgatttatgtctcacaatcctggggtattgttaattcaacataggggtgaaactatttctgataaagaacttttgaaaaactttttatactctaaagtgatactcagaacaaaagaaagtcataaaactcctgaatttaatttccccacctaagtcgagaccagtattatcaaaacacatgtgcacacagattattttttggctccaaaactggattgcaaaagaaagaggagaagaatattttgtgtgttcctgggtattcttttataagtaaagtttacccgggcatgggaccagctttcagccaggggacaaaatcccctccccaaacccactcttcccacagcttttttaaaaatacttcttactctttaacatttacctagggtttcctcaactggcccc

SEQ ID NO: 12674 - DNA, 527 bp, Homo sapiens
ggagaacaggttgttaagaatttgttgttcgcagccaaagtcttgtatttactggaactttattgtgaggataagcaaagtaagataaaagaagacctggaagaacaagaagctttagaagatggtgtggcctgtgcagatgagaaggcggagtctgacggagaagagaaggaagaggtgaaggaagagctcggcaggccggccacgctgctgtggttgatccagaagctgtcccggattgcaaaactggaagctgcttattcgccgagaaaccccttaaagagaacatgcatctttaagttcctcggcgccgtagcaatggatcttgggatagacaaggtaaagccgtatctcccaatgatcatagctcctttgtttctgtacagaggcaaaggctaatgagaagctctcaagcccaaccagctttttgagtaattctatgatttcctgggatagattcttcagcaaaggatcttgctctgaataggtgctgttgagttcccgaaacaaaggagctatgatgtcga

SEQ ID NO: 12675 - DNA, 1694 bp, Homo sapiens
  misc_feature (1)...(1694): n = a,t,c or g
cttaattcctgtccttcagtgttccatctagagaattaagagatatgatgtataaaatagacatcgagggccattaagagagtaaatacttaaaaatacatgttatgaaagcaaagccaataatcactgtaggagtatgagttgcctaagggccaaaactaatgtaaataagagaaagtgtggatataaatgaccattgtttataaacagttatgaaaaatgctgtgacttgaaatctttcccacatctcccaagaaagtaggtaggagtttatcctttccgtaatctctttttaaccctgctgactattacagggcttgtttaatcacagtggcaagaattacatgtatcttacagtaaagaaacagaatactggaatcgttagagaaccctgatgtgttgacctggataaagtacaaaggtggaagagggaatgagttatgctgttaaaatctcaggctattctgttaatgttcctgctactatgaacccaaactttttttttcccccttttgactccttgtgtcttcctctcctgtggcataaaagtagttctgtcgttaacttgtacaacattgccatctgctgttgagaattggtaggtactgcttctgagaacctggctgcagatccttagcataggcagcaaatgttgagaaagtctatctgtagtattacatatactaagttacagaggatgcatccaagtagagaaaataatatgtgggttaagatacatccttaaactttttttttttgggggcgggggacggagcttgctgcaacnnnnnnnnnnnnnnnnnnnnnnnnnnnnnnnnnnnnnnnnnnnnnnnnnnnnnnnnnnnnnnnnnnnnnnnnnnnnnnnnnnnnnnnnnnnnnnnnnnnnnnnnnnnnnnnnnnnnnnnnnnnnnnnnnnnnnnnnnnnnnnnnnnnnnnnnnnnnnnnnnnnnnnnnnnnnnnnnnnnnnnnnnnnnnnnnnnnnnnnnnnnnnnnnnnnnnnnnnnnnnnnnnnnnnnnnnnnnnnnnnnnnnnnnnnnnnnnnnnnnntccatctttaaacttttaaatgtgaaatttctatcatgtaccgttagcctaacaagattttctttcctatttctgactggtgcctttcccctttttaggagcaacgaaagctactctcttagttatgttcttgtgatgtgacaaaatgtcaagaagataggagaagagaatattttatttcgttgatgcttttgttcccaagtgtgaccctaaacttaagctttgtaggagttgacattctttcatgtcccttccctttactcatgccgaaactatcaactgggacattttgtgcttttggtttaaaagttaattgatattatactttggttttatctaaaaagtaaatgtatttgcctttgacaaaagactgacacaagagcaaataagctttaaaatcgggtgttatgtgctttcctccatttttgagcatattatccaaaatggtctgtataatataaatgagaatgatgcagtttaagtaagccttgttataccattgtcatggacccctgtcataaagccatttcttggtttgtttgggaaagaggcatatgggatttatacagattcacttgtaaatgttggattggggatttttgtgtaaattttctcaaataaaggctagcagaaaccaaaaaaaaaaa

SEQ ID NO: 12676 - DNA, 975 bp, Homo sapiens
gggtgagtagctgtgcgaattcggttctctagggaactccttcttcgcctgctggccttacctgggctccccgcttctctggaggggaggcggtgcgggaactcccgtaggcgtgagctggagcgcgcgcccgctgctctctccaggtcccgccgcgccagttcgcctccgcaaagcccgtccctctcttccgcaggcaccatgttcctgactgcgctcctctggcgcggccgcattcccggccgtcagtggatcgggaagcaccggcggccgcggttcgtgtcgttgcgcgccaagcagaacatgatccgccgcctggagatcgaggcggagaaccattactggctgagcatgccctacatgacccgggagcaggagcgccggccacgccgcggtgcgcaggagggaggccttcgaggccataaaaggcggccgccacttccaagttccccccgcatagattcattgcggaccagctcgaccatctcaatgtcaccaagaaatggtcctaatcctgagtcgtcacccttggattttatggatcacggagctgaccatctttacctggtcctggaactgaaaaactgtagcttgtgtgaaaatgagcctttggaccagtctttattaaaacaaacaaacatgagtagtctgcatatcgaatatctagagctctaaaccccccaatacttaaaagtctaattgctgtcctgtggtttcattagtctgataggaagatagggatttcctcagtcacagatgatattttgaaggaaagctgcaataaagccacaatgatttgaggtctttgcttaagtatgagatacttgatgggggctttatcatgcaacattagtttgcttaccttaagatttgcccaaaaatgaaagaaaatatgagcttttcagttaaacatactcctaaaaacattttccgggattttactactaaaattggacatttaagcgaagtaaaaga

SEQ ID NO: 12677 - DNA, 2203 bp, Homo sapiens
aaaagggaggcagaggaggcggaggcagaggcagaggcagagcccggtgccgagaccaagcgacagaccggcggggctgggcctcgcaaagccggctcggcgagctctcccgacacccgagccggggaggaaaagcagcgactcctcgctcgcatccccgggagccgcactccagactggcccggtagtcaggggctcaggagcagatcccgaggcaggctttgctcagcctccgacgagggctggccctttggaaggcgccttcaacagccggaccagacaggccaccatgaccgagaattccacgtccgcccctgcggccaagcccaagcgggccaaggcctccaagaagtccacagaccaccccaagtattcagacatgatcgtggctgccatccaggccgagaagaaccgcgctggctcctcgcgccagtccattcagaagtatatcaagagccactacaaggtgggtgagaacgctgactcgcagatcaagttgtccatcaagcgcctggtcaccaccggtgttcctcaagcagaccaaaggggtgggggcctcggggtccttccggcttagccaagagcgacgaacccaagaagtcagtggctttcaagaagaccaagaaggaattcaagaaggtagccacgccaaagaaggcatccaagcccaagaaggctgcctccatagccccaaccaagaaacccaaagccaccccggtcaagaagaccaagaagaagctggctgcccacgccccaagaaagccatataaacccaagactgtcaaagccaagccggtcaaggcatccaagcccattggaggccatacctagtgtaacccaaatgcaaatgtccagttgccaaagagggccgtgcaagaaggaagttgacaatgatagtctttttcttgcggacactccctcctggtctcctattttctgtaaataattttctccttttttctctcttgatgctcaccaccaccttttgcccccttctgttctgactttataagagacaggatttggattcttcagaaattacagaataattcatttttccttaaccagttgtgcaaggacagcaacaaccaatctaatgatgagaatgtacttatattttgttttgctattaacctacttacggggttagggatttgcgggggggcttgtgtgttttgttggcttgtttgccatgaaggtagatgtgggtggggagaagacacaaggcagtttgttctggctagatgagagggaacccaggaattgtgaggttagcaggaatatctttagggtgagtgagttttccttgagttgggcacccgttgtgagagtttcagaacctttggccagcaggagagaggtggtagggagcagccagccggcaaaggaaggaggtggaaaaaaaccgccaccgggctgacttccacctcccagtggtgagcagtgggggcccaaacccagtttccttctcatttttgttagtttgccctttcggcctccctattttcttagggaaggggagtggggtccaagtgacagctggatgggagaagccatagtttctcccagtcagctaggatgtagccattgggggatctttgtggcttcagcaaattctcttgttaaaccggagtgaaaacttcaggggaagggtggggagtcagccaagtgcctcagtgtgccctgttgaaacttaggtttttccacgcaatcgatggattgtgtcctaggaagacttttcttttcctctggatttttgttcctcctgtacaagaggtgtctttgcttggtttggtggggctgcggccacttaaaacctcccgatctctttttgagtcctttattataagtagttgtagctgcgggagggggagggggagtgggcgggcagtggatagtaagacttactgcagtcgatttgggatttgctaagtagttttacagagctagatctgtgtgcatgtgtgtgtttgtgtatatatacatatctagggctagtacttagtttcacacccgggagctgggagaaaaaacctgtacagttgtctttctcttatttttaataaaatagaaaaatcgcgcacttgcgcgtcccccccccacccccttttttaaacaagtgttacttgtgccgggaaaattttgctgtctttgtaattttaaaactttaaaataaattggaaaagggagaaactgaaaaaaa

SEQ ID NO: 12678 - DNA, 2125 bp, Homo sapiens
  misc_feature (1)...(2125): n = a,t,c or g
gcagaattactaatctgcattataattggagaatgggtattgttcatttttttttgtttctaaatttcaaccaatattgtgcatttttaaaagtttttttttaagagcacatttacacagccttgtttgtatgtaactcttagttgctctaactttaatgacgcatttacagagaatatttcctaaagatgtccttcatgaaaaggagaagtttggacttgacaacagtaatttacttaatttatcttaaatttggtttcagtgagcaaccctaattaacctgattttttgccggatatcactctcaatggaatcaaatcacaaatccgggggatggattgagcggcactcagaaggaagcagccctccgcgcactggtccagcgcacaggatatagcttggtccaggaaaatggacaaagaaaatatggtggccctccacctggttgggatgctgcacaccctgaaaggggctgtgaaatttttattggaaaacttccccgagacctttttgaggatgagcttataccattatgtgaaaaaatcggtaaaatttatgaaatgagaatgatgatggattttaatggcaacaatagaggatatgcatttgtaacattttcaaataaagtggaagccaagaatgcaatcaagcaacttaataattatgaaattagaaatgggcgcctcttaggggtttgtgccagtgtggacaactgccgattatttgttgggggcatcccaaaaaccaaaaagagagaagaaatcttatcggagatgaaaaaggttactgaaggtgttgtcgatgtcatcgtctacccaagcgctgcagataaaaccaaaaaccgaggctttgccttcgtggagtatgagagtcatcgagcagctgccatggcgaggaggaaactgctaccaggaagaattcagttatggggacatggtattgcagtagactgggcagagccagaagtagaagttgatgaagatacaatgtcttcagtgaaaatcctatatgtaagaaatcttatgctgtctacctctgaagagatgattgaaaaggaattcaacaatatcaaaccaggtgctgtggagagggtgaagaaaattcgagactatgcttttgtgcacttcagtaaccgagaagatgcagttgaggctatgaaagctttaaatggcaaggtgctggatggttcccccattgaagtcaccctagcaaaaccantggacaaggacagttatgttaggtatacccgaggcacaggtggaaggggcaccatgctgcaaggagagtatacctactctttgggccaagtttatgatcccaccacaacctaccttggagctcctgtcttctatcccccccagacctatgcagcaattcccagtcttcatttcccagccaccaaaggacatctcagcaacagagccattatccgagccccttctgttagagaaatttacatgaatgtacctgtaggggctgcgggagtgagaggactgggcggccgtggctatttggcatacacaggcctgggtcgaggataccaggtcaaaggagacaaaagagaagacaaactctatgacattttacctggggatggagctcaccccaatgaatcctgtcacattaaaaccccaaggaattaaactcgctccccagatattagaagagatttgtcagaaaaataactggggacagccagtgtaccagctgcactctgctattggacaagaccaaagacagctattcttgtacaaaataactattcctgctctagccagccagaatcctgcaatccaccctttcacacctccaaagctgagtgcctttgtggatgaagcaaagacgtatgcagccgaatacaccctgcagaccctgggcatccccactgatggaggcgatggcaccatggctactgctgctgctgctgctactgctttcccaggatatgctgtccctaatgcaactgcacccgtgtctgcagcccagctcaagcaagcggtaacccttggacaagacttagcagcatatacaacctatgaggtctacccaacttttgcagtgactgcccgaggggatggatatggcaccttctgaagatgcttttttaaatttaagaataagacac

SEQ ID NO: 12679 - DNA, 366 bp, Homo sapiens
ccggcagaggctgcggggcggacgcgcgggccggcgcagccatggtgaagattagcttccagcccgccgtggctggcatcaagggcgacaaggctgacaaggtgtcggcgtcggcccctgcgccggcctcggccaccgagatcctgctgacgccggctaggctggcccgagataacttcttccgctgtggtgtgctgtatgaggactccctgtcctcccaggtccggactcagatggagctggaagaggatgtgaaaatctacctcgacgagaactacgagcgcatcaacgtgcctgtgccccagtttggcggcggtgaccctgcagacatcatccatgacttccagcggggtctgactgcgtacc

SEQ ID NO: 12680 - DNA, 2029 bp, Homo sapiens
  misc_feature (1)...(2029): n = a,t,c or g
gcggaggcagagaccgaggctgcaccggcagaggctgcggggcggacgccgggccggcgcacantggtgaagattagcttccagcccgccgtggctggcatcaagggcgacaaggctgacaaggcgtcggcgtcggcccctgcgccggcctcggccaccgagatcctgctgacgccggctagggaggagcagcccccacaacatcgatccaagagggggagctcagtgggcggcgtgtgctacctgtcgatgggcatggtcgtgctgctcatgggcctcgtgttcgcctctgtctacatctacagatacttcttccttgcgcactggccccgagataacttcttccgctgtggtgtgctgtatgaggactccctgtcctcccaggtccggactcagatggagctggaagaggatgtgaaaatctacctcgacgagaactacgagcgcatcaacgtgcctgtgccccagtttggcggcggtgaccctgcagacatcatccatgacttccagcggggtctgactgcgtaccatgatatctccctggacaagtgctatgtcatcgaactcaacaccaccattgtgctgccccctcgcaacttctgggagctcctcatgaacgtgaagagggggacctacctgccgcagacgtacatcatccaggaggagatggtggtcacggagcatgtcagtgacaaggaggccctggggtccttcatctaccacctgtgcaacgggaaagacacctaccggctccggcgccgggcaacgcggaggcggatcaacaagcgtggggccaagaactgcaatgccatccgccacttcgagaacaccttcgtggtggagacgctcatctgcggggtggtgtgaggccctcctcccccagaaccccctgccgtgttcctcttttcttctttccggctgctctctggccctcctccttccccctgcttagcttgtactttggacgcgtttctatagaggtgacatgtctctccattcctctccaaccctgcccacctccctgtaccagagctgtgatctctcggtggggggcccatctctgctgacctgggtgtggcggagggagaggcgatgctgcaaagtgttttctgtgtcccactgtcttgaagctgggcctgccaaagcctgggcccacagctgcaccggcagccccaaggggaaggaccggttgggggagccgggcatgtgaggccctgggcaaggggatggggctgtgggggcggggcggcatgggcttcagaagtatctgcacaattagaaaagtcctcagaagctttttcttggagggtacactttcttcactgtccctattcctagacctggggcttgagctgaggatgggacgatgtgcccagggagggacccaccagagcacaagagaaggtggctacctgggggtgtcccagggactctgtcagtgccttcagcccaccagcaggagcttggagtttggggagtggggatgagtccgtcaagcacaactgttctctgagtggaaccaaagaagcaaggagctaggacccccagtcctgccccccaggagcacaagcagggtcccctcagtcaaggcagtgggatgggcggctgaggaacggggcaggcaaggtcactgctcagtcacgtccacgggggacgagccgtgggttctgctgagtaggtggagctcattgctttctccaagcttggaactgttttgaaagataacacagagggaaagggagagccacctggtacttgtccaccctgcctcctctgttctgaaattccatccccctcagcttaggggaatgcacctttttccctttccttctcacttttgcatgtttttactgatcattcgatatgctaaccgttctcagccctgagccttggagaggagggctgtaacgccttcagtcagtctctggggatgaaactcttaaatgctttgtatattttctcaattagatctcttttcagaagtgtctatagaacaataaaaatcttttacttctgaaaaaaaaaaaaa

SEQ ID NO: 12681 - DNA, 549 bp, Homo sapiens
gttctctccgagctatatcagaagcagcccaagattggctaccacctgctctactacctgagggccagcaaagccgccgcagggaagatgaacctgtacgagtcatttgcccaggctacccagctgggcgatctgcacacctgcctgatgatggacatgaaggcctgccaggaggacgatgtgcggctcctgtgccacctcacgccctccatctacacagagtttccagatgaaaccttgaggagcggagagctgctgaacatgatcgtggctgttattgactctgcacagctccaggagctggtctgccacgtgatgatgggtaacctggttatgtttcgaaaagactcagttctcaacatactcattcagagcctagactgggagacctttgagcagtattgtgcctggcagctctttctggcccacaatattcccctggagaccataatccccatcctgcagcacctcaaattacaaggagcacccagaggccctgttcctggcctactgcttcaactccgaagagaaaagcccagcgaggagatg

SEQ ID NO: 12682 - DNA, 1535 bp, Homo sapiens
cggcccaaccatggcgtcctccgcggccggctgcgtggtgatcgttggcagaattaaaactctgtacccattgaacaacagctgctcatttcccccagccccagcccctggcatccacccttctagctttctgtctctatgggtacctcagtggagtcattgggcgaagtgtggccatgctgtttgccagtggaggcttccaggtgaaactctatgacattgagcaacagcagataaggaacgccctggaaaacatcagaaaggagatgaagttgctggagcaggcaggttctctgaaaggctccctgagtgtggaagagcagctgtcactcatcagtggttgtcccaatatccaagaagcagtagagggtgccatgcacattcaggaatgtgttccagaagatctagaactgaagaagaagatttttgctcagttagattccatcattgatgatcgagtgatcttaagcagttccacttcttgtctcatgccttccaagttgtttgctggcttggtccatgtgaagcaatgcatcgtggctcatcctgtgaatccgccatactacatcccgctggttgagctggtcccccacccggagacggcccctacgacagtggacagaacccacgccctgatgaagaagattggacagtgccccatgcgagtccagaaggaggtggccggcttcgttctgaaccgcctggcaatatgcaatcatcagcgaggcctgggcggctagtggaggaaggaatcgtgtctcctagtgacctggaccttgtcatgtcagaagggttgggcatgcggtatgcattcattggacccctgggaaaccatgcatctcaatgcagaaggtatgttaagctactgcgacagatacagcgaaggcataaaacatgtcctacagacttttggacccattccagagttttccagggccactgctgagaaggttaaccaggacatgtgcatgaaggtccctgatgacccggagcacttagctgccaggaggcagtggagggacgagtgcctcatgagactcgccaagttgaagagtcaagtgcagccccagtgaatttcttgtaatgcagcttccactcctctcattggaggccctatttgggaacactgcaagcccttaatcagccctctgtgacataggtagcagcccacggagatcctaagctggctgtcttgtgtgcagcctgagtggggtggtgcaggccggtagtctgcccgtcactttggatcatagccctgggcctggcggcacagcagcacttgcgttctccggggctgtcgatttcctgccacctgggcagataacctggagatttccacctttttttttcagcttgattgcatttgactatattttacagccagtgattgtagtttcatgttaatatgtggcaaaatatttttgtaattattttctaatccctttctgagtactctggggccctgcatttatgaggcacctaccttcatttttaacgcttattctgaataaaagtttttgattccttaaaaaaaa

SEQ ID NO: 12683 - DNA, 1352 bp, Homo sapiens
agcactggaccttctgcctcttgcttgactcctactgtgggccttgagcgtctgccctctcctgaaatgtcagctgcctgcggtcttattcatttttgtgttccttgcaggactttagccggttgagaaggatcaagcaggcatttggagcacaggtgtctagaaacttttaaggggccggttcaagaaggaaaagttcccttctgctgtgaaactatttggcaagaggctggagggcccaatggctgcaaaatcgcaacccaacattcccaaagccaagagtctagatggcgtcaccaatgacagaaccgcatctcaagggcagtggggccgtgcctgggaggtggactggttttcactggcgagcgtcatcttcctactgctgttcgcccccttcatcgtctactacttcatcatggcttgtgaccaatacagctgcgccctgaccggcccttgtggtggacatcgtcaccggacatgctcggctctcggacatctgggccaagactccacctataacgaggaaagccgcccagctctataccttgtgggtcaccttccaggtgctttctgtacacgtctctccctgacttctgccataagtttctacccggctacgtaggaggcatccaggagggggccgtgactcctgcaggggttgtgaacaagtatcagatcaacgggctgaaaacctggctccttacgcacctgctctggtttgcaatcgctcatcttctggcctggctcttgcccaccatcatcttcgacaactggatcccactgctgtggtgcgccaacatccttggctatgccgtctccaccttcgccatggtcaagggctacttcttccccaccagcgccagagactgcaaattcacaggcaatttcttttacaactacatgatgggcatcgagtttaaccctcgggatcgggaagtggtttgacttcaagctgttcttcaatgggcgccccgggatcgtcgcctggaccctcatcaacctgtccttcgcagcgaagagcgggagctccacagccatgtgaccaatgccatggtcctggtcaacgtcctgcaggccatctacgtgattgacttcttctggaacgaaacctggtacctgaagaccattgacatctgccatgaccacttcgggtggtacctggggctggggcgactgtgtctgggctgccttatctttacacgctgcagggtctgtacttggtgtaaccaccccgttggcagctgttccaccccgcacgccgtgggcgtcctgctgctgggcctggtgggctactacatcttccgggtggccaaccaccagaaggacctgttccgccgcacggatgggcgctg

SEQ ID NO: 12684 - DNA, 1555 bp, Homo sapiens
ttggttagagatacagtgtgggtggtgggggtggtaggaaatgcaggttgaagggaattctctggggctttggggaatttagtgcgtgggtgagccaagaaaatactaattaataatagtaagttgttagtgttggttaagttgttgcttggaagtgagaagttgcttagaaactttccaaagtgcttagaactttaagtgcaaacagacaaactaacaaacaaaaattgttttgctttgctacaaggtggggaagactgaagaagtgttaactgaaaacaggtgacacagagtcaccagttttccgagaaccaaagggaggggtgtgtgatgccatctcacaggcaggggaaatgtctttaccagcttcctcctggtggccaagacagcctgttttcagagggttgttttgtttggggtgtgggtgttatcaagtgaattagtcacttgaaagatgggcgtcagacttgcatacgcagcagatcagcatcccttcgctgccccttagcaacttaggtggttgatttgaaactgtgaaggtgtgattttttcaggagctggaagtcttagaaaagccttgtaaatgcctatattgtgggcttttaacgtatttaagggaccacttaagacgagattagatgggctcttctggatttgttcctcatttgtcacaggtgtcttgtgattgaaaatcatgagccgaagtgaaattgcattgaatttcaagggaatttagtatgtaaatcgtgccttagaaacacatctgttgtcttttctgtgtttggtcgatattaataatggcaaaatttttgcctatctagtatcttcaaattgtagtctttgtaacaaccaaataaccttttgtggtcactgtaaaattaatatttggtagacagaatccatgtacctttgctaaggttagaatgaataatttattgtatttttaatttgaatgtttgtgctttttaaatgagccaagactagaggggaaactatcacctaaaatcagtttggaaaacaagacctaaaaagggaaggggatggggattgtggggagagagtgggcgaggtgcctttactacatgtgtgatctgaaaaccctgcttggttctgagctgcgtctattgaattggtaaagtaataccaatggctttttatcatttccttcttccctttaagtttcacttgaaattttaaaaatcatggttatttttatcgttgggatctttctgtcttctgggttccatttttttaaatgtttaaaaatatgttgacatggtagttcagttcttaaccaatgacttggggatgatgcaaacaattactgtccgttgggatttagagtgtattagtcacgcatgtatggggaagtagtctcgggtatgctgttgtgaaattgaaactgtaaaagtagatggttgaaagtactggtatgttgctctgtatggtaagaactaattctgttacgtcatgtacataattactaatcacttttcttcccctttacagcacaaataaagtttgagttctaaactcattaaaaaaataaaaaaaa

SEQ ID NO: 12685 - DNA, 1224 bp, Homo sapiens
gcgctcggcgcagctgttgcggggccatggcggggaccgcgctcaagaggctgatggccgtgtacaaacaattaacactgaatcctccggaaggaattgtagcaggccccatgaatgaagagaacttttttgaatgggaggcattgatcatgggcccagaagacacctgctttgagtttggtgtttttcctgccatcctgagtttcccacttgattacccgttaagtcccccaaagatgagatttacctgtgagatgtttcatcccaacatctaccctgatgggagagtctgcatttccatcctccacgcgccaggcgatgaccccatgggctacgagagcagcgcggagcggtggagtcctgtgcagagtgtggagaagatcctgctgtcggtggtgagcatgctggcagagcccaatgacgaaagtggagctaacgtggatgcgtccaaaatgtggcgcgatgaccgggagcagttctataagattgccaagcagatcgtccagaagtctctgggactgtgagacctggcctcgcacaggcgcgcacacaccgccaagcagctcagcattctcccccggcacacttagtgacagtgatgctctgtgctggtaccaaacaaggcagacttgcaagaaccacggcatcttttttttttttcaaacctttcctacttcaaacaggcttctcttctgaaatgatgacttaatgtcgaatattgacagcttactgcagttttacagtattcctcacaaagggcttcaggtagattatcagagctgtcagcactacctctccccgctgaaaccagcagttcatggcttcctgtggattccctccctccctggagtgttgagggggttgtacctgccagacttccaggggacgatggaatacccagaacgctccttctgaagaaatgggggccctgtagctgcagcacaggggaagggcccggcaccctttctgggtccttcctgggttccctgtgggccccatgaggagtccattacttcctttcttccttcatattttacaggcagatgcttttcttataatctaattacatcttttcatttgttatatattacaaaccatcacacttagaaatacttccaggaaatgcttttttgaagtgtgaattaataagaaatggggtaaatagaaaagaaatttattgctgattggccaggtgcggtggttcgtgcctgtaatcccagctct

SEQ ID NO: 12686 - DNA, 1490 bp, Homo sapiens
  misc_feature (1)...(1490): n = a,t,c or g
tcggcacaggcactttctggggcgaggtgacatggcgagagtcttggatcggtggacgtagacggtagacagttcgcgtgctattccttcgcctacttggcctacatgccttctgcccgtgaagcgatgtttcccctcgaaaggccgtagacgccgtcagaatcggtttttcagtgagttttgacccctccgacgctccgtctctgacagaatacggcgttcttcgtacccgccatcctccgcggacgccgtgccatggcgactctgctgcgccctgtcctccgtcggctctgcgggctcccgggcctacagcggcctgcggcagaaatgcccctccgggctaggagcgacggcgccggcccgctatactcgcaccacctncccacctccccgctgcagaaagcgctgttggccgccggctccgcggcgatggcgctctataacccctaccgccacgacatggtcgcagttctaggggagaccacaggacaccgcaccctgaaggtcctcagggaccagatgaggagggatccagagggtgcccagatcctgcaggagcgtccccggatttcgacatccaccctcgacctgggcaagctccagagcctgccggaaggctccctcggtcgcgagtatctccgtttcctggatgtgaacagggtctccccagacacccgagcacccacccgcttcgtggatgatgaggagctagcgtatgtgattcagcggtaccgggaggtgcacgacatgcttcacaccctgctggggatgcccaccaacatcctgggggatgatcgtggtgaaatggtttgaggctgtccagactggcctgcccatgtgcatcctgggtgcattctttggaccgatccgacttggcgctcagagcctgcaagtgctggtctcggagttgatcccatgggccgttcagaacgggcgcagagccccatgtgtcctcaacctgtactatgagcggcgctgggagcagtccctgagggctctgcgggaggagctgggcattacagcaccacccatgcacgtccagggcttggcctgagctcctgagccagcggggcctggcctacctcccccatcccctgcttcccttggaggcagagggctcccttgactacctttgttcctcttctttgaacactgacccttggacaacatttatcataatttgtcataaccactgctgagtggccttgaggacgaaccccgcagggagcaagcagtacagtggcattcccagggggaccagcagctacccaaggagaaccatgcatgaacagtatcagtcgtctgggctcatgctgggatgtcgcagtgctcctgttgcaactcctcccagccagccaggtttgctgggggccaggctgggtgtcctcacaggagtgagggctacacccaattccaaaagcctgagaagagagaagtggagggggaggcgagtgtgtgaataaaggctcccatcaggtcaaaaaaaaaaa

SEQ ID NO: 12687 - DNA, 534 bp, Homo sapiens
  misc_feature (1)...(534): n = a,t,c or g
gttttttttctcatgtaactatnnnnnnnnnnnnnnnnnnnnnnnnnnnnnnnnnnnnnnnnnnnnnnnnnnnnnnnnnnnnnnnnnnnnnnnnnnnnnnnnnnnnnnnnnnnnnnnnnnnnnnnnnnnnnnnnnnnnnnnnnnnnnnnnnnnnnnnnnnnnnnnnnnnnnnnnnnnnnnnnnnnnattcctccttnnnnnnnnnnnnnnnnnnnnnnnnnnnnnnnnnnnnnnnnnnnnnnnnnnnnnnnnnnnnnnnnnnnnnnnnnnnnnnnnnnnnnnnnnnnnnnnnnnnnnnnnnnnnnnnnnnnnnnnnnnnnnnnnnnnnnnnnnnnnnnnnnnnnnnnnnnnnnnnnnnnnnnnnnnnnnnnnnnnnnnnnnnnnnnnnnnnnnntattaatacaccacgttttgcttatccattcatctactgatgggcatgttattggaatactactatgancatctatgnacaagttttctgggaaaaaacttttttttttgaaacggagnttnnntttttgccagntggag

SEQ ID NO: 12688 - DNA, 626 bp, Homo sapiens
gaggaaaagtagtagtaatggacaagagtgattatataatcaaattaggagaacattctatcccctcagtgcggctactctccagtacacaacttggagaattaaaacctaagatccttttcattgattgtaatttttattttgtttgctttgtttacttctctaggctttctttctgtgccatttcagacaatcatagcacatctagatattagtaaaactgtttctctgcttaagttgctcatgtatcttgcaacctctcttcagaatttgcaccatcctgggattgtaaacctggaatgtatgtttgaaaccccagaacgagtctttgtagtaatggaaaagctgcatggagatatgttggaaatgattctatccagtgagaaaagtcggcttccagaacgaattactaaattcatggtcacacagatacttgttgctttgaggaatctgcattttaagaatattgtgcactgtgatttaaagccagaaaatgtgctgcttgcatcagcagagccatttcctcaggtgaagctgtgtgactttggatttgcacgcatcattggtgaaaagtcattcaggagatctgtggtaggaactccagcatacttagcccctgaagttct

SEQ ID NO: 12689 - DNA, 915 bp, Homo sapiens
gataaacggaaactattattatggttacattttatcttttggaagtccatgagtcccatgaaattggaggcaaactctattcatgtatgtattaataactctatgagcatatatggtttttctctggggagatgatcagtagtcttggtcagattttaagcagcctgcgaacctgaaaagatcaagactccatgccatggatgatggttctgatcactccccactggccctgtccccacaggctgcccagagaaaactgcgccaggccagcaccaacgtgaaacactggaatgtccagatgaaccggctgatgcattccaattgagcctggagataagcgtccgtacaccagcagctccttctcaggcttccagccccctctgcttgcccaccgtgactcctccctaaagcgcctgacccgctggggatcccagggcaacaggaccccctcgcccaacagcaatgagcagcagaagtccctcaatggtggggatgaggctcctgccccggcttccacccctcaggaagataaactggatccagcaccagaaaattagcctctcttagccccttgttcttcccaatgtcatatccaccaggacctggccacagctggcctgtgggtgatcccagctcttactaggagagggagctgaggtcctggtgccagggcccaggccctccaaccataaacagtccaggatggaacctggttcacccttcataccagctccaagccccagaccatgggagctgtctgggatgttgatccttgagaacttggccctgtgctttagacccaaggacccgattcctgggctaggaaagagagaacaagcaagccgggctacctgcccccaggtggccaccaagttgtggaagcacatttctaaataaaaactgctcttagaatga

SEQ ID NO: 12690 - DNA, 1633 bp, Homo sapiens
cgaacacggcacccgcactgcgcgtcagtggtgcaggcctggtatatggacgacgccccgggcgacccgcggcaaccccaccgccccgaccccggccgcccagtggcgctggagcagctgcggcggctcggggtgctctactggaagctggatgctgacaaatatgagaatgatccagaattagaaaagatccgaagagagaggaactactcctggatggacatcataaccatatgcaaagataaactaccaaattatgaagaaaagattaagatgttctacgaggagcatttgcacttggacgatgagatccgctacatcctgggatggcagtgggtacttcgacgtgagggacaaggaggaccagtggatccggatcttcatggagaagggagacatggtgacgctccccgcggggatctatcaccgcttcacggtggacgagaagaactacacgaaggccatgcggctgtttgtgggagaaccggtgtggacagcgtacaaccggccccgctgaccattttgaagccccgcgggcagttacgtgaaatttctggcacagaccgccctagcagtgctgcctgggaactaacacgcgcctcgtaaaggtccccaatgtaatgactgagcagaaaatcaatcactttctctttgcttttagaggatagccttgaggctagattatctttcctttgtaagattatttgatcagaatattttgtaatgaaaggatctagaaagcaacttggaagtgtaaagagtcaccttcattttctgtaactcaatcaagactggtgggtccatggccctgtgttagttcatgcattcagttgagtcccaaatgaaagtttcatctcccgaaatgcagttccttagatgcccatctggacgtgatgccgcgcctgccgtgtaagaaggtgcaatcctagataacacagctagccagatagaagacacttttttctccaaaatgatgccttggggtggggagtggtagggggaagagctcccaccctaaggggcacacactgagttgcttatgccacttccttgttcaaaataaagtaactgccttaatcttatactcatggcttggagttaccttatattcaggtatatgtgatattttgcctggtttgttaaaattgccccatttagattccttctataattgttcttatagataagtaatttatatatgagctgtgttagtattttttcagtgtgagatctctggattctttcacaataaagctgttgaattttaacaagagtattagtacataaattttctactcaacaattccgagataggattatgcctagtttgtcatatcacagaaaaactccaagttaacttcatgttttggaagggcaggtcgtttttaaagtatttctttttttaactggatgaaaaatcttcatgttaggattaattttcttaatcacctccacactgtacagaggaaactcaagccttaaatgtttaagtaaactctgtctcagttttaggattaaaataacccaccggtggtgtgatgatgccatataccgcagggcttgcttctgtcaagtgtgactctatctcagtaattaaaataagtgctgatctaaaaaaaaaaaaaaaaaaaaa

SEQ ID NO: 12691 - DNA, 655 bp, Homo sapiens
caacaggcccagaagggcagccacggtggacttgtcagacgtggaccctgaaatgacaatcacagcatgatttcaggcaggagcctgaaatggtacagctttggacatcggtttggcaaattcttttagagagaaacacacaccttccctaggacccagcaactccactcctaataaccaagtgaaatggaaggagttgtcctcagcaaaacgtgtgtgcggaagttcacagtcactttctcggtgataaccaagagctggaaaccactgcaacacccaccagcaggtgaacggattaacacactgggctagggccacacaatgagatgctccgtggcaacacaaaatgaaccgtggacacacactgcacggcggatgaatatgcagacatcaggccacgtgaagggagccaggccccgaggcgccacgctttgtgattcaggaaagaaagcacgcagccaaagagcgcaaagaggctcagaggaggcccgggtgccctggagagacgctgcgtcctgacgacacagcatccctgtcccgcagcggagatttcccagatgaaggatctcccggcgggagacagggccctgcacacaggtcctctgccacgctgctcaccatgcctgtgtgttatctccccatgaaaagtcaccta

SEQ ID NO: 12692 - DNA, 1431 bp, Homo sapiens
gctgggtccttccctctgaagttgaagtattggagtccatctatctagatgaactacaggtgattaaaggaaatggcagaacttcaccatgggagatctacatcactttgcatcctgccactgcagaggaccaggattcacagtatgtctgcttcactctggtgcttcaggtcccagcagagtatccccatgaggtgccacagatctctatccgaaatccccgaggactttcagatgaacagatccacacgatcttacaggtgctgggccacgtggccaaggctgggctgggcactgccatgctgtatgaactcattgagaaagggaaggaaattctcacagataacaacatccctcatggccagtgtgtcatctgcctctatggtttccaggagaaggaggcctttaccaaaacaccctgttaccactacttccactgccactgccttgctcggtacatccagcacatggagcaagagctgaaggcacaaggacaggagcaggaacaggaacggcagcatgctacaaccaaacagaaggcagtcggtgtgcagtgtccagtgtgcagagagcccctcgtgtatgatcttgcctcactgaaagcagcccctgaaccccaacagcccatggagctgtaccagcccagtgcagagagcttgcgccagcaagaagaacgcaagcggctctaccagaggcagcaggagcgggggggaatcattgaccttgaggctgagcgaaaccgatacttcatcagccttcagcagcctcctgcccctgcggaacctgagtcagctgtagatgtctccaaaggatcccaaccacccagcacccttgcagcagaactatccacctcaccagccgtccaatccactttgccacctcctctgcctgtgggacccagcacatatgtgagaagattccagggaccaggtcaaatcagcaaaggttgggcgaaacccagaaagctatgctagatccccccaagcccagtcgaggtccctggcgacagcccgaacggaggcaccaaagggaggggagtgccacgcccctaaaggtacccgtgacacccaggaactgccacctcctgaggggcccctcaaggagcccatggacctaaagccagaaccccatagccaaggagttgaaggtcctccacaagagaaggggcctggcagctggcaggggcccccaccccgcaggactcgggactgtgttcgctgggagcgctctaaaggccggacacccggttcttcctaccctcgcctgcctcggggccagggagcataccggcctggtactcggagggagtccctgggcctggaatctaaggatggttcctagcaggacttggtggggggaacagggaattggggatgggagggaggcaataaagatatttggccttctttggctttctttgcttagcaaaaa

SEQ ID NO: 12693 - DNA, 1927 bp, Homo sapiens
  misc_feature (1)...(1927): n = a,t,c or g
cgccgccccacgcggccgggctgggggtctagggggtccgcatctccctggctttccaagggctaaggtcgtgattctagggcggctgggcgtccagggcctcggtgggggtggcgtgtctgccctttttatctccccgcaaggcccccagtcttctagggaagccagtcagtgaagcgcggaggtccgggcgcgccgagagagagtccagtctttgaggaccgagtagtcctgggccacctcccgcctctgctgtcagaagcagcagctgccgccgtggaatccaaaatttcgggagctgtgaccctttcctcatgtaaaacgagtagtcttggacgatctgggcataggaaccaatcagaaacaatcgcttcagcaatcaagaccattgttcatcatggaggaacccatggatacctctgagcctctatctgcattaccattcactgggcagcagtcttttgagccaagtggcaaatttggacagtatccatcgatgcagatgaaccacatccaggcactggggaagtggaggacatagaacagctcaatcagtgtttgatccaacacttccatctcattaagacaagtttgatttttctttgctttttatttcatggaatacatgagaatctcttaactgttggagtttccaaggaggcatacctcatgacttcagttaatggaaagaacaaaactaaaatgctgtatggccaaagccacaaagggaaggatccgcaatttacattcttggagctatcatctgtactgtactgttgtgatctactgattggcattggcatagtagtaggggtcaagtgacagaatccgtgccagcagtctccaggttcagaagcaattcaagaccctgatgatagctctccagcaaccaacacatggtgattgtgccaacttgttgctcagttataatgcagggccagtgattggtttaagtgaagaccatggttgagatcatttgtctttggtctaatagaatttgagtctagtagaatttgagtctccagggaaagagctacttgaccaaattaaactagtagcaggtagagcatgaatgacagcatattataccatcaagatgttcttagagcagtgtatggatggatcgattgtactgccatcagttgtgactgacgttgtattcaaggagaaagagaaacttgtttagaaagcactttgaaagttttttgagtacgggggtgccctgtatcaccccgttatggttgaactttctccttcaaaattaccagacttggcagcagtggcaaattattgggctaaaagacttaatcagacatattctgggttcaaggctcctaatataatacctggtgcaaacattatacttccactcattcagatggttgcatcctgccaggcatccagtgggactgggaatatggacacttgaacattaaacatcctgaagaattttggaatgacaggttacaagtgaacataatcagttctctatattaaaaaaaaaaaaagatttgggcatagattgggctcacataatctttagagngattttttcatttttgtgaaagtacagaaattcttaactgcttatgaaatgctgattgttaaacagcatccacagctattttgtgttgtttccctgaccccaccctgaagaaaagaaaaattatggcatattgaaaacagcagtatgatgtaagagaaaagatcacaaattccttgagggtgggtcttttccatactcataagcctatttataatattcagagtaatttattgacacatattaatattccctcctatcccattaattgccaaatcatcaaacatttattgagcatctactctgtgtagggtgtaagcagtactggggacttacagtgataaaagacatagttttagccttaagtgatgtactgtttcactg

SEQ ID NO: 12694 - DNA, 1575 bp, Homo sapiens
  misc_feature (1)...(1575): n = a,t,c or g
gcgttaatatgaggtctatccaggaaaatggtgaactaaaaattgaaagcaagattgaagagatggttgaaccactaagagagaaaatcagagatttagaaaaaagctttacccagaaatacccaccagtaaagtttttatcagaaaaggatcggaaaagaattttgataacaggaggcgcagggttcgtgggctcccatctaactgacaaactcatgatggacggccacgaggtgaccgtggtggacaatttcttcacgggcaggaagagaaacgtggagcactggatcggacatgagaacttcgagttgattaaccacgacgtggtgggagcccctctacatcgaggttgaccagatataccatctggcatctccagcctcccctccaaactacatgtataatcctatcaagacattaaagaccaatacgattgggacattaaacatgttggggctggcaaaacgagtcggtgcccgtctgctcctggcctccacatcggaggtgtatggagatcctgaagtccaccctcaaagtgaggattactggggccacgtgaatccaataggacctcgggcctgctacgatgaaggcaaacgtgttgcagagaccatgtgctatgcctacatgaagcaggaaggcgtggaagtgcgagtggccagaatcttcaacacctttgggccacgcatgcacatgaacgatgggcgagtagtcagcaacttcatcctgcaggcgctccagggggagccactcacggtatacggatccgggtctcagacaagggcgttccagtacgtcagcgatctagtgaatggcctcgtggctctcatgaacagcaacgtcagcagcccggtcaaccctggggaaccccagaagaacacacaatcctagaatttgctcagttaattaaaaaccttgttggtagcggaagtgaaattcagtttctctccgaagcccaggatgacccacagaaaagaaaaccagacatcaaaaaagcaaagctgatgctggggtgggagcccgtggtcccgctggaggaaggtttaaacaaagcaattcactacttccgtaaagaactcgagtaccagggcaaataatcagtacatccccaaaccaaagcctgccagaataaagaaaggacggactcgccacagctgaactcctcacttttaggacacaagactaccattgtacacttgatgggatgtatttttggcttttttttgttgtcgtttaaagaaagactttaacaggtgtcatgaagaacaaactggaatttcattctgaagcttgctttaatgaaatggatgtgcctaaaagctcccctcaaaaaactgcagattttgccttgcactttttgaatctctctttttatgtaaaatagcgtagatgcatctctgcgtatttttcaagttttttttatcttgctgtgagggccttatggttgtgactgttcgttgacagttttatttactggtttctttgtgaagctgaaaaggaacattaagcgggacaaaaaatgccgattttatttataaaagtgggtaccntaataaatgagtcgttatactatgc

SEQ ID NO: 12695 - DNA, 2532 bp, Homo sapiens
gtcatgcagtgcgccggagaactgtgctctttgaggccgacgctaggggcccggaagggaaactgcgaggcgaaggtgaccggggaccgagcatttcagatctgctcggtagacctgggtgcaccaccaccatgttggctgcaaggctggtgtgtctccggacactaccttctagggttttccacccagctttcaccaaggcctcccctgttgtgaagaattccatcacgaagaatcaatggctgttaacacctagcagggaatatgccaccaaaacaagaattgggatccggcgtgggagaactggccaagaactcaaagaggcagcattggaaccatcgatggaaaaaatatttaaaattgatcagatgggaagatggtttgttgctggaggggctgctgttggtcttggagcattgtgctactatggcttgggactgtctaatgagattggagctattgaaaaggctgtaatttggcctcagtatgtcaaggatagaattcattccacctatatgtacttagcagggagtattggtttaacagctttgtctgccatagcaatcagcagaacgcctgttctcatgaacttcatgatgagaggctcttgggtgacaattggtgtgacctttgcagccatggttggagctggaatgctggtacgatcaataccatatgaccagagcccaggcccaaagcatcttgcttggttgctacattctggtgtgatgggtgcagtggtggctcctctgacaatattagggggtcctcttctcatcagagctgcatggtacacagctggcattgtgggaggcctctccactgtggccatgtgtgcgcccagtgaaaagtttctgaacatgggtgcacccctgggagtgggcctgggtctcgtctttgtgtcctcattgggatctatgtttcttccacctaccaccgtggctggtgccactctttactcagtggcaatgtacggtggattagttcttttcagcatgttccttctgtatgatacccagaaagtaatcaagccgtgcagaagtatcaccaatgtatggagttcaaaaatatgatcccattaactcgatgctgagtatctacatggatacattaaatatatttatgcgagttgcaactatgctggcaactggaggcaacagaaagaaatgaagtgactcagcttctggcttctctgctacatcaaatatcttgtttaatggggcagatatgcattaaatagtttgtacaagcagctttcgttgaagtttagaagataagaaacatgtcatcatatttaaatgttccggtaatgtgatgcctcaggtctgcctttttttctggagaataaatgcagtaatcctctcccaaataagcacacacattttcaattctcatgtttgagtgattttaaaatgttttggtgaatgtgaaaactaaagtttgtgtcatgagaatgtaagtcttttttctactttaaaatttagtaggttcactgagtaactaaaatttagcaaacctgtgtttgcatatttttttggagtgcagaatattgtaattaatgtcataagtgatttggagctttggtaaagggaccagagagaaggagtcacctgcagtcttttgtttttttaaatacttagaacttagcacttgtgttattgattagtgaggagccagtaagaaacatctgggtatttggaaacaagtggtcattgttacattcatctgctgaacttaacaaaactgttcatcctgaaacaggcacaggtgatgcattcctcctgctgttgcttctcagtgctctctttccaatatagatgtggtcatgtttgacttgtacagaatgttaatcatacagagaatccttgatggaattatatatgtgtgttttacttttgaatgttacaaaaggaaataactttaaaactattctcaagagaaaatattcaaagcatgaaatatgttgctttttccagaatacaaacagtatactcatgattgctaagtgtttttttatttttgcatatttattgaactgtctaattgaatacagcttgctcttgtcacctcttcaagctttcaagcctttatagaaaagcttctttgtggcttacactggaaattatgaaagcagtttttctcctaagacttttggtttctcgcattgcctctcagactaagcactaaaaagcaaagcaaaacagaactagttctgtcttaatgaaatatatcaacccaaaagtgtaatgaggaaaatgcttcattagtttcccctagcagacttttacttctcttacactgctacaccattactttcttgagacatttgtaagtcctttgatacagaagagttatatttagaagtctttaatgaagggaaagaagtctgtatgatgactgaggtgattgctctttttgacaaatgtttattacagtaatgcagaaatactgttaatcatctcaaagtacataggaggcttatttctgaaacaaaggtttcagccagatgttgattagtctaatttttccaag

SEQ ID NO: 12696 - DNA, 2241 bp, Homo sapiens
tacagcggcctcagggttcaggcaatgcaaataagcagtgaaaaggaagaagacgataatgaaaagagacaagatccaggtgataactgggaagaaggtggaggtggtggtggaggtatggaaaaatcttcaggtccctggaataaaacagctccagtacaagcacctcctgctccagtaattgttacagaaaccccagaaccagcgatgactagtggtgtgtataggcctcctggggccaggttaaccacaacaaggaaaacaccacaaggaccaccagaaatctacagtgatacacagttcccatccctgcagtcaactgccaagcatgtagaaagccggaaggataaagaaatggagaagagctttgaagtagtaagacacaaaaatagaggtagggatgaggtttcaaaaaaccaggcccttaaacttcagctagacaaccaatatgctgtgcttgaaaatcagaaaagcagccactcacaatacaattaaggaatgggctttgctaacccttctgaggtaactagactgcagctaaccaccaccaacagccattcatcatctgatctctgctggatctacagacaccgatgcagaccactcgatttcatgaccggccctattgcactatggaagttaaagtgtcacgactgctctatgcatattggatttaggggaattttcattgttacataaatgtgtgaactagtttcaacagtgttctttcatatttactctgcaaatacaaaaaaccaaaacctgcagccagtggtcatttcaaaatctttttatgttcagatactgagccttcataagggttgactacctcagatttgctgcactcattgtggacttcatgtggatcacaacttctggataagaagattacaactattaagtgtcgatgtgaaccttgcaaccagctctactggattcttatcagaaatcctgcataaaaagtcagccatctgggttctgatctgctgtaaaagatgaagatttaagtgaccttaattaacctgtcctgtgccctacccttaaggaatactctctgtagtaggctgttgttatattagacttcctggaacacaccgctgaaaagaactgatgtgttcagatcatctgtgtagggctgtgatttgtaatttaaactaattgtattctgaggtaaccacaaaataaattcaaccaaactggggtccaccaagtgggggaaggggaagggagagaataatcttgggggtttttttttttggtaatttttttatttggatagtgcttttttgttttgtttttgttctgcattaaggccttttttgctttgacttgaaataagtctttgacagagcatattgcttggttaattaagtaacctaaagtatgcattaggattgtgaaatgtctcgtgagtatgccaatcctgagggtggaaccaaatagcctttgatgaaaagggcagtggattctggaggctctacttcaggtgctgctataatgcctcatctaatcaggactaaattgtgtaggaaactgcagtgggaagaatatgctttctgctcaggctaagagggtcactgatctgtccttagaaattcagagtaacatgagcaaaacctcagctaaaacccatttaagtggcatggattgtgcatgatctttgataagaattcctcatgtacttgtgcctagtttttcaaggtattggctgttctatagatgcagtgattgtcccagctagctctgttaccagccttttggtgtgtctttatgttcatttggagagtcagggcgaaagacaggtgatgtagcacttctgtttttaataattattgcttaaaatacctattaatagttttgggtcatttaaagggacttgaggaagctacccaggattacagaagagtgtccacctaacaagatggtctggcagtttcctagttttgtatctggttcaatagaaatatgtgaaagtggtaatgtcatcatttgatgcagagtccgggtttctctataataaatccctttgccaaatgcatgagttgcagacttgctactggcaagagtgaagcaagtgggtgagtaaaactattttgacgtgggagcgttttcagataggagtttagtcttgacgaaagtgtccgtgcaggaattggactccgaggagggttacagtatctcctgacgggacctgccactcgcatctgggcaatgttgacaatttgaggttggcaggccaga

SEQ ID NO: 12697 - DNA, 1134 bp, Homo sapiens
ttttttttgtttttttttagctttataaagaacaatatttatttccatttacagcatcaaataccataaataaagctaaacattgtttgttttgctgtgtgcaaaatacagggttccgtgtggcactgtaaatgattaccaaaggtcacagacatgcgttgtgatgagatggggaggctagctaaagaggaggctgagaggggaggagggcactctttggttgacattctataaagggagggagactctgtaagagaagataaaacaagagcaacgactttgtactggccaggatctgcacaaatacagtgagcgtgcagcatgcagggccaggcaggcaggcccgggggtcagggtggtctgggccacatgcaggacagacgcccaccgcagcctgagaccgcgagtgttgcctaggacagctccactgtgcttggtgtgttgtttctcgttaagagtgtgttggtgattatcctgctgccccaggtacaagagtcagcagaaatgtgtgctttaagcagagtcacaggggcctggggctgaactgagtcatttctcaaagatatccctgcctgggatgatgatggctctaattgaagctctggcatcatctggggctttatgagccaagggagataagaagagccacagcaaaacccttgggtctacagtgccaggctgcaaccaaggcagcatttgcctagaatatttgtgattatgtgttcaacctacagagcatgtgtcaagcttgggatgaggcctgagagtaattaagttttttaaatccctccaaataatcacctatggttttgataaatgacattaacaatctttacattagagccaatttaagaaggcgctggtatgtatgagctttttgaggctgctcaaaaagtgttcttttcaaaggtgacagaggccccctcatggtattgtttcatgatcaaggtcgaccctcccaagaaagtaggctacttcgcagacgcaactggagaagcatgcacgcaggcagacccaagggagagaggagaggcggggcatgcacttggggtagaccaggctgccagctccatggaaatgaacacaggcagcgtggagtagggagagctgaggactcttctagatacccagagt

SEQ ID NO: 12698 - DNA, 4400 bp, Homo sapiens
aggaaactcccagggcccgcccaggacccccaagccgccgcggacgcagcccaggatggcggcccaggtgactctggaggacgcgctgtccaacgtggacctcctggaggagctgcccctgcccgaccagcagccctgcatcgagcccccgccatcctcgctgctctaccagccaaatttcaacactaactttgaagacagaaatgcatttgttactggcatcgcaagatacattgaacaagccaccgtccactctagcatgaacgagatgctggaggagggccaagaatatgctgtcatgctgtacacctggaggagctgctcccgggccatcccacaggtgaaatgtaacgagcagcctaacagagtggaaatctacgagaaaaccgtggaggttctggagcctgaggtcacaaaactgatgaatttcatgtacttccagagaaatgccattgagcgtttctgcggggaagtgaggcgcctgtgccatgccgagaggaggaaggacttcgtgtcagaagcctacctgatcacactgggcaaattcatcaacatgttcgctgtgctggacgagctgaagaacatgaagtgcagtgtgaagaacgaccactcagcgtacaagagggccgctcagtttttacgtaaaatggcagatccacagtccatccaggaatcgcagaatctgtccatgttcctggccaatcataacaagatcacacagtctctgcagcagcagctcgaagtgatttctggctacgaagagctcctggcagatattgtgaatctgtgtgtggattactacgagaacaggatgtatttgacgcccagtgagaaacacatgcttctcaaagtcatgggatttggtctgtacctgatggatgggagtgtcagtaacatctataagttggatgccaagaaaagaataaacttatccaaaatcgacaagtacttcaagcaactccaggtggttccgctatttggggacatgcaaatagaactggcaagatatatcaagaccagcgcccactacgaggaaaataaatctcgatggacgtgcacatcctccggcagcagccctcagtacaacatctgcgagcagatgatccagatccgcgaggaccacatgcgcttcatttcggagctggcgcgctacagcaacagcgaggtggtcacgggctcgggccgccaggaggcccagaagacggacgcggagtaccgcaagctcttcgacctggcgctgcagggcctgcagctgttgtcgcagtggagcgcgcacgtgatggaagtgtattcctggaagcttgtgcaccccaccgacaagtactccaacaaggactgccccgacagcgctgaagagtacgagcgtgccacgcgctacaactacaccagcgaggagaagtttgccctagtggaggtgatcgccatgatcaaaggcctgcaggtgctgatgggcaggatggagagcgtgttcaaccacgccatccggcacaccgtctatgccgcactgcaggacttctcccaggtgacccttagggagccgctgcggcaggccatcaagaagaagaagaacgtcatccagagtgtcctgcaggccatcaggaagaccgtgtgtgactgggagacggggcatgagcccttcaatgacccagccttgcggggcgagaaggaccccaagagcggcttcgacataaaagtaccacgccgcgccgtgggaccctccagcactcagctttacatggtgagaaccatgctagagtccctcattgcagacaaaagtggttccaagaaaaccttgagaagtagccttgaggggcccaccatattggacatagaaaaatttcatcgagagtcattcttctacactcacttgataaatttcagtgaaacgctgcagcagtgctgtgacctttcgcagctgtggttccgagagttcttcctggagctgaccatgggcaggaggatccagttccccattgagatgtcgatgccctggatcctgacggaccacatcctggagaccaaggaggcatcgatgatggagtacgtgctctactccctggacctgtacaatgacagcgcccactacgcgctcaccaggttcaacaagcagttcctgtacgacgaaattgaggccgaggtgaatctatgttttgaccaatttgtttacaagctagcagaccagatatttgcctattataaggttatggcaggaagtttgcttcttgataaacggttacgatcagaatgcaagaatcagggagccacgatccacctcccgccgtctaaccgctacgagacgctgctgaagcagaggcatgtgcagctcctcggcagatcaatagacctcaatcgtctgatcacccagcgcgtctcagcagccatgtataagtccctagaactggcgattggacgatttgaaagtgaagatttgacctccatagttgagctggatggcctgttggaaatcaaccgcatgacccacaagctgctgagccggtacctgacgctggacggcttcgacgccatgttccgggaggccaaccacaacgtgtcagcgccctacgggaggatcaccctgcacgtcttctgggagctcaactatgacttcctgcccaactactgctacaacggctctaccaaccggtttgttcggacagtgttaccattttctcaggaatttcaaagagataagcagcctaatgcacagcctcagtatctgcatggatccaaggctttgaacttggcctactccagcatttacggcagctaccggaacttcgtgggacctccacactttcaagtcatctgccggcttctcggctaccagggtatcgccgtggtcatggaggagctgctgaaggtcgtcaagagcctgctgcaaggcacaatcctgcagtacgtgaagacgctgatggaggtgatgcccaagatctgccgcctgccccggcacgagtacggctctcctggtatcctggagttcttccaccaccagctgaaggacatcgtggagtacggcagagctgaagacggtgtgcttccagaacctgcgggaggtggggaacgccatcctcttctgcctgctcatcgagcagagcctgtctttagaagaagtgtgtgacctgctgcacgcggctcctttccagaacatcttgccgcgagtccatgtgaaagagggggagagacttgatgccaaaatgaaaagactagaatcaaagtacgccccgctgcatcttgtcccactgattgaaagactggggacccctcagcaaattgccatcgcaagagagggggacctgctgacaaaggagcgcctctgctgcggcctgtccatgtttgaggtcatcctgacacggatccggagctttctggatgaccccatctggcgcgggcctctgcccagcaatggggtcatgcatgtggacgagtgtgtggagtttcacagactgtggagtgccatgcagtttgtctactgcattcccgtggggacacacgagttcacagtcgagcagtgctttggtgatgggctacactgggctggctgtatgatcatcgtacttcttgggcagcagcggcgttttgctgtgctgggatttctgctaccatctacttaaagtccagaaacatgatgggcaaagatgagattattaaaaatgtgcctttgaagaagatggtggagagaattcgcaagttccagattctcaatgatgagatcatcaccatcctggataagtacctgaagtcaggcgacgggggagggcacgccagtggaagcatgtgcgctggcttccagccgcccatccaccagtccctcgccagcagctgagggcacgcgctgcactccgtaactcaacatggcatgcctttctctccgtaaactatttagtgagatttttagggactatttttcagtatctctgtacctgttaaagggggtgcttttcgatctaaaaacttaattttataaaattgacttatttttctagactaaaattgtatatgcttttggtaattaggaactcttgagaatattggctgctgattgttgccatcacgttcctacaaaattgtttttctatgggatgttctggcagctgtgtcataaaatgctgctgggttcattcattcattccataagaaacttaataccagcaaatgcattaaatcccttgccagttaccattaactgtaactatttagcttttgtttagggatctttctgatggtcttttatgagcaatcttagttctaagtcattgttcccatcccttttttgtgtgtttcagaaaatagtgaacttgattcccctgcttccactaaatccagttgtgacaaaatctaacgtgacatcagatcgaaaggttatagaaataaaactaatgagatctaaaaaaaaaaaaaaa

SEQ ID NO: 12699 - DNA, 521 bp, Homo sapiens
  misc_feature (1)...(521): n = a,t,c or g
tttgaanaccatttnnnnnnnnnnnnnnnnnnnnnnnnnnnnnnnnnnnnnnnnnnnnnnnnnnnnnnnnnnnnnnnnggcacgagccaccgccatgttccaggggtctttgtctactctgctgacctccacacccaagctgcgaacaggagccaacgcacagtcgctgttccatggtgctggttcccttccagtgcgggacagagcccagaggagagtgtgtcccgggcaactccacacaaacatgtactgagtacctgctgcatgccaggcagcacactcagccctcgggatgcagcagtgagcagcacagagctcctgtccatgggggagagacggaaatgtggaatggtgtgtgtgaacaaacacacacccagcaggctggatttcgtggtgagtgctgtgaagggaattgagcaaggaggtgcagtcgaggggatgaggcaaggtgaggggttctctgtggtgccgacactggagttagccatgtggatgcagggaacagtgtccaggcagaagga

SEQ ID NO: 12700 - DNA, 3376 bp, Homo sapiens
tacaaccaggctcaactgttgcatggtagcagatttgcaaacatgagtgctgaggggtaccagtacagagcgctgtatgattataaaaaggaaagagaagaagatattgacttgcacttgggtgacatattgactgtgaataaagggtccttagtagctcttggattcagtgatggacaggaagccaggcctgaagaaattggctggttaaatggctataatgaaaccacaggggaaaggggggactttccgggaacttacgtagaatatattggaaggaaaaaaatctcgcctcccacaccaaagccccggccacctcggcctcttcctgttgcaccaggttcttcgaaaactgaagcagatgttgaacaacaagctttgactctcccggatcttgcagagcagtttgcccctcctgacattgccccgcctcttcttatcaagctcgtggaagccattgaaaagaaaggtctggaatgttcaactctatacagaacacagagctccagcaacctggcagaattacgacagcttcttgattgtgatacaccctccgtggacttggaaatgatcgatgtgcacgttttggctgacgctttcaaacgctatctcctggacttaccaaatcctgtcattccagcagccgtttacagtgaaatgatttctttagctccagaagtacaaagctccgaagaatatattcagctattgaagaagcttattaggtcgcctagcatacctcatcagtattggcttacgcttcagtatttgttaaaacatttcttcaagctctctcaaacctccagcaaaaatctgttgaatgcaagagtactctctgaaattttcagccctatgcttttcagattctcagcagccagctctgataatactgaaaacctcataaaagttatagaaattttaatctcaactgaatggaatgaacgacagcctgcaccagcactgcctcctaaaccaccaaaacctactactgtagccaacaacggtatgaataacaatatgtccttacaaaatgctgaatggtactggggagatatctcgagggaagaagtgaatgaaaaacttcgagatacagcagacgggacctttttggtacgagatgcgtctactaaaatgcatggtgattatactcttacactaaggaaagggggaaataacaaattaatcaaaatatttcatcgagatgggaaatatggcttctctgacccattaaccttcagttctgtggttgaattaataaaccactaccggaatgaatctctagctcagtataatcccaaattggatgtgaaattactttatccagtatccaaataccaacaggatcaagttgtcaaagaagataatattgaagctgtagggaaaaaattacatgaatataacactcagtttcaagaaaaaagtcgagaatatgatagattatatgaagaatatacccgcacatcccaggaaatccaaatgaaaaggacagctattgaagcatttaatgaaaccataaaaatatttgaagaacagtgccagacccaagagcggtacagcaaagaatacatagaaaagtttaaacgtgaaggcaatgagaaagaaatacaaaggattatgcataattatgataagttgaagtctcgaatcagtgaaattattgacagtagaagaagattggaagaagacttgaagaagcaggcagctgagtatcgagaaattgacaaacgtatgaacagcattaaaccagaccttatccagctgagaaagacgagagaccaatacttgatgtggttgactcaaaaaggtgttcggcaaaagaagttgaacgagtggttgggcaatgaaaacactgaagaccaatattcactggtggaagatgatgaagatttgccccatcatgatgagaagacatggaatgttggaagcagcaaccgaaacaaagctgaaaacctgttgcgagggaagcgagatggcacttttcttgtccgggagagcagtaaacagggctgctatgcctgctctgtagtggtggacggcgaagtaaagcattgtgtcataaacaaaacagcaactggctatggctttgccgaggccctataacttgtacagctctctgaaagaactggtgctacattaccaacacacctcccttgtgcagcacaacgactccctcaatgtcacactagcctacccagtatatgcacagcagaggcgatgaagcgcttactctttgatccttctcctgaagttcagccaccctgaggcctctggaaagcaaagggctcctctccagtctgatctgtgaattgagctgcagaaacgaagccatctttctttggatgggactagagctttctttcacaaaaaagaagtaggggaagacatgcagcctaaggctgtatgatgaccacacgttcctaagctggagtgcttatcccttctttttctttttttctttggtttaatttaaagccacaaccacatacaacacaaagagaaaaagaaatgcaaaaatctctgcgtgcagggacaaagaggcctttaaccatggtgcttgttaatgctttctgaagctttaccagctgaaagttgggactctggagagcggaggagagagaggcagaagaaccctggcctgagaaggtttggtccagcctggtttagcctggatgttgctgtgcacggtggacccagacacatcgcactgtggattatttcattttgtaacaaatgaacgatatgtagcagaaaggcacgtccactcacaagggacgctttggggagaatgtcagttcatgtatgttcagaagaaattctgtcatagaaagtgccagaaagtgtttaacttgtcaaaaaacaaaaacccagcaacagaaaaatggagtttggaaaacaggacttaaaatgacattcagtatataaaatatgtacataatattggatgactaactatcaaatagatggatttgtatcaataccaaatagcttctgttttgttttgctgaaggctaaattcacagcgctatgcaattcttaattttcattaagttgttatttcagttttaaatgtaccttcagaataagcttccccaccccagtttttgttgcttgaaaatattgttgtcccggatttttgttaatattcatttttgttatccttttttaaaagtaaatgtacaggatgccagtaaaaaaaaaaaaatggcttcagaattaaaactatgaaatattttacagtttttcttgtacagagtacttgctgttagcccaaggttaaaaagttcataacagattttttttggactgttttgttgggcagtgcctgataagcttcaaagctgctttattcaataaaaaaaaaacccgaattcactgg

SEQ ID NO: 12701 - DNA, 1077 bp, Homo sapiens
tttttttttttttcaaatgtatcaaattattaaaaatgcagcatttttcacatgagctttaaagatgtggaagatggggtacaattaaaaccatgagagttgtgcagggaacagccgtagggccctggtttgcaccttcagatattgcctgctcccaaaaattcagacccccagatgcagggcaagacaataagaaagggtgagtgcaagcaaggagagcctcctgcctaagaggctgaggtcccctctggttcccaaggatgggatgtcagccttgaccttccggggtctgcagtggccagaggctgcctgtcgccccttcctcctccccttcttgggcactgtgggagcttctgggtcctgctggaggctggtcccctcaggccgctgggttgcagtcctcttaggaaggtctctctttgcccttcgtgtcctggaaggggccttgcttggaggcaaagcgtcctccactctgtcctcaggactcagctgtgtggccttggatttctttttgcgggacttgcgccctgcaggacactggtgttggagttggagggtcctatcctgcccaggggtgactcccagggttgcagggggatagggtggagaagggtgctgtagcccttgcaggcgtgaagtcctttctgctctcttagcctattacattaggagtagcttacctttgggtgccaacggtcccaggatccccctaaaatgggatggggataattcaggaatcagcctgggttggcacaggggcggtattccttggagaggcaggactcacacacacccatccagatcagtgtagcttctcccttaggaagcctctaggacatcccccatgttagagtccacatcagcaaagctgtctcccttggctactttcacttgggctacctgccttgggctacttccactagctgcaaccctgggacgcatgggaggggaggggtgtgaccctcaggaacagtgtggtccttggagggtctagacagaccctgagcatcaccaccccagttattgtgaccccacgtttccacccatcagcctcctggggtctctgcctgtgtgaac

SEQ ID NO: 12702 - DNA, 484 bp, Homo sapiens
gcggcgcccaggtggagcgcgtcgggcccctggatccggggaaacggccaaggttgcgggagtctcttcactctcgtctcaaagccattttgtgccgctgccgctgcctctacggccataaatgcccagagattagcggagaagctccgagcccagaaacgggaacaagacacaaagaaggagccggtgtccacaaacgctgttcagcggagagtgcaagaaatagtgcggttcacacggcagctgcagcgagtccaccccaacgtgcttgctaaggcactgacccgaggaattctccaccaggacaagaaccttgtggtcatcaataagccctacggtctccctgtgcatgtccccatgccctcagcaggagtcgtggacatccccattgtggagaaggaggcgcaaggccagcagcaacaccacaagatgacattgtccccgagctaccgcatggacgatgggaaaatggtgaaagtgcggc

SEQ ID NO: 12703 - DNA, 329 bp, Homo sapiens
gccaggattgagtcctatgaaggaagggaaaagaaaggcatatctgatgtcaggaggactttctgtttgtttgtcacctttgacctcttattcgtaacattactgtggataatagagttaaatgtgaatggaggcattgagaacacattagagaaggaggtgatgcagtatgactactattcttcatattttgatatatttcttctggcagtttttcgatttaaagtgttaatacttgcatatgctgtgtgcagactgcgccattggtgggcaatagcgcttttctctcaaggggcttttggctatgtgctgcccatcatttcattcat

SEQ ID NO: 12704 - DNA, 1365 bp, Homo sapiens
cgccaagccccgcccctcaggccggggcgcgaccgcggatccgcagttcccgggccagcctggggcggccggccaggaaccacccgttaaggtgtcttctctttagggatggtgaggttggaaaaaggctcctgtaaccctcctccaggatgaaccacctgccagaagacatggagaacgctctcaccgggagccagagctcccatgcttctctgcgcaatatccattccatcaaccccacacaactcatggccaggattgagtcctatgaaggaagggaaaagaaaggcatatctgatgtcaggaggactttctgtttgtttgtcacctttgacctcttatttcgtaacattactgtgggataatagagttaaatgtgaatggaggcattgagaacacattagagaaggaggtgatgcagtatgactactattcttcatattttgatatatttcttctggcagtttttcgatttaaagtgttaatacttgcatatgctgtgtgcagactgcgccattggtgggcaatagccgttgacaacggcagtgaccagtgcctttttactagcaaaagtgatcctttcgaagcttttctctcaaggggcttttggctatgtgctgcccatcatttcattcatccttgcctggattgagacgtggttcctggatttcaaagtgttacctcaagaagcagaagaagaaaacagactcctgatagttcaggatgcttcagagagggcagcacttatacctggtggtctttctgatggtcagttttattcccctcctgaatccgaagcaggatctgaagaagctgaagaaaaacaggacagtgagaaaccacttttagaactatgagtactacttttgttaaatgtgaaaaaccctcacagaaagtcatcgaggcaaaaagaggcaggcagtggagtctccctgtcgacagtaaagttgaaatggtgacgtccactgctggctttattgaacagctaataaagatttatttattgtaatacctcacagacgttgtaccatatccatgcacatttagttgcctgcctgtggctggtaaggtaatgtcatgattcatcctctcttcagtgagactgagcctgatgtgttaacaaataggtgaagaaagtcttgtgctgtattcctaatcaaaagacttaatatattgaagtaacacttttttagtaagcaagatacctttttatttcaattcacagaatggaatttttttgtttcatgtctcagatttattttgtatttcttttttaacactctacatttcccttgttttttaactcatgcacatgtgctctttgtacagttttaaaaagtgtaataaaatctgacatgtcaatgt

SEQ ID NO: 12705 - DNA, 1735 bp, Homo sapiens
  misc_feature (1)...(1735): n = a,t,c or g
tggcacgaggccgtgtccaagatgttttcagttcaacacacagtctcctccattattttgatcgtctgattcttaccggagccgaaagcaaaagtaatggggaagagggctatggccggagcttgagatacgccgctctgaatcttgccgccctgcactgccgcttcggtcactatcaacaggcagagctcgccctgcaggaggcaattaggattgcccaggagtccaacgatcacgtgtgtctccagcactgtttgagctggctttatgtgctggggcagaagagatccgatagctatgttctgctggagcattctgtgaagaaggcagtacattttgggttaccgtacctcgcctccctggggaatacagtcccttgttcaacagagagcttttgctgggaagacggcaaacaagctgatggatgccctaaaggactccgacctcctgcactggaaacacagcctgtcagagctcatcgatatcagcatcgcacagaaaaccggccatctggaggctgtatgggccgcagcaccatggcactgcaacaggcccagatgttgctgagcatgaacagcctggaggcggtgaatgcgggcgtgcagcagaacaacacagagtcctttgctgtcgcactctgccacctcgcagagctacacgcggagcagggctgttttgctgcagcttctgaagtgttaaagcacttgaaggaacgatttccgcctaatagtcagcacgcccagttatggatgctatgtgatcaaaaaatacagtttgacagagcaatgaatgatggcaaatatcatttggctgattcacttgttacaggaatcacagctctcaatagcatagagggtgtttataggaaagcggttgtattacaagctcagaaccaaatgtcagaggcacataagcttttacaaaaattgttggttcattgtcagaaactgaagaacacagaaatggtgatcagtgtcctactgtccgtgggcagagctgtactggcgatcttcctcccctaccatcgcgctgcccatgctcctgcagggctctggccctctccaaggagtaccggttacagtacttggcctctgaaacagtgctgaacttggcttttgcggcagctcattcttggaatcccagaacaggccttaagtcttctccacatggccatcgagcccatcttggctgacggggctatcctggacaaaggtcgtgccatgttcttaagtggccaagtgccaaggtggcttcagcagcttccctacgatcagccgaagaaagcagaagctctggaggctgccatcgagaacctcaatgaagccaagaactattttgcaaaggttgactgcaaagagcgcatcagggacgtcgtttacttccaggccagactctaccataccctggggaagacccaggagaggaaccggtgtgcgatgctcttccggcagctgcatcaggagctgccctctcatggggtacccttgataaaccatctctagagaggacatccctgctgggctgctgtgcagagtataagattttggacttgttcatgtcccctctctccctataaatgatgtatttgtgacaccctatcttgtcaataaacagcattctgattagtttgtcttattttgttgctagtaactacgtatttgttttantccccttttcttcccttttggtagcaaaggacnccaactttttcttaataaatgggtattttgctaac

SEQ ID NO: 12706 - DNA, 1210 bp, Homo sapiens
acgcccgggctgtgggaataagatggcggggaagaagaatgttctgtcgtctctcgcagtttacgcggaagattcagagcccgagtctgatggcgaggctggaatcgaggcggtgggcagcgcggctgaggagaaaggcggattggtatctgatgcctatggggaggatgacttttctcgtctagggggtgatgaagatggttatgaagaagaagaagatgagaacagtagacagtcggaagatgacgattcagagactgaaaaacctgaggctgatgacccaaaggataatacagaagcagaaaagcgagacccccaggaactcgtggcctccttttctgaaagagttcggaacatgtcgcctgatgaaatcaagatcccgccagaaccccctgggcagatgttcaaatcacttgcaagacaagatccagaagctttatgaacgaaagataaaggagggaatggatatgaactacattatccaaaggaagaaagaatttcggaaccctagcatctacgagaagctgatccagttctgtgccattgacgagcttggcaccaactacccaaaggatatgtttgatccccatggctggtctgaggactcctactatgaggcattagccaaggcccagaaaattgagatggacaaattggaaaaggccaaaaaggagcgaacaaaaattgagtttgtgacgggcaccaaaaaaggcaccacgaccaacgccacgtccaccaccactaccactgccagcacagctgttgcagatgctcagaagagaaagagcaagtgggattcggctatcccagtgacaacgatagcccagcccaccatcctcaccaccacagccaccctgccagctgttgtcacggtcaccaccagcgccagcggctccaagaccaccgtcatctctgctgtgggcaccattgtgaagaaggccaagcagtgacctgaggggccacccctaggacttgaaaggaccgtgcagcccagtgaccactgcccagtgggaggcgccactttgtatatttcaggactgggacctactccccagatgccacctgagaggagcttctgtttggcattccagatggaaggacaggcagcacgggagccaggcgctgtggacagggtctgtccacgcaccacctggggtctgccgcctattaaaagtgccgtattcttacctcttggcatctcagaaaaaaa

SEQ ID NO: 12707 - DNA, 457 bp, Homo sapiens
aaaagaggaagcagaatccccacagcgagaatgaagattcagactggctgataactggaggaagctcaggtgggagtgcagctgctgtatcggcgttcacatgctacgcggctttaggatcagatacaggaggatcgaccagaaatcctgctgcccactgtgggcttgttggtttcaaaccaagctatggcttagtttcccgtcatggtctcattcccctggtgaattcgatggatgtgccaggaatcttaaccagatgtgtggatgatgcagcaattgtgttgggtgcactggccggacctgaccccagggactctaccacagtacatgaacctattaataaaccattcatgcttcccagtttggcagatgtgagcaaactatgtataggaattccaaaggaatatcttgtaccggaattatcaagtgaagtacagtctctttggcccaaactgct

SEQ ID NO: 12708 - DNA, 1541 bp, Homo sapiens
  misc_feature (1)...(1541): n = a,t,c or g
ttctcccgcaaccttcccttcgctccctcccgtcccccccagctcctagcctccgactccctccccccctcacgcccgccctctcgccttcgccgaaccaaagtggattaattacacgctttctgtttctctccgtgctgttctctcccgctgtgcgcctgcccgcctctcgctgtcctctctccccctcgccctctcttcggcccccccctttcacgttcactctgtctctcccactatctctgcccccctctatccttgatacaacagctgacctcatttcccgataccttttcccccccgaaaagtacaacatctggcccgccccagcccgaagacagcccgtcctccctggacaatcagacgaattctccccccccccccaaaaaaaagccatccccccgctctgccccgtcgcacattcggcccccgcgactcggccagagcggcgctggcagaggagtgtccggcaggaggggccaacgcccgcttgtttcggtttgcgacacgcagtcagggaggtgggcggcaggttcgtcgggctttccagacaccaatgggaatcccaatggggaagttgatgctggtgcttctcaccttcttggccttcgcctcgtgctggcattgctgcttaccgccccagtgagaccctgtgcggcggggcagctggtggacaccctccagttcgtctgtggggaccgcggcttctacttcagcagggcccgcaagccgtgtgagccgtcgcagccgtggcatcgttgaggagtgctgtttccgcagctgtgacctggccctcctggagacgtactgtgctaacccccgccaagtccgagagggacgtgtcgacccctccgaccgtgcttccggacaacttccccagataccccgtgggcaagttcttccaatatgacacctggaaggcagttccacccagcggcntgcgcaggggccctgcctgccctgcctgcgtgcccgccggggtcacgtgctcgccaaggagctcgaggcgttcagggaggccaaacgtcaccgtcccctgattgctctacccacccaagaccccggnccacgggggccgccccccccagagatggccagcaatcggaagtgagcaaaactgccgcaagtctgcagcccggcgccaccatcctgcagcctcctcctgaccacggacgtttccatcaggttccatcccgaaaatctctcggttccacggtccccctggggcttctcctgacccagtccccgtgccccgcctccccgaaacaggctactctcctcggccccctccatcgggctgaggaagcacagcagcatcttcaaacatgtacaaaatcgattggctttaaacacccttcacataccctccccccaaattatccccaattatccccacacataaaaaatcaaaacattaaactaacccccttcccccccccccacaacaaccctcttaaaactaattggctttttagaaacaccccacaaaagctcagaaattggctttaaaaaaaacaaccaccaaaaaaaatcaattggct

SEQ ID NO: 12709 - DNA, 784 bp, Homo sapiens
aagtctactgcgggctggtccgggctcctcaggttcagacccgaccgttatccagtcggttcgtggagaggagaggtgcactttacaggtccccgatgaaccaagagaaccctccaccatatccaggccctggtccaacggccccatacccaccttatccaccacaaccaatgggtccaggacctatggggggaccctacccacctcctcaagggtacccctaccaaggatacccacagtacggctggcagggtggacctcaggagcctcctaaaaccacagtgtatgtggtagaagaccaaagaagagatgagctaggaccatccacctgcctcacagcctgctggacggctctctgttgctgctgtctctgggacatgctcacctgaccagaccagcccagccgtcctgtcctgccagctctgctgccacctctgacaggtgtgcctgcccccatctcttctgattgctgttaacaaatgactagctttgcacagacacctctaccttcagcactatgggattctagattaatgggggttgctactgtttaattcagtgacttgatctttttaatgtccaaaatccatttcttattgatctttaaagatgtgctaaatgacttttttggccaaaggcttagttgtgaaaaatataatttttaaattatacattcaaggtagtggccaaatgtaacacatcaatcatggaatgatttctctgctaacagccgcctgtatgtttcaataaatttgtccaaagctcaaaaaaaaaaaaaaaaaaa

SEQ ID NO: 12710 - DNA, 1057 bp, Homo sapiens
  misc_feature (1)...(1057): n = a,t,c or g
ccggccgatcccacctctcctcgaccctggacgtctaccttccggaggcccacatcttgcccactccgcgcgcggggctagcgcgggtttcagcgacgggagccctcaagggacatggcaactacagcggcgccggcgggcggcgcccgaaatggagctggcccggaatggggagggttcgaagaaaacatccaggggcggaggctcagctgtgattgacatggagaacatggatgatacctcaggctctagcttcgaggatatgggtgagctgcatcagcgcctgcgcgaggaagaagtagacgctgatgcagctgatgcagctgctgctgaagaggaggatggagagttcctgggcatgaagggctttaagggacagctgagccggcaggtggcagatcagatgtggcaggctgggaaaagacaagcctccagggccttcagcttgtacgccaacatcgacatcctcagaccctactttgatgtggagcctgctcaggtgcgaagcaggctcctggagtccatgatccctatcaagatggtcaacttcccccagaaaattgcaggtgaactctatggacctctcatgctggtcttcactctggttgctatcctactccatgggatgaagacgtctgacactattatccgggagggcaccctgatgggcacagccattggcacctgcttcggctactggctgggagtctcatccttcatttacttccttgcctacctgtgcaacgcccagatcaccatgctgcagatgttgggcactgctgggctatggcctctttgggcattgcattgtcctgttcatcacctataatatccacctccacgccctcttctacctcttctggctgttggtgggtggactgtccacactgcgcatggtagcagtgttggtgtctcggaccgtgggccccacacagcggctgctcctctgtggcaccctggctgccctacacatgctcttcctgctctatctgcattttgcctaccacaaagtggtagaaggggatctnggaaaacactggaggggccccaacatccc

SEQ ID NO: 12711 - DNA, 1798 bp, Homo sapiens
  misc_feature (1)...(1798): n = a,t,c or g
agccattcaggtaaacttggcagtttgttgccacatctttaatgatctgattcctactgctaatattttctttggaatgttgtattttgttttcttcttttaagacataaccgcataccttctatttgtnnnnnnnnnnnnnnnnnnnnnnnnnnnnnnnnnnnnnnnnnnnnnnnttacaattattaacaccaattgtaggacattttcaccaattccaaaaaaactccatacccattagtagttattccacttttccagcccctggcaaccactaggtactttctgtctatggataatgttgtgaaagcttgtgttttaacttctcaaacagagcagacaaaaggatcggcaaaaggaaatggacaattttctggctcagatggaagcaaagtactgcaaatcttccaaaggaggagggaaaaaatctgctctcaagaaagaaaagaaataatggaatttttctcttcaaaggtccttaggtgtaaattgatgccatcgtaggcaaggtgcaggcaggatttgaaggcaaaagtcaattcagctcttgagaaaaggtgtctttccagcctgaatttttcagattgactagaccaagcagaatctctcaacctgatcttagtatttcctagaaagcacttgacattgtgtgaggtctcacctgaaggaacttggtggtgacatttgggagggtggagggaggcagtgtccttcctgacagcacttgcctccatggatcttctgtacacagaactcttatctaggatgtggttctgttcatgctgctttctgcgatgtgcgtgtctgttagaataggctctctacccagctagaacaccttccagacacttgctggacagctatcttccacatacttcccagtttacatttggtcttaatgatcttgaatagatcctctcttcattttactcagccaggttttgtactgatgtacaggtgttaaattacttcaagcatttttgtaagaggtgtatataattcaataaaaaaggtaaaacatgatgattaagttctgggggctttgtaaatgatcccactaaaatgtgacctaggaaaaatatgaatggtgtttaggatgagagaaaaggggaaaacaatagccctgggtcagctttataatagagagcctgggtttccctagcatgaagagatgtatgttgtagtcctgccactgattactgaagtcctgccattaattgctgaatgtcttcagttgggccactgagcttgtctgaatctgttcccttttataaaagagttactacatcaaaacaaagagtgaaatccaaatttgtcaaactgtatgtattaaacatgtccagttttttggttaaaaaaaaattgcactggctttgagggaaaacacacagggtgagggaattgggctaaatgacttcttacaggcccctttctgattctttaactttgaaaggcaagccatattgatccagttgttatagtgaactcatggtaatggtttgtgagaacaatagagattttcatttctatgtagatgagttggtatgagaatatatggaatttttaagggactgtttaaatctttgatttgtagactattaaatataccgtatgcataaagtaagcctttagctctaaggtaaagacgacacgttttcggtttgtgactacaaataggttaaaaatagattttaattttattaaaaatataatttaatgcaggttgtttgaagcatctgtcttcatatgatggcattagaacaccttggtataataaaaagttaccgtaatttaaaaa

SEQ ID NO: 12712 - DNA, 1564 bp, Homo sapiens
tgatgtctttcagctgggagcccaaaccaggacagttctcggaccaaagatgcccccacactcaaaagtctgtcccgtcttgtgtttggagaaggaaacaatgttggcaggcagcactctgtggtggtcagccctcagagctgtttctaggcatctctcagatcagacagcaaagaatctacccagatctgggctgggtggaggtgtggctgggctgggggccattctgagcctgcagtgagagtttggcccagcctcagtccttgctcttctctggctacctctgcagggagctgcaggggcaagcactctctccagcactcaggaagcccggccgagggtacctcctcgtggaaagaatgcactttaaagctctgctgaggagttcggagcccaggctttcaggcgacctctgccctccctgcctctcctcaccctccctctcttcctgcagggcctgggaagggctttgagggagcctgggagccatgtgaagaggggcacgcctgggctgtcccacagtttagatccagttggaggttctccctggctcctgcaggcctgcggggatctctccccacttcaggcctccggccagctgcctgccctcttgtctgtgcttcagccctgcacaaaagcagcttggtgacaccactcagccacccagagtacgtgtttacaggctttccagatcaccttcctgtggggtgaacgtaatgaggcggggctggtccttggaatttcccctggaaaatggtaacagactccatccttgacccggggatgagcatgaaggcattgtcccaaaggcagaggccaccgtggtaggaattccaccaaggccagaagggaaaaaggaagaacccaccgtgtctggctgtgcgggccctggggagggtcgtgagtgcagcccctctctacttccgtgcctttgtaaaacgtgtagataaccgcagtggttggctgagccaagaactctcctaaatcagtggctttctccccaccccttgctggggagtcatttttaaaaaaatctgtgggatataaaattggcctcctgctgcttcagcctacctctccctctgctgacttaatgtcgtgattctgtttcttcagatatttaaggctgttaggttgtgtgagccttgaagtgtgtgtgtgtgtcccagcgactgtccactgtccaggagatgcatgtctttgtattggagatatttctgttactcattctcttggtgctcacgattgccatggccatagggccacagtgccgtatctgctgcagacatgattgtttcttgttctagaggttttcttgttttcgaatcttgcctgatgaatccagccagaccaaggggcctagatttgacctctgtcctgggctcctgggccaggtgcaggaacatctgaggccactctgctggccacctccagtgggtgctgaccacaggatgggctttgtttacactcattttcaccctgattcttgcccccactttcataaaagaaacttcaaaatgctgacgctttggagagtaagaaaatcaatcttggctgggcacgg

SEQ ID NO: 12713 - DNA, 1646 bp, Homo sapiens
aaaagatggcggtcttggcacctctaattgctctcgtgtattcggtgccgcgactttcacgatggctcgcccaaccttactaccttctgtcggcccctgctctctgctgccatcctactcgtgaggaaactgccgccgctctgccacggtctgcccacccaaccgcgaagacggtaacccgtgtgactttgactggagagaagtggagatcctgatgtttctcagtgccattgtgatgatgaagaacccgcagatccatcactgtggagcaacatataggcaacattttcatgtttaagtaaaagtggccaacacaattcttttcttccgcttggatattcgcatgggcctactttacatcacactctgcataatgttcccgatgacgtgcaaaacccccctatatatgggccctgagtatatcaagtacttcaatgataaaaccattgatgaggaactagaacgggacaagagggtcacttggattgtggagttctttgccaattggtctaatgactgccaatcatttgcccctatctatgctgacctctcccttaaatacaactgtacagggctaaattttgggaaggtggatgttggacgctatactgatgttagtacgcggtacaaagtgagcacatcacccctcaccaagcaactccctaccctgatcctgttccaaggtggcaaggagggcaatgcggcggccacagattgacaagaaaggacgggctgtctcatggaccttctctgaggagaatgtgatccgagaatttaacttaaatgagctataccagcgggccaagaaactatcaaaggctggagacaatatccctgaggagcagcctgtggcttcaacccccaccacagtgtcagatggggaaagcaagaaggataaataagatcctcactttggcagtgcttcctctcctgtcaattccaggctctttccataaccacaagcctgagactacagccttttatttatgttttccctttggctgtgactgggtggggcagtgcgcagcttctgattttaaagaggcatctagggaattgtcaggcaccctacaggaaggcctgccatgctgtggccaactgtttcactggagcaagaaagagatctcataggacggagggggaaatggtttccctccaagcttgggtcagtgtgttaactgcttatcagctattcagacatctccatggtttctcccatgaaactctgtggtttcatcattccttcttagttgacctgcacagcttggttagacctagatttaaccctaaggtaagatgctggggtatagaacgctaagaattttcccccaaggactcttgcttccttaagcccttctggcttcgtttatggtcttcattaaaagtataagcctaactttgtcgctagtcctaaggagaaacctttaaccacaaagtttttatcattgaagacaatattgaacaaccccctattttgtggggattgagaaggggtgaatagaggcttgagactttcctttgtgtggtaggacttggaggagaaatcccctggactttcactaaccctctgacatactccccacacccagttgatggctttccgtaataaaaagattgggatttccttttaaaaaaaaaaaaaaaaa

SEQ ID NO: 12714 - DNA, 2371 bp, Homo sapiens
  misc_feature (1)...(2371): n = a,t,c or g
cgggtcggagcactcaccgccgctgggggaccctgtcggaagcaactgccgccgccgcctctttcatctcttctggggcaggggcagggcaggttttacacatccataagtagacctttttggagcctcaccagccaattcaatggcgtcctcttctactgtgcctctgggatttcactatgaaacaaagtatgttgttctcagctacttgggactcctctctcaagagaagctgcaagagcaacatctttcctcaccccaaggggttcaactagatatagcttcacaatctctggatcaagaaattttattaaaagttaaaactgaaattgaagaagagctaaaatctctggaccaaagaaatttctgaagccttcaccagcacaggctttgaccgtcacacttctccagtgttcagccctgccaatccagaaagctcaatggaagactgcttggcccatcttggagaaaaagtgtcccaggaactgaaagagcctctccataaagcattgcaaatgctcctgagccagccagtgacatatcaggcatttcgggaatgtacactggagaccacagttcatgccagcggctggaataagattttggtgcctctggttttgctacgacaaatgcttttggaattgacaagacgtggtcaagaacctttgagcgcactgctgcagtttggcgtgacatacctggaggactattcggcagagtacatcattcagcaaggtggctggggcactgtgtttagtcttgagtcagaggaggaggaataccctggaatcactgcagaagatagcaatgacatttacatcctgcccagcgacaactctggacaagtcagtcccccagagtctccaactgtgaccacttcctggcagtctgagagcttacctgtgtcactgtcggctagccagagttggcacacagaaagcctgccagtgtcactaggccctgagtcctggcagcagattgcaatggatcctgaagaagtgaaaagcttagacagcaacggagctggagagaagagtgagaacaactccnctaattctgacatttgtgcacgttgaagaaagaagaggtgcccgagncattggaaanaggttgcttgtgcttnctgtggtctttgcaagcgcggaacttgcaaagaggcactttcctgaagccccagttcccttgcttccacatatcattgcnacttccctgcttggggacaagggaacttgacacagaagtgatcacagttgagaaatccagccctgctacatctctgtttgtagaacttgatgaagaagaggtgaaagcagcaacaactgaacctactgaagtggaggaggtggtccccgcactggaacccacagaaacgctgctgagtgagaaggagataaacgcaagggaagagagccttgtggaagagctgtcccctgccagcgagaagaagcccgtgccgccgtctgagggcaagtctagactgtcccccgccggtgagatgaagcccatgccgctgtctgagggcaagtctatactgctgtttggaggggctgctgctgttgccatcctggcagtggccatcggggtagccctggctctgagaaagaaataggaggcttttcagaagagaaagacagaaggatgtaaggttggagttgtattggctggaatttgaacctccagcagctgtctggacatttgtggaacactctgggataattggggacttctgctcaacatggcagtggcatgttaggcatgttagggcttgaggtggggcattcacattcatctgactgtaaatcccaagggcctccgctcatgctaaattgagaatcttaggggtaaagcaccccctccaggaccgggtttctcagccttggcactagtgctgttctgaccattctctgtgttggggctgtcctgtgtgtggtgggctccacccactagatgccagtggcaccccctcccagagatgacaaacgaaaatgtctcttagacattggccaaatgtcccgtgtgaacatcccctattgagacccactgctttagcgagagagggtttacttaggaagaattgggatagaaattcccagctgagagaacttagctgtgggctcctcagctactgacttcttagctcttaatccccttagaatttcatctttctcgatgagcaggctctgcacccactctttttttgccccccgccctcatcctggagtgtgagggtgctcgcccgtactctcagctgcctctcagggactgcactgttcctcttcacccccaggttcctgctaagatcccacgggcgagggcttgctctggactcagtctgtcaagtccccgaagcttcctgcagctccaccttgta

SEQ ID NO: 12715 - DNA, 1476 bp, Homo sapiens
aggccaggccggcgttcgcgggttgctgtgagagcgggcttcccaacaccatgccgtccgccttctctgtcagctctttccccgtcagcatcccagccgtgctcacggtacagcagggtcccggggagtccaggaggcggcggagtgcggcactgtctggagagttcagtgtattgcagagaggttggagaaaatcaagtcttgcacgtggcgatggctcaagattccctgaggtcttcagtgctgactaaggagtctgaaatgatgattcatgttttacctttggggctgagctaagtgcatctctttgagcaatcgtcttaatttccttgtcgtcaccaattatcataaccaattatcatcgtaaaggatggtaattcctttaattatacccaccttaaaaacatgattctgttccacaaacgaaaggagcacatcagagatgccttcagttctgtgttgcttgaactttgaattccatgaattatagttgcactgaggggagaatcctgtttccatcctcctggttccttctccctttcctgtccccatgtttctctgaggcctggcaatgctctctggatacttggtgagtagcccaggaggactcaggagtgagaggcccctgcctcctgcgctgggagaaggctgtgggtggccgtgaaccccggccttgagtggcaggacagtgagtgtctgctggtgtgttcctacagcagacggactggactgagccctggctcatggggctggccaccttccacgcgctctgcgtgctcctcacctgcttgtcctcccgaagctacagactacagatcgggcactttctgtgtctagtcatcttagtctactgtgctgaatacatcaatgaggcggctgcgatgaactggagattattttcgaaataccagtatttcgactccagggggatgttcatttctatagtattttcagccccactgctggtgaatgccatgatcattgtggttatgtgggtatggaagactttgaatgtgatgactgacctgaagaatgcacaagagagaagaaaggaaaagaaaaggagaaggaaagaagactgaggggcagcagctgcttggagtttgcgtccttcccgtccacccagtgcagctcccagtgctgcagtgtgcgtggcgtgggcatccttccagctgactcatggtttgaaaaaccgttgttttatttaaatatccacagtggtagggcacacactgaagttggcttttcagccagcactgaatgtatccatcaggacatgcgtcttcaggtgcctgatctttgtagtcaggctgtgggaacggtctctgcagagcttcataactgggaatttgatttgaagaagtccatgtcatatgtgtaactagtactaattataaatataaaatacacaatataaaatatgaaactcaataataaacagtgccacctgtacatgggaaaaaaaaaaaaaaaaaa

SEQ ID NO: 12716 - DNA, 1313 bp, Homo sapiens
  misc_feature (1)...(1313): n = a,t,c or g
tggcggcgtccaagcggaggttgagggctctgaggaggcgttgagaggtttccgtacagcccgaccgtgcggctttggggatcccatcgctctgtgtttcctgctccaggtttcgcgtctcgcatcttcccagaccctcgggcgcgatgtggaggagctgcctccggctgcggngacgggggacgccgtctcctgaatcggccggcgggtggccccagcgcttctatgagtccggggccaaccatcccgtctccagcccgggcttacgccccgccgacagaaaggaagaggttttattcagaatgtcagcatcacacagggtgaaggtggctttgagataaacctgggaccacaggaagctgaaaactccccaagccaagctctttaccgtccccagcgaggccctggccattgcagtggctactgagtgggattcccagcaggataccatcaagtactacaccatgcacctgaccacattgtgcaacacatcattggacaacccaacccagagaaacaagggatcagctgatcccgggcagccgtgaagtttctggacaccgacaccatctgctacagggtggaggagcccgagacattagtggaacttcaaaggaatgagtgggatccaatcatcgaatgggctgagaaaagatacggcgtggagatcagctcctccaccagcataatgggacccagcatccctgccaaaactcgggaggtgctcgtcagccacctggcatcttacaacacatgggctttacaagggattgagtttgtagctgcccagctcaagtccatggtgctaaccttgggcctgattgacctgcgcctgacagtggagcaggccgtgctgctgtcacgcctggaggaggagtaccagatccagaagtggggcaacattgagtgggcccatgactatgagctgcaggagctgcgggcccgcaccgccgccggcaccctcttcatccatctctgctccgagagcaccacagtcaagcacaagctcctgaaggagtgaggcctgggcagagcacactcagcaggatagaggcagtgcagccacagctcccccggccttcagggctccccagcctgtggggctggcttccttggcttttggggactcggcctcagcgtcaccctgagattccccccgagacacagtgcgctagtacggctgtccggaggtcagcctgatttcaacccaggtgcccctggcctggccagcagtgaatgtaggagatgaattgtgcaagtgactttctctcgactctgattttattaaatatttctccaccctgaaaaaaaaa

SEQ ID NO: 12717 - DNA, 436 bp, Homo sapiens
gctgcagtgcagaaaacccccacccaaaggctaacttttggtaagtggtgggggccagtaacatttttctagtgaaccctgaggggacgatactgaagaaaccccccgacccaaaggaaatagagtgcagcactgataggccaactttgggtaagtggtggggtacccaggtaaaggatggaattgggttagaggcccaacttaggggagtcagagtctctcctaagacagagtgggtcagaggccgctcttgataaaaggcaaggacacctgacctaccttgggttaaaggcccaacttaggagggttagggtcccttttaagatttaaggggttagaagcccctttcagtaaagtcctttttggctaagaatgggtttggtattatgagacgttaactgctattctctttggattaatctgccttgaactcttt

SEQ ID NO: 12718 - DNA, 2216 bp, Homo sapiens
cggccacgaggctgttgaaagaaattttaccactaagaaatcttttgcctcatctacaaagccatagttaagacttgaggcattcaacttaatgccaagtataagcatttccccctttttctttcaattttattcttcattctgactacagaaacttggccctgaactacgagattagccaagccaacagtcttctaatttgttttcagaaacttcaggcgtgacacttgttgcccaaccagggatccagtatcttaaaggcccatactgtaaaggtcagcctgcctagggaattctgccacatttacacacacccctgggccaaagtaatattttttttttccatgtaggaccaaattatgggggcagaaagtaaagtttagttttaggaagtgctgtttgtggttggagaattgtaaaaatcttttaaagggataagggaattagtggcttttaatataaccactgcttcagcccgaaacacaaaatcactgttacatggaaaactggttattaggccagatttatattcatctctgtctagagtatttcatgtgtgtatgtgttgcttacgttgtctgtctccaaagtctctcatctcttttaatcactgcaaataaagcaatactgaaaacttgagagaatgcaccttaggggaaggggctatttcaagacagaaaacaaaggaaatacctgccttttgaataagatccccgcttttgaagtcttacctatgactttaccagggtagattagaatacacatcctcccgctggaccctctggccttcaatagctatctatcttaaaaggctgaagtttgaactgcagcatctgctggaccagatgcccaggttccttcggcagggggacgatcactctatatatcttccgttgcctcagattcctgtggccccaaggatcccaccaatcctcgttccccctaaacatgctaacaaaaatcccttatcgtgggtattaaaataataacagttacactgtatgcatatttatgtgctccttttgtctggtttttcttttcatcatgtataagctgaattcagcattagtttctcacatcttcccccaggtatccccaacagaatttttatgtcccagcttgtattaaatagaagtgaaatattaaggaaaataaggaacttgtgcaactttttttatgcattgttctcaaccatttaatttattgaaaggagatgctgcaacagttcttgatttagcagcagttattctcttgtttacatagttatgtttttttgttgttgttttgctctgtactggaaacaaaaataaagttttctacattattttcagccttgggttatggtatggtttctttgtgtttgtcgtaatatgcacattgtccttctaggacctgtcaccccaccatggagaaaagagtcttttggttctttttaacataagtgattagtttaagagtatgctgaggagccactgggcttaaagaaggatgtaaataagacccaaatacatagggaccaggcgctgctttctcatgttcacaaaagcagtcctcccaccactgaactccattctctcagggggctcaatgaaggctaaccaatccgatgcatgtgtaggtaacagtcccatggactggcacttgtaaacagccaatgccaaacccatcaggttcccaatgagatagaccaaaccctgaagaaacttctggcttgaactttctaacatcttgaaagtggctgaaatggccataagtgcctgaatgggtcgcccaggcccatcatacacaccatcatagtagggaagatggagatagtattgcctgccatgtacatgatgaagagattcatgggaatctgtttgaggggacccaaggcgatgtccccagcagcgcttctccaccaggatccggtctgtctcttgcacggctggtatcaggcacttgcttgtccaagtaaccgactgggtagagcgagtctccctggccactgccccggtcacttcgacccctaaaaaaccaaaccaagaaactgctgcctcctccaggcccgcttagctcaatggcccacttgaagcgccggcctcggttagccacccaagcccccctgggccgtcatggcaacagctgcgtcctatagcctcgatgcttctcagtccaaagcgtactccacaacaggcccaccagcgttctccgctttgtctcactctgcaaatgcc

SEQ ID NO: 12719 - DNA, 1549 bp, Homo sapiens
tttttttttttttttttctctttgcactgatttttattaaacaagtaaggctggtagtggaacatatttttatttaatgcataaacatataagtcccttattagagaaactgtatatattgatgaatatggtcaatggtcacatctatgggttaattctttaaaaatcagaaccaataattaggatagattttatgctctcttcattacattgtgaagtgtcttgtgtagtcatattctattgttggaatgacagcttgtacaaatttcaagaaaataagaagatacatatgaactccaagttctccccctccttctgcaacagtctcaatgattttcttcatcacctcagcatgcctgcatgggtgaactgaacacatgggaggtggtggcagatgagggtgattttcaatggtcactgttttcttcacatgatcctgactgatgtcttcatacatgtgctcaactgttaaaggctgccgttgctcatcatagccaaacaaccataatcgtggagtctggtaatatttatcgtaagtgatgtaaaggtcataagttctggtttgcaaaatagcatcttcaccgcccagcatcagttttggctttacaagcttctactattttccttgtatctagggtagcctcatctgtttccaacaatccactctcttcatattcttccatatctgcagcttctccttcatcttcatcttcttcctcttcacatagtgctgagcaatcttgaagccttatattgtccttattttccagtgtgatctctttaacggcttccgttattcctgtaatacctgtgttgtgatatgtatctacccatccgccatcaccatcatcttcttcaatgatagcttccaattcatctgaatattccatctgtttgcaccgcttatagcacggcacatttttggttaccaaaaattgtttgcctgttggtaggtatgccttcactttcaattcttcccctgtagcccattgccatgttggacagtggtggactaggtgatctccagctgccacaaactcttctggggtaattacacctgtttccttaaactttgattccttgaggaccggggtcaggtactcagccacttccagtgcctttcccttcacagtatttaatcacatttctgcattccctgggccggagtagcggccggccccgcgacgggatggaaagtgcagccgtgtcaggggccagggagtcagaaaatgtcctcgctgccaccgactcgcatcagcacccggctggcagcacccgaggggacgggaccgacgcgacgggacgggcgggacgagggggcggggcggcaggcacagcgcgcgaagacgggggtgcggatcctcgcaccccaggcagcccgcgacggaccggacccagctgtcacccagccgcgagggagggcagcggggccgaagggagacctgaggtgagaagcggacgcacacgcacccctcgcctctgcagctgtctgtcctcgctttgcttcactcgcgcccttcgtgttcccttccttctccgtgtgccgaat

SEQ ID NO: 12720 - DNA, 1610 bp, Homo sapiens
tgtaatgtaagacatttattttggctaaagttctggtgttttaacactgatttgtgatacaacggacattaaacttccttttaaaaagaaaaaaacaatttggtagctctcccttttctgtccagaaaaattcactctttcataatcaaattaccctaaaatttggtggcgttaagaggcaacaaaagttaagcttccaacgaatctgttctctcaaccggaaatgtcttctatttccaatcaggataaaaccttgacttacttgcaaggactatcacggttagcccttcagtgattcctgacaccagttctgtgaaaaagaaaatttcctgcgagaaaagctcatgtcttcatgattgaaggatcagtactttttttttttttttttcctttaaaacagtagcatcttaacttgtggcacaaaaggcaccaacattccctttccaaaccatccatcaccatgggtggaaggcagcgccacctgctggccatcatattatggctcacatacccataatttccttgcggtgctgaattccaagtggggattattagagacccctcagagccaaaaggggaccttagaggtcttctagatgagtcccctcatttgtaggtggtggtttctggataactcagagtggcagggacacagacgagcctgtggaaaggtatactgctttaagattgagaagaaaaccatttggcgctctaattttgcctggatggtgctctgtcagtcaaagaaagggaacaggtctggggagggggtaagggcaccctgagttcctgttccatcacttcccaggcagtagaaggctgtccaggaacagctcccatccgcagctgggcatgtgttggctcttacacaagagactttaattttacttgaagaactaagagctaaatcttgttaaagtaaatacggggtttcaggggtgaaggactatcaagaaatcccaagttatcagcataaaagtagtcccaaagtaaaggcagtaattctcccaatggccttttctccctcatgcccccacagagactttcgagaggtcctagttagccagccacaccaacctgctgtgttcgcgtaagtagctgtgcctgtcccatggggtgaccactgcctggtcatgggaggggagccccagccccagctccctagccttttccaggagcagagcagaaagctctactttggggtgctacatcccacctggagaaagagctgcacattctagcctatgagggacccacccttttcacttgcttctccggggctggattgagggtaagtgcagtacacctggagatcccagggagcccccttcttgagaaagagtatcgtatgaaagaatccagcttcagggagcagcaaacccaaaatcttgcccagctccaccttatggagctggacaaccctgggggccaggcccttaatcattctgaacctcagttccttttttttaaaaaaggtcacaatacaagaacaagctctactaactttacagggttactgtgaggctcaagttagattaagttggaaggctacctagaagctgtgcagtgaggtacccagtttagaggatggccatttcacttaggtgggt

SEQ ID NO: 12721 - DNA, 573 bp, Homo sapiens
atttcggcacagctcactacagtgtcgccgcctctgcctgcgtagccccggccatggctctgtagcctcgacccctttgtgcccccggcccgtctccgcgctcaccacgcctgcgctctccgctcccaccttctttcttcagccgaggccgccgccgcctctccttgctgcagcccatgggagtcttccactttcgccttggtgcctgtcttcgcccacctgagcatcctccagagcctcgtgccagctgctggtgcagcctctcctgttgccatcagtgcccagcacctgtgctacagccatgtcactcctggcgaccctggggctggagctggacagggccctgctcccagctagtgggctgggatggctcgtagactatgggaaacttcccccggcccctgcccccctggctccctatgaggtccttggggggaccctggagggcgggcttccagtggggggagagcccctggcaggtaagggcaggtggaaggtggagctggggagtggagggcaggggaagatgggggaggaagaactcatccatgtattcaataaatattgagtgcc

SEQ ID NO: 12722 - DNA, 992 bp, Homo sapiens
aggaggagaagccacaatttgaggaagaagaagggcttgaagacgactggaactgggacacgtgggacgggcctgagcaggagggagactggagccagcaggagctgcactgtgaggaccccaacttcaacatggacgccgactacgaccccagccagccgaggaagaaaaagcgcgaggcccccttgacgggcaagaagaagcgcaagtcgcccttcgccgcggccgtggggcaggagaagcccgtgttcgaacccggggacaagacgttcgaggagtacctggatgagtattaccggctggactacgaggacatcatcgacgacctgccctgtcgcttcaagtaccgcacagtggtgccctgtgactttggcctcagcactgaggagatcctcgctgctgacgataaggagctgaaccggtggtgctccctaaagaagacctgcatgtacaggtcagagcaggaggagctgcgggacaagcgggcgtacagcagaaggcccagaactcatggaaaaagcggcaggtcttcaagtcactctgccgagaagaggcagagacacctgcggaagccacagggaagccacagagagatgaagccggcccacagaggcagctgccagcccttgatggcagcttgatggggccggagagtcccccagcacaggaagaggaagcccctgtatcaccccacaagaagccagccccccagaagcggaggagggccaagaaggcacggctgctgggccccactgtgatgcttggtggatgcgagttcagccgccagagactgcaggcctttgcttcaaccccaaacggctgcacttccgccagctgggccggcagcggaggaaacaacaggggcccaagaacagcccctgagcaccagggagcaggcaggggcctcaggctcctctcctcaaatcaagccctggacaggtctcgcacccacaagtactatctgtgcagagatcctctcatctgtggccagg

SEQ ID NO: 12723 - DNA, 1405 bp, Homo sapiens
  misc_feature (1)...(1405): n = a,t,c or g
gcgtcgactttttttttttctttctccacacgtttaattttaaaaaataattgtacaaaacagaatgaattcttaaggcatatcagaaatgctgagtcccaggccggggccctgccccagccagggctgggactctgcagttgggagcttgtccagctgccccctctaatgcttttctcctccaggacacagggagcctccggaagcacagtagtccccgtgtgtcaccttaggctgacctctgtccccaggggtgacgtaatgctgtcactgtcttgaattcttcatcgtttaacagggagcccagtgttttcactttgcacattgggtatctggtcttgcctgtcctaccctgaacctgggttccctgggccatgtaacacccaggcagctctgatgcccctgggtacttggaggagctcccaggaagtccaagcctgcgccaggaatctctggctttcaaagttttcaaaggttggagcggctgcccctgccacccacagactccacatagctctgacaacctgctttcctgaacgcctcgttcctgggtcctttcacccaccagacctcactgtgtggcctcaactttgaggcacctgccctttgaacccccagttctacaataaacggggtggattccaaacgtcactcagctctgaccttctctgacctttattcctcattcgtctgcctgctgagctcctattcgtactccaaagcctcagctaaaatgccctttccacaaggacgccttctctgcttcctgtctggactctcacagttgcaggtctcttcttctggttctgtgatgctggaactgtatatgtctggctctgtttctcccagactgaaggctcctaggggatttccagcacccaccaattgggctgggaagacaggttattaaacagtctctccggatactgcactggggcattcaatgcctcacaaggacagcggtccaggtaagtcagattccagccgggctcttcctctgtcccatgtgatatccgaaaggcccccgcctcactctgagacttggttccccaactttgatgcagtcggggaggtcagcccttggtccagccactccccacagtcatggtggctgaaagctggtgtgcaaccttgttcctcgaggggtccctgtgccgttcagcaagtcatgcagcgcggcctcatgtcccccaagagtgggtttggatcctcctcagagtacaggggtggcgggcggtacgggaactcttggatgtaggcgaagaacgggccttcaaggctcatgtcggggtcctgcggaacgggnaaggggctctgccaanggctgcctcctcagtgtcggctaccacctccgagtactcaggaggagcctcaggccgctccggcaaggccccaggctccagtc

SEQ ID NO: 12724 - DNA, 1438 bp, Homo sapiens
atttttttttcttcttttaaaaaataaatatttataaacttaaggaagattcaaagaatcagggtatcttttcctccaaaaacacaaatgtcccgtgtaagtcaaaccaaggtgcgaccaccaacccatgaatgaagtcccctccccctgcagctacagggttgaggggcaggtgggcaggggagctgctctctctcctgccttcagtcccccttggtgatgaggtcctcaatgtaggcgtccagctcatcatctgtgttgatgtctatgtcctcctgcaccttttgcaggagtgccacgatgttggtcctcagcttctgcagcttctcctccgtctcgcggagcttcctctcggaggtgcgcaggctttcctcggaggccttggcccgggagtcagcacggctctggtaggaattgcacaggttttggagccctacttcatattgcttgaagtactccttcagaggaaaagatattagctcatctgaattcatagcactcagctgcttcttggagatggggaaacttggaggcaggaagtaccgtaaacaattccggaggatctggacaagcaggtcgatggtctcggtgattggtgctcagggcagtggtgtcaggctcaatgcggaggcattcggaagtggagggctctgcgacagctatggcctgctgggccacagggccctcctcctcctccccgccctcctgttgtgtatcaaggctctgatgttccggagaagggggtttcatcagccgcacatcctcactgcctttctccacccagcggtctcttggtgtcgtgtctgtgggcacgtagtcaaacttcaccttccaccgcaccacatgcttgcccacctccacgggctgtgacacggcccgtgtaccactccctgttcacacgcacctccacgtgcagccctttatctttctgagctctcttgaggtcagccgagtcctcttccccagcactgtctgagagctcattcgagtccttcttttcctccttcacaacaaatctgccccgcttgcacctctccttcctcctctcagcttcctcctcaacttcttcctcatcagaaactgcgacactccgcttccgactaggggtagcccggggagagttttgatgggtgactctgtcttcttcaccactggagtcttgatgactttgggagaaggaacctcccgagggctcttggagttgggcagtaaagatggtgacagttgctgcaccagaggggcaggtcgggatgcagtcttgacgagagtgttggcaggctttcggggtgcctcaggtgctggagcagcctagatgtgctggcctcctcccgggctgccaaagcagggagctttggggtactgctgatgacaggagcctttcggggctggctggctggtctaggagttggcaaagaagggggtctgctgggggcgttcc

SEQ ID NO: 12725 - DNA, 1757 bp, Homo sapiens
gtggtaactcaggcgccgggcgcactgtcctagctgctggttttccacgctggttttagctcccggcgtctgcaaaatgaagattgaggaggtgaagagcactacgaagacgcagcgcatcgcctcccacagccacgtgaaagggctggggctggacgagagcggcttggccaagcaggcggcctcagggcttgtgggccaggagaacgcgcgagaggcatgtggcgtcatagtagaattaatcaaaagcaagaaaatggctggaagagctgtcttgttggcaggacctcctggaactggcaagacagctctggctctggctattgctcaggagctgggtagtaaggtccccttctgcccaatggtggggagtgaagtttactcaactgagatcaagaagacagaggtgctgatggagaacttccgcagggccattgggctgcgaataaaggagaccaaggaagtttatgaaggtgaagtcacagagctaactccgtgtgagacagagaatcccatgggaggatatggcaaaaccattagccatgtgatcataggactcaaaacagccaaaggaaccaaacagttgaaactggaccccagcatttttgaaagtttgcagaaagagcgagtagaagctggagatgtgatttacattgaagccaacagtggggccgtgaagaggcagggcaggtgtgatacctatgccacagaattcgaccttgaagctgaagagtatgtccccttgccaaaaggggatgtgcacaaaaagaaagaaatcatccaagatgtgaccttgcatgacttggatgtggctaatgcgcggccccaggggggacaagatatcctgtccatgatgggccagctaatgaagccaaagaagacagaaatcacagacaaacttcgaggggagattaataaggtggtgaacaagtacatcgaccagggcattgctgagctggtcccgggtgtgctgtttgttgatgaggtccacatgctggacattgagtgcttcacctacctgcaccgcgccctggagtcttctatcgctcccatcgtcatctttgcatccaacccgagggcaacttgtgtcatcaagaggcacttgaggacatcacatcccctcacggcatccctctttgaccttctggaccgagtgatgataatccggaccatgctgtatactccacaggaaatgaaacagatcattaaaatccgtgcccagacggaaggaatcaacatcagtgaggaggcactgaaccacctgggggagattggcaccaagaccacactgaggtactcagtgcagctgctgaccccggccaacttgcttgctaaaatcaacgggaaggacagcattgagaaagagcatgtcgaagagatcagtgaacttttctatgatgccaagtcctccgccaaaatcctggctgaccagcaggataagtacatgaagtgagatggctgaggttttcagcagcaagagactccccaggtgtgcctggcctgggtccagcctgtgggcgccttgccccctgggcttggggctgccgtccccactcaggcgtggtctgcagcgctgtcagttcagtgtggaaagcatttctttttaagttatcgtaactgttcctgtggttgctttgaaagaacccttccttacctggtgtgttttctataaatcttcataggttattttgattctctctctctctctctctaagttttttaaaaataaacttttcagaacagtaaaaaaaaaaaaa

SEQ ID NO: 12726 - DNA, 1183 bp, Homo sapiens
tttatgtataaacaggtaccagttttgattttatttaatcatttcatacattaacatacatgacacatcaaaatgagaaatgcacagtttaaccgttcaacagctggccttacttcaaaagaacactatattcatattaaacatttacagtctttccatctaactttacacatgtcctaaatcattttccagcacttctcacatagaagtctagttttgctctttaaaatcaccatctgtatcacccctagtagacgcgagggtttccccaattacatgctgaagagagccagccaccaccccacctaaagacatccaagcagctccagagcctgcctccgaggccaccccttcgccacggcagtctcggattccaagaactgattatctgacactagtgaaccagcactaaaggctgtaggatgtgactacatcacagttccagaaggaaggggaccatggccaagagaagccctaaatgacagaagctcattaaaaccaagtgccccaaacctcctgaaacatcgttagcaaggagctactgctttcctttcttaaacatgttttgggcatgaccacactctggaagtggtgaactgttacacatttggtgtgtgtgtacataacatcaaaaactactgtgtgaaaacttgagaatgtctgattaaagatttcaatgtatatctaaaaactaactccaaatcgttgaccagcactttcccagtatcataacaatgcggctgaccctcttctgccttcactttacaccccatcatagcacattatttgtgcacaactagtgaggtctgtgcggctcatcatccccataaccaagtcggtctgtgttgagtcatatcattctgtgctggttttagaagtcaccataggaaacatgaagtcacatcctggtcaaaaaactgtccatttctcaaaaacagagaaaaacctgagatacgaggcagcaactagcgacacttacaggaagggaaagaacaatgacaacacccgcccagccccacccccaaaaagctgctgttgtgaattaaggcttcaaaagaggacccacattgtagctgataaaactcaagccaggaggatgtttgaaagccaatctgcactatcacttgttccagtgacctcctatgttcagctgccaggaccgattccatacagtgattgtagg

SEQ ID NO: 12727 - DNA, 530 bp, Homo sapiens
gtcctggactgtgactgtgacatggcctcggtccaccacctgttgtcccagatccctcaggacttgccctatgagacactgatcagcagagcaggagacctttttgttcagtttcccccatccgaacttgctcgggaggccgctgcccaacagcaagctgagaggacggcagcctctactttcaaagactttgagctggcatcagcccagcagaggcctgatatggtgctgcggcagcggtttcggggacttctgcggcctgaagatcgaacaaaagatgtcctgaccaagccaaggaccaaccgctttgtgaaattggcagtgatggggctgacagtggcacttggagcggctgcactggctgtggtgaaaagtgccctggaatgggcccctaagtttcagctgcagctgtttccctgaaagccagagaagaccttcctcttacatcacattaaggtctcacccttccatggaaggattgggaggggtggaatttcctttattaaaagggtttctgtccagagtttttt

SEQ ID NO: 12728 - DNA, 2006 bp, Homo sapiens
gtcgacggctggagagaagccgggagcgagcccaggcggcagtcttgattcccttttggccagcagtttttaggtctgtcagtactgcactgcaagaatggcagattttgggatctctgctggccagtttgtggcagtggtctgggataagtcatccccagtggaggctctgaaaggtctggtggataagcttcaagcgttaaccggcaatgagggccgcgtgtctgtggaaaacatcaagcagctgttgcaatgtttagtcccaggaagcaccactctgcacagtgctgagattttggctgaaatcgcccggatccttcggcctggtggatgtctttttctgaaggagccagtagagacagctgtagataacaatagcaaagtgaagacagcatctaagctgtgttcagccctgactctttctggtcttgtggaagtgaaagagctgcagcgggacccctaacccctgaggaagtacagtctgttcgagaacaccttggtcatgaaagtgacaacctgctgtttgttcagatcacaggcaaaaaaccaaactttgaagtgggttcttctaggcagcttaagctttccatcaccaagaagtcttctccttcagtgaaacctgctgtggaccctgctgctgccaagctgtggaccctctcagccaacgatatggaggacgacagcatggatctcattgactcagatgagctgctggatccagaagatttgaagaagccagatccagcttcccctgcgggcttgcttcttgtggggaagggaaaaagaggaaggcctgtaaggaactgcacctgtgggccttgccgaaggaactggaaaaagagaagtcaagggaaccagatgagctcccaacccaagtcagcttgtggaaactgctacctgggcgatgccttccgcctgtgccagctgcccctaccttgggatgccagccttcaaacctggggaaaaggtgcttctgagtgatagcaatcttcatgatgcctaggaggttcctgacatgggacccatctgctcctccagccaactcctgtccctcacatcccaccatggtggctcctcccacctcctctggatttgttcactctgagatctgtttgcagagtgggtgcttagcagacagagtgaagctggctggggggcacagtggtgtgtagtgctgctgtgtatcaaaagaccaaggtattatgggacctggtttcagaatgggatgggtttcttcacctcatgttaagagaagggagtgtgtcctgaagaagcccttcttctgatgttaaaatgctgaccagaacgctcttgagcccaggcatcgttgagcattaacactctgtgacagagctgcagacccctgccttgagtctcatctcagcaatgctgccaccctcttgtctttcagagttgttagtttactccattctttgtgacacgagtcaagtggctcacaacctcctcagggcaccagaggactcactcactggttgctgtgatgatatccagtgtccctctgcccccttccatccccaaccacatttgactgtagcattgcatctgtgtcctgttgtcatttatgttaaccttcaggtattaaacttgctgcatatcttgacatatcttgagattctgcatgtcttgtaaagagaggggatgtgcatttgtgtgtgatgttggatagtcatcccacgctcagtttggaccattggagggacttagtgtcacgcacaaatggggctattcctacgcttagaatagggcttgtctgcccactttagaagagtccaggttggtgagcatttagagggaagcagggcagaactctgaacgacaatacgtctctctgagcagagacccctttgttcttgttatccacccatatggacttggaatcaatcttgccaaatatttggagagattgtgtggatttaagagacctggatttttatattttaccagtaaataaaagttttcattgaaaaaaaaaaaaaaaaaaaaag

SEQ ID NO: 12729 - DNA, 2448 bp, Homo sapiens
tgcggccgccggtcctccctccacctcctcctcggccccccctcgcttccctcctcccacttcccgagctccggcgtcgtcccggccacgctcgacgctgctgcaggaacaaaggaagaccccgcggcggcgcggcgccacctccgcctgctgctccgacccgctcccggcccgcggcggcggcaccagggcgcccggctcagccttcccggaggcctcggcccggcctcatcgtgccggcttcgcgcgcgaacccggctttcgcatttgggaccctgcaggcagaaaaatatggctcaggagactaaccagaccccggggcccatgctgtgtagcacaggatgtggcttttatggaaatcctaggacaaatggaatgtgttcagtttgctacaaagaacatcttcagaggcagcaaaatagtggcagaatgagcccaatggggacagctagtggttccaacagtcctacctcagattctgcatctgtacagagagcagacactagcttaaacaactgtgaaggtgctgctggcagcacatctgaaaaatcaagaaatgtgcctgtggctgccttgcctgtaactcagcaaatgacagaaatgagcatttcaagagaggacaaaataactaccccgaaaacagaggtgtcagagccagttgtcactcagcccagtccatcagtttctcagcccagtacttctcagagtgaagaaaaagctcctgaattgcccaaaccaaagaaaaacagatgtttcatgtgcagaaagaaagttggtcttacagggtttgactgccgatgtggaaatttgttttgtggacttcaccgttactctgacaagcacaactgtccgtatgattacaaagcagaagctgcagcaaaaatcagaaaagagaatccagttgttgtggctgaaaaaattcagagaatataaattacttcttgtgaagagactgaaactttgtttttattttaatatatcgtaggaaaacattaaagagcagatgcatggccatttttctttgatgttctccagagttttacattacacttgtctgtcttataattgatattttaggatgtttgggtgtttgttacaggcagaattggatagatacagccctacaaatgtatatgccctcccctgaaaaaaattggatgaaaatctgcacagcaaagtgaaacacacagataataggaacaaaatgtagttcccatgtgccaaacaaaataaatgaaatctctgcatgtttgcagcatatctgccttttgggaatgtaatcaaggtataatctttggctagtgttatgtgcctgtatttttttaaaatggtacaccagaaaaggactgggcagtctacttctaccatagttaaacttcaccctctttaatttcacaacatattctttggaagcaggaagaaatgctcataaagaggatcagaccttctttcccgtggaaaccagtatttggcgccatatataagcctgggttaaattggtcatctaaagctgtcaaataagacattctgtgaaaggtaaacatcgaaactggttataagtaaaaccatcaagccaacaacagggtcttgagataacctttgaagctttatttgtactggcctgcaccagaagatgtctgcattactcattggctaaaaatgtgtagcacagaactgcactaggattaatttgtttacaagaagaaatttaaactctacgtttggttttcacatacagcagctctattgactaacatgcatctgagtttaagttgcaaaggtatctgaataatttttcatgtgcatcttttgtcgaatgttttggttcaagaaagaatgtttaaagctttttaaaagacttcagttcttaatgtaactgtacccttctgcatggaaaatcataaccaacatggctgcagtagacttcttagtggtatccagcgccacttgcagagggctgctttatcatattgtacttgggtgtaggactctagtgttcttgggtgtattgcatgggctgcattatctacagcattgtacaataacaactagaaaaggcagtatacttcactgatgcttgtctggtaataatcacttctgtgttataatggaaggttttttgtgatgtatgaaacttgtgttttttatatataaatgagtatagttagtgttgtggtaatgcctgttttcatctgtaaatagttaagtatgtacacgaggcactacttctgatttattgcaatgttcagtcctagtttttacttttattcttaaagcattcagttttgctttcaattttatgtaccttagttctgagttagacctgcagatgtgtacagatagttcatatttatgtattgcacataatcatgctattcagcattgatgctatattgtattatgtaaataataaaagccatgtacagagggaaaaaaaaaaaaaaaaaa

SEQ ID NO: 12730 - DNA, 844 bp, Homo sapiens
gacacttcctggtgggatccgagtgaggcgacggggtaggggttggcgctcaggggcgaccatggcgtatcacggcctcactgtgcctctcattgtgatgagcgtgttctggggcttcgtcggcttcttggtgccttggttcatccctaagggtcctaaccggggagttatcattaccatgttggtgacctgttcagtttgctgctatctcttttggctgattgcaattctggcccaactcaaccctctctttggaccgcaattgaaaaatgaaaccatctggtatctgaagtatcattggccttgaggaagaagacatgctctacagtgctcagtctttgaggtcacgagaagagaatgccttctagatgcaaaatcacctccaaaccagaccacttttcttgacttgcctgttttgggccattagctgccttaaacgttaacagcacatttgaatgccttattctacaatgcagcgtgttttcctttgccttttttgcactttggtgaattacgtgcctccataacctgaactgtgccgactccacaaaacgattatgtactcttctgagatagaagatgctgttcttctgagagatacgttactctctccttggaatctgtggatttgaagatggctcctgccttctcacgtgggaatcagtgaagtgtttagaaactgctgcaagacaaacaagactccagtggggtggtcagtaggagagcacgttcagagggaagagccatctcaacagaatcgcaccaaactatactttcaggatgaatttcttctttctgccatcttttggaataaatattttcctcctttctatggaaaaaaaaa

SEQ ID NO: 12731 - DNA, 347 bp, Homo sapiens
gctgcatagggctcggcttgtccttgtcccatgtgtttgtagacacacatgcatactgtccaaagattagggttggtggtggcagtgcagcaggggagggacaaacaaccaagctatgggtgacagaggctctctcctggtgcctgcacctgcactctagtgaccctgggtgccgccagacccttctcttctacaaagaccccagcaggagtgggagggtctgcaatggcatcgccctgtcctgccttggccagaagcctggagctttggtttgaggaggtagagatatgtgtatccataggaagagatctgtcagaacaggcagctgttgagctcggggtgcttcc

SEQ ID NO: 12732 - DNA, 884 bp, Homo sapiens
  misc_feature (1)...(884): n = a,t,c or g
ggaaggtggcggtggtgaaggtgcaggccgttggggcggtcagaggcaggtgactatgaaaggcttatatttccaacagagttccacagatgaagaaataacatttgtatttcaagaaaaggaagatcttcctgttacagaggataactttgtgaaacttcaagttaaagcttgtgctctgagccagataaatacaaagcttctggcagaaatgaagatgaaaaaggatttatttcctgttgggagagaaattgctggaattgtattagatgttggaagcaaggtatcattctttcaaccagatgatgaagtagttggaattttgcccctgggactctgaagaccctgggactttgtgaagttgttagagtacatgagcattacttggttcataaaccagaaaaggtcacatggacggaagcagcaggaagcattcgggatggagtgcgtgcctatacagctctgcattatctttctcatctctctcctggaaaatcagtgctgataatggatggagcaagtgccatttggtacaatagctattcagttagcacatcatagaggagccaaagtgatttcaacagcatgcagccttgaagataagcagtgccttgaaagattcagacctcccatagcccgagtgattgatgtatctaatgggaaagttcatgttgctgaaantgtttggaagaaacaggtggcctgggagtagatattgtcctagatgctggagtgagattatatagtaaagatgatgaaccagctgtaaaactacaactactaccacataaacatgatatcatcacacttcttgggtgttggaggccactgggtaacaacagaagaaaaccttcagttggatcctccagatagccactgccttt

SEQ ID NO: 12733 - DNA, 3129 bp, Homo sapiens
gaattctcattgcatctccagttcaacagataatgagtgagtgatgccacactctcaagagttaaaaacaaaacaacaaaaaaattaaaacaaaagcacacaactttctctctctgtcccaaaatacatacttgcatacccccgctccagataaaatccaaagggtaaaactgtcttcatgcctgcaaattcctaaggagggcacctaaagtacttgacagcgagtgtgctgaggaaatcggcagctgttgaagtcacctcctgtgctcttgccaaatgtttgaaagggaatacactgggttaccgggtgtatgttgggaggggagcattatcagtgctcgggtgaggcaagttcggagtacccagatggagacatccgtgtctgtgtcgctctggatgcctccaagccagcgtgtgtttactttctgtgtgtgtcaccatgtctttgtgcttctgggtgcttctgtgtttgtttctggccgcgtttctgtgttggacaggggtgactttgtgccggatggcttctgtgtgagagcgcgcgcgagtgtgcatgtcggtgagctgggagggtgtgtctcagtgtctatggctgtggttcggtataagtctgagcatgtctgccagggtgtatttgtgcctgtatgtgcgtgcctcggtgggcactctcgtttccttccgaatgtggggcagtgccggtgtgctgccctctgccttgagacctcaagccgcgcaggcgcccagggcaggcaggtagcggccacagaagagccaaaagctcccgggttggctggtaagcacaccacctccagctttagccctctggggccagccagggtagccgggaagcagtggtggcccgccctccagggagcagttgggccccgcccgggccagcctcaggagaaggagggcgaggggaggggagggaaaggggaggagtgcctcgccccttcgcggctgccggcgtgccattggccgaaagttcccgtacgtcacggcgagggcagttcccctaaagtcctgtgcacataacgggcagaacgcactgcgaagcggcttcttcagagcacgggctggaactggcaggcaccgcgagcccctagcacccgacaagctgagtgtgcaggacgagtccccaccacacccacaccacagccgctgaatgaggcttccaggcgtccgctcgcggcccgcagagccccgccgtgggtccgcctgctgaggcgcccccagccagtgcgcttacctgccagactgcgcgccatggggcaacccgggaacggcagcgccttcttgctggcacccaatggaagccatgcgccggaccacgacgtcacgcagcaaagggacgaggtgtgggtggtgggcatgggcatcgtcatgtctctcatcgtcctggccatcgtgtttggcaatgtgctggtcatcacagccattgccaagttcgagcgtctgcagacggtcaccaactacttcatcacttcactggcctgtgctgatctggtcatgggcctagcagtggtgccctttggggccgcccatattcttatgaaaatgtggacttttggcaacttctggtgcgagttttggacttccattgatgtgctgtgcgtcacggccagcattgagaccctgtgcgtgatcgcagtggatcgctactttgccattacttcacctttcaagtaccagagcctgctgaccaagaataaggcccgggtgatcattctgatggtgtggattgtgtcaggccttacctccttcttgcccattcagatgcactggtacagggccacccaccaggaagccatcaactgctatgccaatgagacctgctgtgacttcttcacgaaccaagcctatgccattgcctcttccatcgtgtccttctacgttcccctggtgatcatggtcttcgtctactccagggtctttcaggaggccaaaaggcagctccagaagattgacaaatctgagggccgcttccatgtccagaaccttagccaggtggagcaggatgggcggacggggcatggactccgcagatcttccaagttctgcttgaaggagcacaaagccctcaagacgttaggcatcatcatgggcactttcaccctctgctggctgcccttcttcatcgttaacattgtgcatgtgatccaggataacctcatccgtaaggaagtttacatcctcctaaattggataggctatgtcaattctggtttcaatccccttatctactgccggagcccagatttcaggattgccttccaggagcttctgtgcctgcgcaggtcttctttgaaggcctatggcaatggctactccagcaacggcaacacaggggagcagagtggatatcacgtggaacaggagaaagaaaataaactgctgtgtgaagacctcccaggcacggaagactttgtgggccatcaaggtactgtgcctagcgataacattgattcacaagggaggaattgtagtacaaatgactcactggctataaagcagtttttctacttttaaaagacccccccccgcccaacagaacactaaacagactatttaacttgagggtaataaacttagaataaaattgtaaaaattgtatagagatatgcagaaggaagggcatccttctgccttttttatttttttaagctgtaaaaagagagaaaacttatttgagtgattatttgttatttgtacagttcagttcctctttgcatggaatttgtaagtttatgtctaaagagctttagtcctagaggacctgagtctgctatattttcatgacttttccatgtatctacctcactattcaagtattaggggtaatatattgctgctggtaatttgtatctgaaggagattttccttcctacacccttggacttgaggattttgagtatctcggacctttcagctgtgaacatggactcttcccccactcctcttatttgctcacacggggtattttaggcagggatttgaggagcagcttcagttgttttcccgagcaaaggtctaaagtttacagtaaataaaatgtttgaccatgccttcattgcacctgtttgtccaaaaccccttgactggagtgctgttgcctcccccactggaaaccgc

SEQ ID NO: 12734 - DNA, 528 bp, Homo sapiens
gaaacagcctaaaatgtgttgaaattattttgtaaatccatgacttaaaacaagatacatacatagtataacacacctcacagtgttaagatttatattgtgaaatgagacaccctaccttcaattgttcatcagtgggtaaaacaaattctgatgtacattcaggacaaatgattagccctaaatgaaactgtaataatttcagtggaaactcaatctgtttttacctttaaacagtgaattttacatgaatgaatgggttcttcactttttttttagtatgagaaaattatacagtgcttaattttcagagattctttccatatgttactaaaaaatgttttgttcagcctaacatactgagttttctttaactttctaaattattgaatttccatcatgcattcatccaaaattaaggcagactgtttggattcttccagtggccagatgagctaaattaaatcacaagagcagatgcttttgtatgatctccaaattgccaactttaaggaaatattctcttga

SEQ ID NO: 12735 - DNA, 1124 bp, Homo sapiens
gtgttgtgtgttcagaaaagtacagtgttgacattttattgtttatgtaaagaagccatatttacataatacattcatatttttaagtatgttacagctcctgtagaaaaccattccattaagacagcaacaagtgatctggattcaatctttaaaatattaagtcaaattaaaatgttcttatcaagactccaatttaatttcacagcccatctgcacaggggaactgaggagaaacaggaatgaagagtgggcgacaaagagaaagcatcccttcccacacgccaagagtccagtgcaacgatccctgccacacggtcagccgaccccacttggtgccacagggtccagcctcggccactctgggctcaacctttccagcacgtctgggagcccaatgaggctatgggacagtgtgcatttccctcaaggcctccggaaagtcacctgccacccactgtgacctctgaggctgaaaggactaaggactcctttccccatcatttcagctgggccagtggctggctaaaatcagcgcagcattcccattcttctgaaagccacagctgaaataatgcaccagctgaaaccacagtggacagactgagatggcctccctctgggcctctagttggcaactttctcacccgggggctcctctttctccttttcccgctccttgttccagtccttaaggccttctggaagtgaggtgtcctcatccaagctgccagtgccttccacaaattcttcataggtagatttttccgcaaatggtctggggcccaaaagttcaaccatatcattcttatctaatacttctttttctaacaacagaagagcaaccttctccacgtcagctttcttttctgtgagaagagctactgttcttttataagcatcattaataagtattcgtacttcatcatctatcaatcttgcagtggcttcactgtaaggtttctccaataccatgtccccctgacgtgggaggtcaaaggagatttgcccaaccttttcattcatgccaaactgaacaatttgggcatatgcactctgagttacttttctcaagtcatcttgagcaccagttgtaattcttccaaagaagatttcttcagagc

SEQ ID NO: 12736 - DNA, 1162 bp, Homo sapiens
ttttttttttttttgttttaaacactttatttataaaaaagtacatttttaatcctcagtacattttcaacccatcatttttttttaatacaagtaaaagggggtgatgcaaacaccccccagggtcagaaccaggaggatctgctgggctgtccctggaccaaaggcggaaagggcgacaagacgccgaagcaaggtagcgcatcacgctgggaggggagggtggcagcttctcctgggattcttttcatttatacaaaaaaggaaaaccaattttttcgaccaagaatcccattcctcacagcaggggtcagaagagcagcagcaccgagtgggacaggggctcctcctggcctcacaagctgggcagtgttggcagcagtggcagcagcagaggggcctgcctcctggcatccccggtactgggcagtgtgtgaagcctccctgtgggtgtggggacctggggcacacccacctgcccctcactaggagagggtttctgttggcagtcaggctttgggggtctctgtctggactcctgaggcctgggagcactaccctcctcccagaagaggggacatccgtgtctgcttggctcagcagagctgcccacacccacctaacacaattcccaatttctctgctctgaggaaggcagaaaagttattgcaccagtgacttgggcaagtgggggttggctggcagaggaagcgcatgccccaggaaacagggcccctataaggctctcttgcagcccgggcactgggaaattcgtttctccttaatggctttcagcaggatcagaccattccctctgccacatctgtgctgagtggccatctggctgtgcatgcatgcgtgtgtacatgcgtgtaacacatgcctgcgcgtgggtgtgttggaggtgtgagtgtgtccactgtgggcacacgtactgggtctgaggtggtcgcacttgcaggcctgtgttcacctactctgtgctgctgcttttcagacccttctgataaaaggggactcggctggttctattacacattagaacaatatcaaaatctgtaaggaaacaggggcatgggtgtggggtggggggcaaggacagggagggcaacaagaggcaggatgacaactggggaggccttggcacaattcataccaagtt

SEQ ID NO: 12737 - DNA, 4073 bp, Homo sapiens
gaattcgcggccgcgtcgaccaagatcattcctgggagtgaagtaaaacgggaagaaccagaagctttgtatgcagctgtaaataagaaacctacctcggcagcctattcagttggagaagaatatattgcactttatccatattcaagtgtggaacctggagatttgactttcacagaaggtgaagaaatattggtgacccagaaagatggagagtggtggacaggaagtattggagatagaagtggaatttttccatcaaactatgtcaaaccaaaggatcaagagagttttgggagtgctagcaagtctggagcatcaaataaaaaacctgagattgctcaggtaacttcagcatatgttgcttctggttctgaacaacttagccttgcaccaggacagttaatattaattctaaagaaaaatacaagtgggtggtggcaaggagagttacaggccagaggaaaaaagcgacagaaaggatggtttcctgccagtcatgttaaacttttgggtccaagcagtgaaagagccacacctgcctttcatcctgtatgtcaggtgattgctatgtatgactatgcagcaaataatgaagatgagctcagtttctccaagggacaactcattaatgttatgaacaaagatgatcctgattggtggcaaggagagatcaacggggtgactggtctctttccttcaaactacgttaagatgacgacagactcagatccaagtcaacagtgacccaatgttgtcttccagttgtgaaagcaccccagagacccactatccaagtttcactctagcgtggaggcagggcaggcagccctgatcaaatatctcctacacaattcgtttacttcgtttgaatgttagagccacttgtgattatttttttgtgtttctaacttacagtttaaatttatttgtaaaaagttaaaggatagtgggtctttgtgtggctttccctgctgttcactctggcatctttagcatttttcttcttttttaatttgataattgtaggtcattagcatgcatattgagtttgcccttatgtggtgggagttcaaacacacaaagacccactatttgcacaaactattcttactggtttggaataggctgccatgcttttttaatgttattgcaacatgtgtattcatttacagaattcagataaaatttgcttatgttctgctattatgtttgatctaatcctaatcacagtgagctcttaattagctcaatatgtggtttgccctcaagtgtgcactgtttattactttgtaatatgccactatgagtactgacatttagatatgtttaaaggccaaaaactggaaacagccatgccctgttttctgtgtatttgggatgggaataacaacattttgggggagctttttaaatctcagagaaaaggaaagtggcctgctctggcaggtatgtgcagtgtttcatttgttccagtcccaaaaatgagcactgtcctatggtagttcgcttaggatctttatgtgctctgggctaatgaaggtactgcatcatgtgctgcagcgtgtgtattctttttcgatgacctataaagggattatttttgaggaatgaaaggctcccatcattgactgtgagatgggaaaaacctttcctagcttagagcatttatatcttaatccattttaaagtcagagttcattgttacctgttttaatcaggtgactacatgtcccagtatacaaaggggcactggttgacattcttcttaatgtatttagtaaatatcataagaaatcctttaagagtttaaatgtccccaaaacagacatgcgggctctagtcaagaatgaattagagtgaaggaaagctgtgtaacacctggcattcctctgtgttcatggagcttctttgaggctctaagattgattttaccatcagacttctctaatacctgttcttcaaccatattggctactttgacataagaatttacttcttttcctggaatggaaaacactttaaaaaataataacaaacattattataaactaatatatgtgagagtacttagttgatacaaaaaggagttttagtagacagtattatactatatttgaaaatcaaggagaattttatgcaacttaaaatgtttacaaactgcagtgcaatctactgtttgtgaatgtcaaagtatcaggaaaagtgtatatacaatcacagagtcatatttcctcacaaagttatttacaaagagtgaaatatgtttttgtacctctcagtttcagttagaggcatattttgtgcaatatttatgttaatgtgcctatacattatgaatgaattatttcagtcatacattgcctaaatcataactttatgatgcttgggaaagaatcaacagttaaaacttcataaagttctaatgtctgtgttccaaaatacatcacattattaggatgtagggagataagtatgtgtgctccctagggtggcaatttctagttactagaccacctctatttttagcatttggcatcctcatgatacttttataaatatgacattaataggaaagcaataatttcattttacagatagaataacagatttgcctgcattcactgaaagagtgcaaagactgggtccttgtgaattcaactgactctcccaaattgtattaattacctgttcttgccttttattttctgaacttgccgcttttgcattctttgagttcagtttaaagacacttactttaactccattttaaaccctcgggctagaaatcgtaccactgttaattagccacattatttggtctaacagtttttgtttatcattctgaaactgagtttatctaatacattgataaattatttcaaaggtatttttatagttcaaatcgcttcacttttaccctgacacgtataaatgactaggaatgaccttcagatagcgtttagcaactgtaaccaatctgacaataatgtgttcatcaggtacctgtggattaaatcacatactggcatatttaagctgaaggtcagtctggaaaataaatttactatattgactgaaataccactctttgtgtaggtattttgtcatgtatttaagaaaacgctaaaaagaatggaaattgtatgacaataacttaagtctttctccaaagtgcatgcagtcttttgcgatacctcattcagccgagtatttgtactcttcctcattcagtataaggaagctttcagtttgcttagaaggcaacattggaatgttagagttcatcagaaacatagaattttaaactgtgagttccactgaataaatttgaatttctgtaggaggtaaagaatcaaaacacctatttaaagattgcaattgcaatgtataataatcacttttaaattatttgattaaaccttttaggttttccagaaatgaaaaaaatcagttctaaaaccaaagctgatttttagaaaatttgagaatgtaaatcagccctatccataatatagtttctctaaaactttatcttaaagagtcattttaaaataatataactattaaaaatgtaactgatatttaaatgttttgaaataaaacattttaaaatataaatactgtagtttaaaagaaagaaactgggggaaagaaaagtagagaaagaaataccaattccagtccaaagctttatttgccaggttttcttagaatgacttttaccagtttatgaattcttgtaaacagaatctataatggaaatactgaaagacttttgcctaaagtggcattattgaatgctgctgtgatgctactgtaatgtaataaattattaaattgttgcaaagtgctgtttttgccttaaaattttattttgtgtgtcttgaaaattatagtattaaaggtattgagattgtgcaaatgctgggcacgcttggcatgagataatctgtttttatttttacaaaattgtaatataactatgcaagtgtgtttattaaaagaacacaaactatattagttgtattgtgtatttcttttgaaacattctttaaaacttacttttaatt

SEQ ID NO: 12738 - DNA, 808 bp, Homo sapiens
tttgcaatgtttagaacattttattaaagtacaaaattgttggaatttagctaatagaaaaacatagtaaatatttacaaaaacgttgataacattactcaagtcacacacatataacaatgtagacaggtcttaacaaagtttacaaattgaaattatggagatttcccaaaatgaatctaatagctcattgctgagcatggttatcaatataacatttaagatcttggatcaaatgttgtccccgagtcttctgcaatccagtcctcttagaaattggtttctctctttgggagattcagactcagaggcagccagaggggacaggtcaagagctgaaataatcacataactactctaattttcttcattctattgactgtgtcaagttatagacacagccaaagtgtttttcttcggcctctgatgatttgagaagatgaagaacatgagcaatttctcattgcttaaagaaaaacttggcacataagaggctgagtgtagtagagtatctgtactagaaccataaagttctatctgatggtaaattatgtataaaactaagataaaacagataattatgctctatctcatatctactgaaagtagaaaaggaggaagagtgacacttttaaatcaaactgctctagttttagcttagtggatggttaataaacacactgctttacgctgaagtgatcagatagctatttctacagttcagaagaacttaaaaatcaggttttaaagacaaaagaaagcagactcaaaacacagacaaagcagagaagaaaacaatgcccatgag

SEQ ID NO: 12739 - DNA, 957 bp, Homo sapiens
cgcctttctccgctggcaacggcgccgctccccgctcctcctccccagccatggcgttcacgttcgcggccttctgctacatgctgggcgctgctgctcactgcccgcgctcatcttcttcgccatttggcacattatagcatttgatgagctgaagactgattacaagaatcctatagaccagtgtaataccctgaatccccttgtactcccagagtacctcatccacgctttcttctgtgtcatgtttctttgtgcagcagagtggcttacactgggtctcaatatgcccctcttggcatatcatatttggaggtatatgagtagaccagtgatgagtggcccaggactctatgaccctacaaccatcatgaatgcagatattctagcatattgtcagaaggaaggatggtgcaaattagctttttatcttctagcatttttttactacctatatggcatgatctatgttttggtgagctcttagaacaacacacagaagaattggtccagttaagtgcatgcaaaaagccaccaaatgaagggattctatcccagcaagatcctgtccaagagtagcctgtggaatctgatcagttactttaaaaaatgactccttattttttaaatgtttccacatttttgcttgtggaaagactgttttcatatgttatactcagataaagattttaaatggtattacgtataaattaatataaaatgattacctctggtgttgacaggtttgaacttgcacttcttaaggaacagccataatcctctgaatgatgcattaattactgactgtcctagtacattggaagcttttgtttataggaacttgtagggctcattttggtttcattgaaacagtatctaattataaattagctgtagatatcaggtgcttctgatgaagtgaaaatgtatatctgactagtgggaaacttcatgggt

SEQ ID NO: 12740 - DNA, 2203 bp, Homo sapiens
agcaccaaatccaagatggcggccagcaggaggctgatgaaggagcttgaagaaatccgcaaatgtgggatgaaaaacttccgtaacatccaggttgatgaagctaatttattgacttgggcaagggcttattgttcctgacaaccctccatatgataagggagccttcagaatcgaaatcaactttccagcagagtacccattcaaaccaccgaaggatcacatttaaaacaaagatctatcacccaaacatcgacgaaaaggggcaggtctgtctgccagtaattagtgccgaaaactggaagcccaggcaaccaaaaccgaccaagtaatccagtccctcatagcactggtgaatgacccccaggcctgaagccaccccgcttcggggctgacctagctgaagaatactctaaggaccgtaaaaaattctgtaagaatgctgaagagtttacaaagaaatatggggaaaagcgacctgtggactaaaatctgccacgattggttccagcaagtgtgagcagagaccccgtgcagtgcattcagacaccccgcaaagcaggactctgtggaaattgacacggtgccaaccgcctggcgttcgcttgtggcagttactaactttctacagttttcttaatcaaaagtggtctaggtaacctgtaaagaaaggattaaaaatttaagatgttctagttctgctctctttgttttaaaaatcactgcttcaatctacttcaaaagaatggtgtttcttttcttgtccaattttatccaaaatcttcaagttacatttaacccataaggtttaaaaaaaaggaaaaaaaacggttgtggttccctttcttccctacccttgccactcccactttctggcaccgagtttatttttcacttacttacttccccagaccccgggctcgcctccacaaaggagaagagactgccctggcggtcctggtggcttttcttagcatgtgtgggcactgttgcccagtgtggggagttggtttaaattctcctgactccagtttataacatccttttaaaaaatttaaaaacaaacagccacacccctcctccagtccttctcctcagttcttgtgtgaaactccagctgatgttaccacagtaacatcagttaattgggcaagccctgatgtcagtgtgtgtaaactgacctctggccctggcctggcacagagaaagccctataatcacaggtctgtggtggccccgaaatggggggcctgctagtcaggaggatgctgtgcacactgtgtgtgatgaatctcgccagaaaggctcctgaggtcccaggttggcacttctccctgcagccattgtagaagatctgctggtccttgcaggcaaagctacagccagaatgtccgtttgaaactcctagctcatctgtcaccgagcttcatccgaatgtgccacggagcttgctctccacttcctccgtgcagtggccctgccacagccctccctcggcacactttgaccctttgtaggattggaattagcaggactcggctatttaaagcaccagtctggggtcgcctgggcccctgctgaccccctcctccagagcagccagcccagcccgggaacaagacggacttcctctcccttcggactcacagcctttgcagagtcaagctccacttgaagctcactcagtaatatcctttcaatgtgttttatattgttttgactgcctttttttgtagaaataaaaattgaccttagaatttatcgtcagataaacttgtaaagatttgaatattaatgtcttttcaaggcaaatgggattgtccccgcactagtagagaatccatgtcgctctgacaccccaaggaagccgacgatccaaatgccgtgtgtcaccaaccccgcttctgccactggcggcttcccttcttggctcttgggggggactagatcctgtggagaagatgacttaaactttgctttttgttttaattttaattctataacttgagatctttccggggcctacaggcgtgtaagacagcttggtctggtctgtgcagaagtggggagtgatgggtaggttcggcagcctaacattgttcaggcgcatggccctgcggtgtgtacacgaactcggcttcttttgtcctaggtacgccaagggcaggtttctggagactcccttgtgcccgggatggcaagg

SEQ ID NO: 12741 - DNA, 1446 bp, Homo sapiens
gggctggacctgcccgatgggggccatctcacccacggctacatgtctgacgtcaagcggatatcagccacgtccatcttcttcgagtctatgccctataagctcaaccccaaaactggcctcattgactacaaccagctggcactgactgctcgacttttccggccacggctcatcatagctggcaccagcgcctatgctcgcctcattgactacgcccgcatgagagaggtgtgtgatgaagtcaaagcacacctgctggcagacatggcccacatcagtggcctggtggctgccaaggtgattccctcgcctttcaagcacgcggacatcgtcaccaccactactcacaagactcttcgaggggcaggtcagggtcattttaccggaaaggggtgaaggtgttgaccccaagactggccgggagatccttacacatttgaggaccgaatcaactttgccgtgttcccatccctgcaggggggcccccacaatcatgccattgctgcagtagctgtggccctaaagcaggcctgcacccccatgttccgggagtactccctgcaggttctgaagaatgctcgggccatggcagatgccctgctagagcgaggctactcactggtatcaggtggtactgacaaccacctggtgctggtggacctgcggcccaaggggctggatggagctcgggctgagcgggtgctagagcttgtatccatcactgccaacaagaacacctgtcctggagaccgaagtgccatcacaccgggcggcctgcggctttgggggccccagcctttaacttctcgacagttccgtgaggatggacttccggagagttgtggactttatagatgaaggggtcaacattggcttagaggtgaagagcaagactgccaagctccaggatttcaaatccttcctgcttaaggactcagaaacaagtcagcgtctggccaacctcaggcaacgggtggagcagtttgccagggccttccccatgcctggttttgatgagcattgaaggcacctgggaaatgaggcccacagactcaaagttactctccttccccctacctgggccagtgaaatagaaagcctttctattttttggtgcgggagggaagacctctcacttagggcaagagccaggtatagtctcccttcccagaatttgtaactgagaagatcttttctttttcctttttttggtaacaagacttagaaggagggcccaggcactttctgtttgaacccctgtcatgatcacagtgtcagagacgcgtcctctttcttggggaagttgaggagtgcccttcagagccagtagcaggcaggggtgggtaggcaccctccttcctgtttttatctaataaaatgctaacctgccctgagtttccattactgtgggtggggttcccctgggccaaaaaaaaaaaaaaa

SEQ ID NO: 12742 - DNA, 945 bp, Homo sapiens
attcggcacagcattcatgcaccaaacactgctctaaatttacagacaactttattcttcaccaatgtaggatagcctttattacctgcatattatagacaagggaaacaacttcatgcaggcaattacctctccaaggacatcaaataaattcacagaaaagctgtattcaaatacaggctttgtcaaatcccaagcaacaatcttgatttagagatggctttggagccagcggcctgagttcaaatgctggttctgctgtttcactagccaggaaacttgcagcaagctaccaaacctctctcttctcagttttctcatttgtaaaataacgttagcgatgacagtaggaggatactaattattacctcatgtagttgataggaagattaaataatacatgtaaagcattgagaagagtgtctgacacatggtaggaacaaaataacttcttctttttttaatcagacggcaaacttgatgtcaattctaactgtgttaatgaagagcaaccagaggctggaagtaggtatctctcaaaaggattccaatcctgaagattccggggaaggaaagaaagaatctcttgaaagcgacgtgagttggaaggcttacaggatgctcctgcagggccacaggtgtctgaggagtaaaagccagagcaagtgccagtgtggatggtcctcaccctgcaagaagctggaaaactcctaggaatgcattgtcctcaccttgttacacctgcgtggcaccatggcaggattccacatttcatagaatacaggttttcaagcaaacccctgttgaccatgccctaatttcctattgatttctgttctataaattgaatggatattcctatggaaaattttttgtttcaaaatacaggaaaaacattcctattacctttctgaggctggctttccagcaattgtttcaaaggaa

SEQ ID NO: 12743 - DNA, 2931 bp, Homo sapiens
gggctccggcgagggacagacgcaccgatcgccggagggacagacacacgaccacgcggcgccaccgcccacgcctccacccaccggcgcccaagtcctccccgcgccgcctcctctgtatggcacaaactttcctcccgggacggaacacgctgcctcagggagcccgcgaccgcgccttctcctccgccggtcccatacgctgctgaaatgggttgcggattgaacaagttagagaaacgtgatgaaaaacggcctgggaatatttattcaactttgaagaggcctcaggtggaaaccaagatagatgtgtcctatgaataccgcttcctggagttcacgactctgagtgctgcggagctccctgggtcctcagcagtgaggctggcctccctgcgtgacctgcccgcccagctcctgggagctgtaccagcagggcttctcgctggcggccctgcaccccttcgtgcagcccacccatgagcgggagaagacgcccctggagcacatctttagagccatcctgatcaagaaaaccgacagatctcagaaaactgatcttcacaatgaaggctacatcttggaattagattgctgttcctccttagaccacccgacagaccagaaactcatcccagagttcattaagaagatccaggaggctgcaagccagggcctgaaattcgttggtgttatacctcagtaccattcctctgtgaactcggcaggcagcagtgctccggtgtctactgccaacagcaccgaggatgccagagatgcaaaaaacgcacgtggggatcacgcgtcactggagaatgagaaaccggggactggggatgtgtgcagtgctccggctgggagaaaccaaagcccagagcccagctcaggccccagaggggaggtgcccctcgccaagcagcccagctcaccctccggagagggagatggtggagaactttcaccacagggggtgagcaagacactggatggaccggagagcaaccccttggaggtgcatgaagagccactctcagggaaaatggagatcttcacccttttcaacaaaccgaagagccatcagaagtgccggcaatactaccctgtcaccattcctctccatgtctccaagaatggccagacagtgagcggtttggacgccaactggttagagcacatgagcgaccacttccggaaaggaggcatgctggtgaacgcagtcttctaccttggaatagtgaatgattccttacatggcttgacagatggagtattcatctttgaagctgtttccacagaagatagcaaaaccatacagggctatgatgctattgtggttgaacaatggacagtcctggaaggtgtcgaagtgcagacagactacgtgcccctgctgaactcgctggcggcctatggctggcagctcacctgtgtgctaccaactcccgtcgtcaagactaccagcgaggggagtgtatccaccaagcagattgtctttcttcagagaccttgtctacctcagaaaatcaagaagaaggaatcgaagtttcagtggcgattctccagagaagaaatgcacaacaggcagatgaggaaatcaaaaggtaaactcagtgccagagacaaacaacaagcagaagaaaatgagaagaacttagaagaccagtcttccaaagctggagacatgggaaactgtgtttcaggacagcagcaggagggtggagtctccgaggagatgaagggccctgtccaagaggacaagggagaacagctgtcccctggtggcctgctgtgtggggtgggtgtggagggtgaggctgtgcagaatggtcctgccagccacagcagggccctggtggggatttgcactgggcactccaatcctggagaggatgccagggacggggatgctgaggaagtcagagagcttggtacggttgaagaaaactgagtcttgggcaatttgtgctaaaactaggtgagttgccaaacccaaggcatcttaccaacagctggtttgggggctggtttccctggtgttgtgtgttacctaccctttggcttggcttgacctctccttgtgagctcacctgagccctcccagggccaggttcctgacagtgttggtttttgcacatccactggaaaggtgtcattaatgacccagtgttagaatgcaagaggtcaggttattctagccctcatggctgaaggcccagtcctggctccaccactcctccagccagagggtctggaccatccagtgcctgtcctcgccacagggcctccagggagcattcgggtcaaatccatggacaccctgggctacaaaccaaggctgctgttcatcccacatcgtgtggggcagtgtccatcccctgcagctacttggtgacttaacaactccaggagccctgtcagctgccctcctccacctaaaccccttcgactcttctgctttgacaaagaaaatgacattggggaggggaggtgctccgcctcccagcttttctcaaaatagtcctatagatactggtaatctggaaatgaagaagtaattctgtctctgcacctacttttgcagaatgttcaaggaagtattctgtgttagtattaatgccaaaaagttgtttttaaaggttttgtactcagcacatcatacaaaccacattacttctgtcacttcagggcatcgggactggctggcgcccttgttatgtgctattttaatcagtgtaacattggtcaagttgttacccatgtatgctgtgtttatcatgtgtatatcgtccagaaagtattaaggctttaggtagatgcaactggcgaaccttggagagggaatgctgattgtcttgaccaaacccacagcctgtctcttctcttgtttagttacttacggcaataaatcatctatgagttagtgcaccgtga

SEQ ID NO: 12744 - DNA, 2394 bp, Homo sapiens
  misc_feature (1)...(2394): n = a,t,c or g
gggaacggatccagaaggtggtttccagctagggagaggatgtgtcgggcagtggagatcgccctaagaacctgtgagcttagaaacagctttcagagaccagaaggaggcctggggcccgtcgggaagtttgctgaaggaactaagagtggaaacaatctctgactgcacacaagtgcatttgtgatccaccacaggcacgtttttgtcaattggctggggaagccaacccatctaacctcctggactctggaaaggcattctccgggtctggtttctcacacattacacagcagaggtttggagttagttcacagaaaagttaacatcccggaacagtgcagaagggctttggggtttcagtttgctaagggcccccattaacaaaattgccacagaaaccaggtgggttttaaacagatttattttctcacatttggaggctagaagttcaagatcaaggtgtcagcaggcctggtttttcctagaggcctcttttgttggcttgcagacagctgtcttctcactgtgtccttgtgcggtcttccctccatgcacacacatctctagtttcattatgtgcccaacgttcctcttctaagaacaccagttggactggattttaactttaaccagcctcatttaagttaatcacctctttaaatgctcaatctccccnttgggtcnctttctnaggttnnttgggtttctcaacgtaagaatttagggggacagaattcagcccgtagcagctgggcagcaggactcatgggtcccagttctcaggccccaaggactcagagcagcaaaggatacgtgacacaagcagggctgaactggacaccagactttctttggggttgtaaaaggagaagtgtgactccactgccaagggtaagcactcttgtcttatgctaccctttattcttgaaccttggggcagcctgtgtctcccttccctaaacgtcatctgttccgtttttccagtcttccagacctggtccttggactggagaccttcacccttcctattttgtggctttctcttcaaatccacctcgtccttcctccatgacttataagtcatcatctctgctggtttctgaaatgagatatgcttcttggggtcttcagtgaagaggaatagcaagtgaaaggaggatggtggcagggtacatgaacccctaccaggcttctaggcttcccctgcatggcagccagcctctaagttggcccccaaccatccctgccttcttctattcacacccttgtgtggttccttcccacattgaataggcctgacttgtgtaaccactacactattgaagaaatgagagtttgacttctgagggtaagtcataaaatacatcgtggcttctgtcttgttttctttgatcgcttactttgggggaagccagcttccaggtcatgaaaatactcaagcagccttatggagtgctccacatgacaagggatggaggcctcccaccaatagccatgggagtgtgcaatcttgaaagctggtccttcaattccagccaagcattcacatgaccgcaatcctagctgatctcgcttgtgacctctatgggagaccctaagccagaaccactcagagaagctgctctggaacgtcannnnnnnnnnnnnnnnnnnnnnnnnnnnnnnnnnnnnnnnnnnnnnnnnnnnnnnnnnnnnnnnnncgtttcagcagtagacaatatatttattttgtccaggggagtggaaaggcgattacagagtttgttgagccccatagagtcctagtctttgcttaaagaaatataccagttctttctaatacagaatccattaagttcgttggttgcaaacaatagaaaccaactctgcctcacttatgtttattggaggccataagagagccacagcatctaccaaaaagccaaaaaaaaaacaggttttggaaaagacaggaactagctacaggagctaatggccaatcttgtctgagttctttgatggcgacacatgaactacagccgttttgttgttgttaatttctccgtgttttcccctcagttttggatgactctgctcaaggttcagattctgaggagcaagtatctgttgggctatctgaggtcctgctaccattccttggccagtaataggtagtttcacagggattatatgcaatggaggaaaagttgttctcaaggaaaactagggagctttctccagaagatgatgtaatggcagaaacaacaggtggttgaccacagaaggggacaataataatacttgtaatttattgtgcgcttatatgagcctcaccctctcccaggtgtcagataatgctcgtaaatgccttagtccatcatctcagtaaattttttttataacactatgaaa

SEQ ID NO: 12745 - DNA, 761 bp, Homo sapiens
agagtgcaaagacctcataaaatttatgctgaggaatgagcgacagttcaaggaggagaagcttgcagagcagctcaagcaagctgaggagctcaggcaatataaagtcctggttcacgctcaggaacgagagctgacccagttaagggagaagttacgggaagggagagatgcctcccgctcattgaatgagcatctccaggccctcctcactccggatgagccggacaagtcccaggggcaggacctccaagaacagctggctgaggggtgtagactggcacagcaccttgtccaaaagctcagcccagaaaatgatgaagatgaggatgaagatgttcaagttgaggaggatgagaaagtgctggaatcatctgcccccagggaggtgcagaaggctgaagaaaaggaagtccctgaggactcactggaggaatgtgccatcacttgttcaaatagccatggcccttatgactccaaccagccacataagaaaaccaaaatcacatttgaggaagacaaagtcgactcaactctcattggctcatcctctcatgttgaatgggaggatgctgtacacattattccagaaaatgaaagtgatgaggaagaggaagaaaaagggccagtgtctcccaggaatctgcaggagtctgaagaggaggaagtcccccaggagtcctgggatgaaggttattcgactctctcaattcctcctgaaatgttggcctcgtaccagtcttacagcagcacatttcact

SEQ ID NO: 12746 - DNA, 1556 bp, Homo sapiens
ggccgcagcggactgccctttcccaagatggcgtcgaagataggttcgagacggtggatgttgcagctgatcatgcagttgggttcggtgctgctcacacgctgccccttttggggctgcttcagccagctcatgctgtacgctgagagggctgaggcacgccggaagcccgacatcccagtgccttacctgtatttcgacatgggggcagccgtgctgtgcgctagtttcatgtcctttggcgtgaagcggcgctggttcgcgctgggggccgcactccaattggccattagcacctacgccgcctacatcgggggctacgtccactacggggactggctgaaggtccgtatgtactcgcgcacagttgccatcatcggcggctttcttgtgttggccagcggtgctgggggaagctgtaccgccggaaacctcgcagccgctccctgcagtccaccggccaggtgtctcctgggtatctacctcatctgtgtggcctactcactgcagcacagcaaggaggaccggctggcgtatctgaaccatctccccaggaggggagctgatgatccagctgttcttcgtgctgtatggcatcctggccctggcctttctgtcaggctactacgtgaccctcgctgcccagatcctggctgtactgctgccccctgtcatgctgctcattgatggcaatgttgcttactggcacaacacgcggcgtgttgagttctggaaccagatgaagctccttggagagagtgtgggcatcttcggaactgctgtcatcctggccactgatggctgagttttatggcaagaggctgagatgggcacagggagccactgagggtcaccctgccttcctccttgctggcccagctgctgtttatttatgctttttggtctgtttgtttgatcttttgcttttttaaaattgttttttgcagttaagaggcagctcatttgtccaaatttctgggctcagcgcttgggagggcaggagccctggcactaatgctgtacaggtttttttcctgttaggagagctgaggccagctgcccactgagtctcctgtccctgagaagggagtatggcagggctgggatgcggctactgagagtgggagagtgggagacagaggaaggaagatggagattggaagtgagcaaatgtgaaaaattcctctttgaacctggcagatgcgagctaggctctgcagtgctgtttggagactgtgagagggagtgtgtgtgttgacacatgtggatcaggcccaggaagggcacaggggctgagcactacagaagtcacatgggttctcagggtatgccaggggcagaaacagtaccggctctctgtcactcaccttgagagtagagcagaccctgttctgctctgggctgtgaaggggtggagcaggcagtggccagctttgcccttcctgctgtctctgtttctagctccatggttggcctggtgggggtggagttccctcccaaacaccagaccacacagtcctccaaaaataaacattttatatagacaaaaaaaaaaa

SEQ ID NO: 12747 - DNA, 1686 bp, Homo sapiens
ccagctgccggcaggacctttctctcgctgccgctgggaccccgtgtcatcgcccaggccgagcacgatgccccctaaaaagggaggtgatggaattaaaccacccccaatcattggaagatttggaacctcactgaaaattggtattgttggattgccaaatgttgggaaatctactttcttcaatgtgttaaccaatagtcaggcttcagcagaaaacttcccgttctgcactattgatcctaatgagagcagagtacctgtgccagatgaaaggtttgactttctttgtcaataccacaaaccagcaagcaaaattcctgcctttctaaatgtggtggatattgctggccttgtgaaaggagctcacaatgggcagggcctggggaatgcttttttatctcatattagtgcctgtgatggcatctttcatctaacacgtgcttttgaagatgatgatatcacgcacgttgaaggaagtgtagatcctattcgagatatagaaataatacatgaagagcttcagcttaaagatgaggaaatgattgggcccattatagataaactagaaaaggtggctgtgagaggaggagataaaaaactaaaacctgaatatgatataatgtgcaaagtaaaatcctgggttatagatcaaaagaaacctgttcgcttctatcatgattggaatgacaaagagattgaagtgttgaataaacacttatttttgacttcaaaaccaatggtctacttggttaatctttctgaaaaagactacattagaaagaaaaacaaatggttgataaaaattaaagagtgggtggacaagtatgacccaggtgctttggtcattccttttagtggggccttggaactcaagttgcaagaattgagtgctgaggagagacagaagtatctggaagcgaacatgacacaaagtgctttgcccaaagatcattaaggctgggtttgcagcactccaactagaatactttttcactgcaggcccagatgaagtgcgtgcatggaccatcaggaaagggactaaggctcctcaggctgcaggaaagattcacacagattttgaaaagggattcattatggctgaagtaatgaaatacgaagattttaaagaggaaggttctgaaaatgcagtcaaggctgctggaaagtacagacaacaaggcagaaattatattgttgaagatggagatattatcttcttcaaatttaacacacctcaacaaccgaagaagaaataaaatttagttattgctcagataaacatacaacttccaaaaggcatctgatttttaaaaaattaaaatttctgaaaaccaatgcgacaaataaagttggggagatgggaatctttgacaaacaaattatttttatttgttttaaaattaaaatactgtgtacccccccccactccatgaaatgcaggttcactaaatgtgaacagctttgcttttcacgtgattaagaccctactccaaattgtagaagcttttcaggaaccatattactctcatgatacttcattaatctccatcatgtatgccaagcctgacacatttgacagtgaggacaatgtggcttgctcctttttgaatctacagataatgcatgttttacagtactccagatgtctacactcaataaaacatttgacaaaaccaaaaaaaa

SEQ ID NO: 12748 - DNA, 667 bp, Homo sapiens
ggtgaaattaaatcaggattcaggaccattttataggaataatttttcaagtctccctgggttaatgtcacagtaagccacatactatatatcagatattttggaaataactgcaaaagcaagagttgccgaataagcttctgtaactccgatactgcaatataaggatcaaatgagaaacacaagtacagctggccatccgtgtcagcaggttctgtaaccacaaataccgggggagggaagaccatacctgaaaatgctttacaaactaagttgtacgatagtctcaatgggttcaaaacaaatgaactgaaggacatcactgcccaacatgagatgtactgcaccttcaataacatcttcctctgatccactcagatctttcttatcttcagtctcaaagtcataggctctcgtaaactgatcttccacagacggcttcccagatttcctggaatacttttttccggaggacaccatatttagatgcttcctgactttaaaaaacaaatttctttaaccttctgaatgcaaagacatcattttaatacactggtaaaagtttaaatatcaaaggagatatcgaacaaggattgttgaatacaattttaacagtttcctcatttattggggggcccaaaagtttagaagatatgacatttggtta

SEQ ID NO: 12749 - DNA, 845 bp, Homo sapiens
gaaggtctcaagtcatttgcaccactaggaatcgtttgtgttattgtgactgatatatgtcctcagagttgtatcagtgttgtcccctacacacacatgcacatacatgcaccacacaatatgcacgttctataagacagagcctctatttttggtgtctgcttagccctccagtttcccattgggattagttgttttctccaagcttcagacaacttggagatcctgcctaactttggttgctcttccttgtcagactggaacttaccctcagtatgtacaaccaatcactggctctcagggaactcatcaccctgaactatgcctgacaggacaggagcaccatcatctcggacaaacactgccactttaagttccagctccctttctagcctcaggcatttcaaggaaatcacttctcttctaactacaagcagtcagaaagagcagacagtaaaacacagataagacagctcaggcacagagggaagtgggaggaaagtctcttgggtaactgccaaacttcaccctcatacaatgggccccagtaaaacagtgggccttaataagcacattcctttcctttcaggtgcactaagatagggaagctaaaagcagacctgggggtatgcctgcagctgcaggaagatgtatgggaacagacacacaactctccctcccaaataagcacaacagagagacacagaagcagtccaagcctctgataaactctcccaccctgaatctttaaaaactcttagtctgcaagagagtgtggcttctgacctaactcgatcagaagtccctcccaggtttaaaataaacctgttaactgttgagccaaa

SEQ ID NO: 12750 - DNA, 535 bp, Homo sapiens
  misc_feature (1)...(535): n = a,t,c or g
gatttttttccccttaggtcagtctattcactgtttagatctggtaaattacttgtatgaattgaataaattctctgtatcattgtactgtttaatagtctctgatacaattgtgatactcataaggtattttcccccctttattatgattacattctagatcataaacattgtaagggcatcttttcattatataatccaatattgattgtttgaattcctccttgtacatcctggctttgtgctcaatttcttgaaataatataaccaactctaaattacttgtgttaatagatcggtaacatgacacaggtaagttaaatcctggataaatgagccccacagaataaaggtttttcctcttgctgtggcctactggaagccttcctaactctatagctggtaaagtagagcagaaagggccagaatggcttaagatggagctaaatccctatagcattccattttctgctcttgcctcttgaacttaaaaagnttgccatatatcctaacaatctgttcccgaactgttagg

SEQ ID NO: 12751 - DNA, 2057 bp, Homo sapiens
actttttgtatagaatgaaacatgcaagtaccacacactgtttgaattttgcacaaaaagtgactgtaggatcaggtgatagccccggaatgtacagtgtcttggtgcaccaagatgccttctaaaggctgacataccttggaccctaatggggcagagagtatagccctagcccagtggtgacatgaccactccctttgggaggcctgaggtagaggggagtggtatgtgttttctcagtggaagcagcacatgagtgggtgacaggatgttagataaaggctctagttagggtgtcattgtcatttgagagactgacacactcctagcagctggtaaaggggtgctggaggccatggaggagctctagaaacattagcatgggctgatctgattacttcctggcatcccgctcacttttatgggaagtcttattagagggatgggacagttttccatatccttgctgtggagctctggaacactctctaaatttccctctattaaaaatcactgccctaactacacttcctccttgagggaatagaaatggacctttctctgacatagttcttggcatgggagccagccacaaatgagattctgacgtgtccaggtttctcctgagctcatctacatagattggtagacccttcctttggattaggaaagatgagttttacctctggtacactgtcttggtaagcctggatgtgacagacacctcggctctccttgaataagaaagccagcagaactcttaaagccagttgtagtacggagttgtcagcactcactgaacctcactttacagggataagagtggtgtggcattttaaatacaatggtatgttattgccagggagtgaggtacaagacgatggctcatgtcacaggcctacctgatacggtgtcagagaaagtggtggggaaaggatctggttcatggaattctgatcttggcccataggtgaaccaccaaaatagtgctcgagtcttaggttactgtcatcaaagacttgggatgactccattatatcctggggttgtgggtattagaactaaatatggaggtcctgagcatggggactggcgtcctcagtaggtgtttgggaatatgggaagggtctcctatttattcaatagagttttctcagttattttcctcctttgcccttgcaatctccagcaaaaggtgggatctaggaagaaagaatccagtgtagaagttgagaagaacttgaacgttttggttctggataaggtcactgtcctaggtgctaggtggaccgagcaaaagactcagtggatgaactggtgcagtgcctgacagaataaagaacagtattaatccctttgagaaagcatagtccagcaggacagtggccatttggacagaagcccacttagtttcttgggagcaacagcacgtatcagaagccagacttgctcttcggtcatgcactttgggatacagcgtataggtgcagccctgtcacaacaccaacagaagtagcagcctctgggtgcagtcacccacaccccaaagctggaaggatctggttcaacatagcacaaacccttaggaaaaatgaaattaacatcactgatgtgtaatccagtaaaatctccctttttcgggtgtgtatgtgggcatgtgcccatttctatgtgtgtgtctacgtgcagctcactaccaacagcctcatgtgcacttgacctgacagtgctcgctgagaactctcaccaggttggcgcctgaatgccttactctcagcagtcagaggcttgcttgctctgtgcagatttttaattttcttttttggccctaggctggttgggacctctacagcttcattctttcaccattaaatagtggcctttttcagtattttccctcttcccctttataaattatgctaaagccacaaagcacatttttggggatcatagaaggttggggtccagaaaggcatctgtgtgatggttccattgatgtgggatttccctacttgctgtattctcagtttctaataaaaagaaccaaatgaaatatg

SEQ ID NO: 12752 - DNA, 1453 bp, Homo sapiens
atgatgtattactatgatgatggtacaggtgtacaggtgtatcctgtggaagaagcattgcttaaagagtatattaagcgtcaaattgaatattacttcagtgtagaaaatttggaacgagacttctttcttcggggaaagatggatgaacaaggtttcttgcctatttccctgattgctggttttcagcgtgttcaggctctcactacaaaccttaatctcatcttagaggcactgaaggatagcacagaagtagaaattgtggatgagaaaatgagaaaaaagatagaaccagaaaaatggccaattccagggccctcctccacgcagtgtgccaccaacagacttctcttcaactgattgattgtcccagagtttgtaccaggccaagccttttggctcacatacagttcaggggtgatgatcttctgaagctcttggatgtcatttgatcggaatatgcagtggaataggtgactcactgaaatgcctttataaatactggaacaaatcctgctgcaaaaatgaaagcgatcagactgtcttctgttcaagaatgtctattcccacctcttggtgagcgaagttgggccaacactgcagtggagataaccacctttgcgataatgagagacagaccagaggactgctactctttttataggagctgcctatttctgtgtaattggcctgggctgcatgggctgcttttattcatggtgggaaagttaattattattattctggaaataccgcaagattatgttttctgtttccagggttatgtacttgtgtccagatgaataaagcagaaaaagaggggatttgagtagcatttccccagattcttaagtactttggctattagatttggcctttcagtgtagtgtacattgtaaaactcagatattgtcatgatgtttcacttggacataagacttattaatgtggtcacttaaggggtaaggaatttaagaactggatgaggttatttcttcctttactcttcaaaatgtatttttgatacatcagtatgagaggacgtcccatcaacaaagcatcgatgatggacagtctcacactatttttatcatatgtttctttgtcagccttctgcttctaatcccagtaagcaacttggacaggcattttaaaagctgaagaaaagtgacattattttagctagtggtttttaatttattttttgttaagatataatgggtgattatataagttagatttatttatgatatcaacttgggtccaagatgatagttttagctagcttatgaacattgggttcacaaggcattgggtaagttagataaaatagcatatactttctctgcagggtaggtaagataggtcagtcaagttggtaatgcctgtccattaaccatttatgcatactaataaaattataagaataaaatcataaaaaaaaaaaaaaaaa

SEQ ID NO: 12753 - DNA, 483 bp, Homo sapiens
ttttttttttttttttataccaaggctttgacatttagcttgtgctaaatcattttttaaaattgtagctctgaggcattttattataaaaacttagtactcatatacataaactaatacgaacttaaaattcatcatacatttacttcattttttagcttgaccttctagtaaatctttagcttcattgattttggctgctatataaggagatcctcctttgtcaggatgatttaaaagcataattcgtcgatgagcatctcttattttccctttattggcagtagggagattttggtaggctttgaaaaacttgttttacttgaggctccatatgcttcatggcttgcaaaacgtaacggcctgcaaatcctgcagcagcaatggtcagtccaactgctaccactgtactggccatggctccggctgggctcccttgcttccaccgggagcacggctcatcccagctcagaggccgcggca

SEQ ID NO: 12754 - DNA, 659 bp, Homo sapiens
atgctctttttttggttctaaaactgatgtggtttcatttggagttctcttcttttcattaaccacatcaccgtctgcttctcttgcttctagtagtgataaactattttgctctttatggataaattcattcatctcttttgtaaccctttctgtttgctgcttttcttcttccatctgtttatcatgtaatagctgctgttctttttcttttctccaaaaagcttcctgtttttgccggattcgatgccgtaattcttcatcatcagtgtcagatgactcagatcctctgtcactcctctcatcttcactgtctcctgatccataaccacccagtccaccgagtccagtgagggaagccagtgcactggactgtgccagctgttttgcaggagctttcgttgctttgcggtgtgcatctttggctacgtaataaatttcttcatctgtgacatccagcagaatttctgttagaagcatttttgtcagcaacatcatttgatactctttctcctcttcagtcatctcagggtcactgtgctcttcttgaggaactggggatggacttctggtgactttcccactacttgcagcctcaacattttcagtgtcttcttcttcctcatcactatcaaatttacttctctgaggtaaacgag

SEQ ID NO: 12755 - DNA, 1606 bp, Homo sapiens
ttttttttttttttttttgaaatttcaagacaactttatccagacaggcgcctctcaaatagaacacagggaagttaggcagcagttactaaaatacagtctcgccaaatgatttacaacagaacacaacaggagcaggggatctgtgggtggggctgggctgggcctcctatctcacagggcctgagtcaagccagcccgccctgcaaggcaggggctgacctgcaagcggagatctcacttcctcttaccccaaattcatacctccattttccccgcccccatctctccccagggtcctcaagtgggaaagggagaggtagcatccctcggatccaggcccactccactccgtctccggcaccagtgggcaggctgagtctgggcctcaaggggccctgggcttagggtatctatggcagtaggaaaatgacatggacaggctcttcaggggtaggctaaagtcctctggccagcagtacccagagaaaatgggcagcagcaggtaaaccagccaggaggtggagtcctctgaacccacagcagaccccaccctcctgcccagcccctgcccacattgggggtcaggaccactgagactctggtcaggacagtgggtgctctcagccagtgtggcaagctcagagcagagctcccaaggaccataccacactggttcaaaacccataggtgacaccatcccagcagaagcttccatgggtgctggatcccagggctgcatcctgagcacaggtgggcagactggaacataacactaggacccaagggatccagaacattttaggcccatctcctgggctgctccagcctgttgccatgacttgggcagtgagtgggccttctgccaggtggcaggggcacagcttagaccaaacccttggcctcccccctctgcagctacctctgaccaagaaggaactagcaagcctatgctggcaagaccataggtggggtgctgggaatcctcggggccggctggcacccactcctggtgctcaagggagagacccacttgttcagatgcataggcctcaggcggttcaaggcagtcttagagccacagagtcaaataaaaatcaattttgagagaccacagcacctgctgctttgatcgtgatgttcaaggcaagttgcaagtcaaggcaagtgtcccagaggccctgggcagctgagtgcaacctgtgtttgatcttcccctgatgatggacactcccagctgaccatccaaacaccaggaaaacatccccctttcctgggctcagttcctagtctacttgctggtacgaacccaacccacacactccccgcccacaatgcagctccttccaaatcctcccacaagccacctttgtgggacttggaagctgcttaggatgggccctgccctctgcgggaagccaatcctagcagaaaggtaagctaaacaacagtctcagaatctgagacccagtgactgttccccccgccccaggccttgggcctgaagtgggggcctgcctgtggcctctgtggtgggctcactcccacccccaacagtggccccaggagaggctttcccaagagtcttcaaactccacccacccca

SEQ ID NO: 12756 - DNA, 1006 bp, Homo sapiens
tttttttttcaaaatatcacccatttggtgtttagcttgaagtgtaagactatgtaagaactatagctactttgtaaaaaatgtactctcacctaaagcctaacatgattcattttttttttccaggaaacagaaaatgtctttggtctggtattaatatcaaaagaatttaactttaaaactgatcccaataagcatggccccttacacagttcatgaccaatatttagttatatgaaaatggttcattctcttctagaatctaatccagtgcagtcatctggtgaaagactggaagtcagaagacttttcaaaagcttctcactgaaatggtaatttggtaacacgggataaacagaattttgcataaatagcagaccttagtcactgaataccccattaaacagtactgctggaccatgatacttatatctgggagatgacttagttttaaattttttatgcagtttcttttcttgaaggaaaaacttccagacttcagaattttggaagctgaacgatgagcaggtttttcatattttgctgtctcagacatttttcctatttctcagactttgcagttcttttcttaggtgctttagagcacctaaaatatcagcttgctgtgggtcattcggtgctttctgagagtacagacggaaatgtctgatggtttccgataacagcacttcaggatctgcatctcttgcctgaagacgcagcatccgctcacaggcgatggcatagttcttgtgccaattcactgggtgctccttttgtaaatagacaatctccttataaaggtcatatgcttgagcgtagagttgagctttcacttttgaaggcatgtgagcagtttctgccaggttaaagatgaagaacggtgttttcatctttagttagatgagtgttccagaggcagacagatgtgaactttggactccatcactagcagcagtgtgcccttggacaagtagcctttccacatccagtttgttcttttata

SEQ ID NO: 12757 - DNA, 2230 bp, Homo sapiens
  misc_feature (1)...(2230): n = a,t,c or g
atggctactttcatctctggaaggctgaaaatacactatctaagctctctccaccaaactgccatattgcccgtgagaatgtgtgtctggcttatggtagtgaatggtcagtttatgcagtgggctcccaagctcatgtctccttcttggatccacggcagccatcatacaacgtcaagtctgtctgttccagggagcgaggcagtggaatccggtcagtgagtttctacgagcacatcatcactgtgggaacagggcagggctccctgctgttctatgacatccgagctcagagatttctgggaagagaggctctcagcttgttatggggtccaagcccagactagcaggggagaatcttgaaacttaaccactgggcaaaggctggctgaatcatgatgaaacctggaggaattacttttcagacattgacttcttccccaatgctgtttacacccactgctacgactcgtctggaacgaaactctttgtggcagggaggtcccctcccttcagggctccatggaaactatggntgggctctggagttaatgacaactccccaaatgcagagatttacactaacttccattctcagtttccttgtttcttttgattttttttttcctaattgtgtgaggctcttgtgttttagtgggaacaccaaagtttgcctatagtttaggcacttaataggaagaagctctgtacagaaatctgaaagttgttttgctttttgttttcccctttggtaatcaaaattttactatcttttattatttctggcttttcaaccaaacattgttgctaatccctatttttctttaagtgacacacattctcctgtctctggcttcttcaggctgaaatgacatagtctttctcacccttacttcactcttgagaggtagggctcctttataattacatggttgctctcagactttctgtgaaagtttgggagctgtgtgtgtctgtgtgtgtgtgagagagagatcttgtctgcgtgtgtgtgtgtgatcttgtgtgcctgtaggtactgtgtgtcactgaaattacctggagtgaggattacttgtaattaaaatatttataaaagaaacaactttattcacagagtccagctttgggactagtctgtatcttgttttttaagtctaacaacactgataataggaagtaaaaacagaaaggaaaagaaattaccactgggaaaatctttttagttagattgtaggcttcctggggcctcccatgccaggactgcaaagtgatccagccctacctgtcttcccacctgtgtgtcccccgtgtgggaagttggtgtcacttccccttcccaccctcacatctgcttagccagtagccacacccctaaaacatcagactcaccatccaggtgcagctccagaggctacaaaaggcttcatgggacttgaatccccatcctagcttctctctccttcccctcaagacctgatctggttttaaggggcctggagctgggagtctcaagtctgctaagattcacatccatagcccccatggctttggaggagaatcctctctgccattcttccaatctccccagtggggttttgctattattttctaaattgggttaagtctaagaaggtgggggtgagcagggggtttatctgtgtgtagtgagtgcttcatgtgtggaatattcattttcttactgcagtgggacttggggttgaagccacccctcctactctgttggcttagccctgagatggtgacaggctggcctgcagtcagcatcattgtgcatgtgacagcatcaatgtgattagtaatttgtctgttcctcccttgaactgtctgtttagtctgaggtttttaaacttgcaggcagctgactgtgatgtccacttgttccctgatttttacacatcatgtcaaagataacagctgttcccacccaccagttcctctaagcacatactctgcttttctgtcaacatcccattttggggaaaggaaaagtcatatttattcctgcaccccagttttttaacttgttctcccagttgtccccctcttctctgggtgtaagaagggaaattggaaaaaaaattatatatatattctccttttaatggtggggggctactggagaggagagacagcaagtccaccctaacttgttacacagcacataccacaggttctggaattctcatcttcgaacctaagagaaatt

SEQ ID NO: 12758 - DNA, 477 bp, Homo sapiens
acggatccggcagaggaggacgtgtactggctgtcggccttgctgcagctcaagcagctcctgcaggctaagcccttccagcctgcgcttcctctggtggttcttgtgcctagcccaggaggggacgccgttgagaaggaagtagaagatggtctgatgctacaggacttggtttcagctaagctgatttcagattacactgttaccgagatccctgataccattaatgatctacaaggttcaactaaggttttgcaagcagtgcagtggctggtttcccactgcccccattcccttgacctctgctgccagactctcattcagtacgtcgaagacgggattgaccatgagtttagtggccgctttttccatgacagaagagagaggcgtctgggcggtcttgcttctcaggagcctggcgccatcattgagctgtttaacagtgtgctgcagttcctggcttctgtggtgtcctct

SEQ ID NO: 12759 - DNA, 1797 bp, Homo sapiens
  misc_feature (1)...(1797): n = a,t,c or g
tttttttttttttttatgtaaagatctaattggcttttattagcgattcatgaactgggtagcatccagcctacaaaataaaacagaagccctgccaggtatgatagaatggtctgcatttgtaaagcagcactagcaggaacaaggaaacagcatagtagacacagcagattggttaacatcaggttacttcaggttacgttccttgtgtggattaaagcagagggggcttcctcatcataatcacgcttgctcacgttgactggactccctttgatcagttgctgtgaatctcctgacttgttgaaactgtcctatttttaagttcactttgattacatggactccattcctggatggagaggtgagatcttggagttccattcaacataaatgtattgtaaagtttttgttagagggcttgttaatgttggccttgggctagtcctttcccatctctgatcctctgcttcctaacttgtaaaatacagattaaatgctcctaacattatgaatctaagaaatgtcaggattagctaaattgcttaatggcacaacaatattagagtggaagctgagaagcaaaattgttacactgagcaagtatttttaactgattgaaatgaaagataagagctttttaaaagtttatcttcccctcaaccctcccagcctctcaaaccacnnnnnnnnnnnnnnnnnnnnnnnnnnnnnnnnnnnnnnnnnnnnnnggctttttaaattaatttattaggggnnnnnnnnnnnnnnnnnnnnnnnnnnnnnnnnnnnnnnnnnnnnnnnnnnnnnnnnnnnngtcctcctgcgtcggcctcccacagtggacggccttaccaacagaaatttattcctcactattctggagattagaagtcaaagatcaaggtgctggtgattttgtttcttctgaagcctctctctttgcttgcagataactgccttctcactgtgtcctctcctggtctttgttctgtgcacacattgctggtatctcttatgtccaaaggacaccatgttggattagactaacagcctcctttgaacttaagtcacctctttaaaggcctcatctccgaacagtcacattcaaaagaaatgggagttaggacctcaacaaatgaattgggggatacacagttcagcccataccaatgacctattctaaggtttctgtttcaaaacactgtagccaaatgcatactcctagggagaaaattattttgttttaggacaatttaaacatatttttaaatggaatacatgcagcaatttgttaaattacattagtaatattttcctatggctaagtccacctggaaagctagttatcaaaatgaaaaattattgtttcatttagtcctcgccagtactaattcattttttataatttttgtaaaatgtactatataagattttctttaaaataagtatataaaaatcaaaaacatcattaagattttcattagtatacaatccaaaactaaaaattttaaaacagactagcttcattttacatgacaagaagatttgaaagagctaattttactgcttgatctgactgtccgcccaaaatacttttcttggagaaagacagtgaatgagatgtaaggctcaaagggttaaacccttgaaatataaaaacacagactgtcttagaatcccacttaatgaagcttatgtttgattagcttgccattttaattacaatttcaagtcttttagagacaaattctatcttttccagaacaaacgtgcatatccttataatataacagg

SEQ ID NO: 12760 - DNA, 902 bp, Homo sapiens
ggttttttcagcatccattcaacaaatatttattatctttatacaaattattcattgtgttaaacttatttttagtttaacattctagaaatgaaacgtttttacttaaccttattctacaaagggaatacagcagttattctaattttaataaatgctaaaagctttatacaatttttctttgtgcactaaatgatttttggcccatacccagcaactgtgatgaatgtataatgaaataacatcttgaaaacaggccagatacattaagtatttattgagcttctgtcatatgcccagtattatgcttcttctatactgtttctctgtgacaagtcatactatattctttatagaattaaaagtagaggagaggcagagtttacatattgtccagttgctttacagttgtacaggaggttataagaagaaatatagtaaattagtgggaagtcagaggtgggggcgttagtgagctattttcttcttgaggttgtgacacaagctgacaaaagccagggagttcacagctgtgtggtggcacaaagttccatatgttctaaaaacaattaggcccagcagggtgtccctaatggcttccttgttaaacctccatggccagctgatctgaagctctgtgacatgttctctgagctctgaatgctctggctttttgtcattttgtcttgagacaagtattttcctgtagtcctcattccttcgagttattccatctcccaaggatattctctgggtgaggaaggaatgtctttcaagtgaatttgccttgaatttaggcatccataggagctgtgtcagtgttcttctttgatccacaccttctttaaaaaaaatacttgcttgcggatggactgggacagttcagttgggttaggtttcag

SEQ ID NO: 12761 - DNA, 821 bp, Homo sapiens
  misc_feature (1)...(821): n = a,t,c or g
gcacaagcacacacatgcaaggcatatacatggacaccgacacaggcacatgtacatgcacaggtgtgctacacatgtgcacacatgcacagttgcacagacacacacacacaggtgcacacacacgatgccgaacaaggcagaagggcgactctcacctctcatgtgcttctggccagtaggtctttgttctggtccaacgacaggagtaggcttgtatttaaaagcggcccctcctctcctgtggccacagaacacaggcgtgcttggactcttgacaagcagacctgctcctgaatgtgagctcctgataataaaactctgaggctttggtgagcgcatttcgaggcctttcccttgtatgcagggtgccagtgggagctgctatgtctcctgtgcagccagacaccctggacgaggcccttcccacctccccctttcctcacggcttcttcagcaccacatgtggattgcctgtgggtcagtccatctgtccatgggcaggggccgctgtgagagaccccatgcgcgtgggatgtggtagatgctgattatggggccagccacccatacaggtctatcaggtcgcaatggaggccccactggagcgggaggcaggctggcctgggacttctgttggatgatgggggccaggggatggtaggaggggcaggagagcaggtctgcatctgtctcagccccagggagctcctgggttttggggccagttttaaggagtttcattccctgagcctgggccgagttntaaagggggttccccggatattccaatgcttnagacntagatttttttaaagctt

SEQ ID NO: 12762 - DNA, 656 bp, Homo sapiens
attcggcacagggacaccagctgcggaatttgcggctttggcagctgtttgttcccaccgagctgtgctttaggaagctggccagccgggcctcctttaggtgcgctgcagcctttttcaaagcgagtgaatgtggcccggcccctacagttcgccaggcccgctgtaaaagggttagatttcagtctatagacgatcagtgggaaggcctttcctaggaggtaaccagaacagagagctgtaaactccgtgaatgcaagaggctgcttctgttacctgagtggttctcactcatctttgccttccttacctcgtgatctcaccattccagattgaaatcatggcaggtccagaaagtgatgcgcaataccagttcactggtattaaaaaatatttcaactcttatactctcacaggtagaatgaactgtgtactggccacatatggaagcattgcattgattgtcttatatttcaagttaaggtccaaaaaaactccagctgtgaaagcaacataaatggattttaaactgtctacggttcttaacctcatctgttaagttcccatgcctggagaagctaatgccaactcatcatgtgataattcaatttgtacaataaattatgaacctggaaaaaaaaaaaaaaaaaaagtcg

SEQ ID NO: 12763 - DNA, 817 bp, Homo sapiens
cccggaccaagaacaacctggcttcctgttacctgaaacagggcaaatatgctgaggctgagacactatacaaagagatcctgacccgtgcccatgtacaggagtttgggtctgtggatgatgaccacaagcccatctggatgcatgcagaggagcgggaggaaatgagcaaaagcccggcaccatgagggtgggacaccctatgctgagtatggaggctggtacaaggcctgcaaagtgagcagccccacagtgaacactactctgagaaacctgggagctctgtataggcgccagggaaagctggaggctgctgagaccctggaggaatgtgccctgcggtcccggagacagggcactgaccctatcagccagacgaaagcagctgacattcaacccggcccccaggtctgctgggtccccccacccccacagccctcacagcattccccattgctcctggctcttccccacccctaggtgggacagtgaaggggagcagtttaaccagaagattgctgctgcccttagggtctcagctccctcctcaggaatccctcttaggaaggaccctcaggacaccctctctgcaccctgtggtcctctagagtagctagctctgaggccccaaggtgggtacaaagcaggtatggccctcagagatgcagcctgctgctggcttttcagtcagagggttgggggctggccagccaagctgccttgccctggccgctcttactccctccctctgctgtctcacttcaggtccatgtatttcacttttcttaaataaaagaatcaggtaacctttcaaaaa

SEQ ID NO: 12764 - DNA, 1191 bp, Homo sapiens
ttttttttttttttttttgattgtataaataatttatttctgttcacagcatcatatatgcattataaaaggctatggaaacaaaagagaaggatgatgagacagagaattacagcagtagaaaggaaaacagaaaccagggcacacagttccaacaccagaacagagaatttgggaagataattgctctgaaacagaactggcctccctgtgtctattagaaaacatttccaaagctcacggagggaggccaacttcccctatgggaaacccattcactcgccaaagggcagaaggcatcataaatcacccattgatacattggtggggggctccctgtccccctggtgaccactccaaggtgatttgatctgtgcttcctctgttgggtcagagacgaaacgggctattattaggtcaaacattacagaaatcaactgagactcttaactagtagttgatacaccacagggctttactttactgcacaattactaacagttgattgcacccttaagtattgattatgcaaaaaacaaaatcatctcgcatcagttttaaagcatgacagggtttgaacagtgatcttgaacctaagtattgttatcatgagaaggttacagtatttggcatctgccaatgtcacaaaataaatatattattctctcaatagtgtggaactaccaaaatgtcaaagtgcttaagaaattgtcgcatgtgaagaaaataaagaaagatggattttttttttaataattctatacagaatcttcagatgatgggaccagcccatttagaaatcagtggatatgctgtcgatatgtaaactgaaatcttgcaggcttttcaacactgcttagctagactttctctactgagtttctacaaaaagaccagcattggaggggtaccaaatacaccgacaaaagagaaaaagcagatgggctgctaggtttctgcttttaaaaaatttcatataagaattgggtttcaagcaggaagccagaacttctgcctctggttcttaaattaacattcggtgtgtaatggacaataggcagggactcataatttgactaactcacatgctcaagcatgatcgtgtccaatttctacaggcctcctttgtaaagaaatgtgtaacaatggggggaaagtcataattctacctgaaaacatggattgtaagag

SEQ ID NO: 12765 - DNA, 1503 bp, Homo sapiens
tttttttttttaacgatccttttctaaatcaatacaatttctcaaatttatttttttcttaaagaagtacttctaatctctgtcaaaagggaggtgaggaaaggtccttcctcccttgtaaacactgaaatacagatctgggaaaccaggatcaacacacacaaaaagtgcattttacaaaatatcaactaaaatatattttacatggattatgcttccattgaaattctaccagctgcattttcaggttcgaaaaaatatttccacatctaagagatttcaaaagcatttaagttcggggcagccaagaccctacctcctgggaggagggccttcatctcctttcctgctaggtgaggctgggctccttggcagcaagggcccagaatgagcaggctccaaggctggctctgcagagcccccactgccactctgccaacctcatttactgccccatcctcccagacagacaccttcctccaaacagcttattcaatataaggagatccaagtcccttcccttcaggtttgggatcaggcttcccaagcataaattcacctctgaagcctccaggcctcacccaaacccaatgaccaatcaggagcaactcatctactaagggacagggcatggcaagttgggggagccctcagggttcatttccacctccctctgcagcccctgcccagctgtcctcacccagtgccacctcctaagcctgctgggttcatctgcccttcctccctaagggaagacccagggctgcagttctcagccccagcccctgcccccaggggtatgcccttgtggaagtgctcagctagcaggttcccagcaccaggcccaagccacactgcactccactccctctcccaccatactcctctttggtacagataggaaataaccaggctgctccagccccctcacagagtctcagggccagggccaaggcctagtctccacaaggacaacaggggactgagcctgttagtctactctggggagcagcatgaggtgagaacagggcctctgggcaacaggaacaaactgaaaatgcaagtccttagctcctagagcaagtggctgcagctcagcaggtccgtggactgatacagtgttgattcttgctaggatgtaaattagtgcaatctacaaaagactagggaaagggtggcagggcaaggggagccacagcactcctttggtttgatttcaggtgggtgtggcttgaagaatcacgtgtgaagttctgcaagaggtttcctggaacctccatgtgtaaggcaagaggaaaaatcttcaacaaatcaggtagcaattttccttgccccctgcccccaaccctctcccagcacccatcttccctcccagatatgacaaaccccacaatcatcagttaactttctgggaagccaagaccgctgggtggccgtctctgggaggtggacaggagactcccacaagtgggccacacccatgactgtgagaggtgggtcaac

SEQ ID NO: 12766 - DNA, 893 bp, Homo sapiens
gccctaaatggcggcttcaatatcagccccactgagcatgagattcatttacttaaataaaatctgaatctcagcccaaacctgggagattcaaaacctgagagcggtcttaccaaagacgcccgtatgtctggtgaagtcagttggatgcaagcagtttgtgctggtaccagggccccagctactgatgaagtggcaggagtccacagaagcctacttcgaagttcccggggcttccaggggagattgacgagattcctggggaggcgattcatgacagctgagttccttttggaggatccgtcttcaggcaggatatgattcatagtccagcgtttgagtgagcactccagtcagaacgaactctgcattgtgaacatctgaacagggtggaaacagacactttagttagagatccactgcctgtgcgtgcacacatactcacacaggtaagcggggaaacgtaccttatcctctggcaaaatattctcggcataaatgaaggtcattttcacaggatattaaaattatttccgacaaactctaaggaaaagaaaatgagtttctcagtgaccgaacgctgaatgtgatacagggcaatgacggactcgctggcggactccactctacccaccgagttctgcttgtgctccatgagcttccggaaagatggctgcttggataacacctttcctcctgcacactctacgattgccttcatagtggaaagacttgggcagattccaggtgtgatgtaaaaatattttgcctaaaattaaatgaaaatatatgtattatgttcttaaaatgctttaatttttagagtacataattctcatagattctgccctgagatttttgacaaaatttcaaattttatgacattatgaagg

SEQ ID NO: 12767 - DNA, 1684 bp, Homo sapiens
  misc_feature (1)...(1684): n = a,t,c or g
gtgttattcttttttattgagaaaatggatttctttttccaatgtttcaaatatacaagcagaattgtttgtttgccaataaatataataaatngangcagaagttcaaaaattaacagccacaatagtttatttacaattgaactctttataagatatttacaagacaaccaattttacacatcagaaatggtatcaaaagttatgaattacaacacagacaacaatatgaaatgggcataaaacaaagctgaagtagacagacaagcaattttttttaatttattaacactagcttaaactttgttaaagaaaaacaaacaactatgttttaggagaactgcagggccttcagttgaagattgaattcacagtgttgtatcccatgtagggaaaaataagactaattttccccccacactctaacacactgtaattttgcacttggaactttgctaatctactgtccaacctccttctcaacaaagtcaaatcaaaggagaattaacctagaagaggggacaataaaataagaggtcctcagggagagggagaaccaaggaaatagaatctacttaaatctggccagatagcacctcgtggattcttctcagtctacttcaagtcagaaactggggagtcccctgggtagggcacaaacacaatggttaaatttgctaactcatacccaaaattaggaacccgacacatgctgaaatcaagaagaaactgagggatcaaagaacaaagtcaagagacactgattgggtcttttttctttttggacacgttacgaagaaatatcacataggtaagagtaagaaaactgaacagcctgccacattaaaatgatggagaacaaagaaaatctggcccagtttttctagaaatctcctccttaaggtgtgagatgagagcccctagtggaattaagtcctatttctctctacatccttgctgcaatgaagtttacagcaggttcccttatagagagcccactctcctaagcagatggagttacaaatgaaaacccatagccacacacacacacgacacacacacaaaaggagaaataagagcagcaagatcatccaagaatactacatgtgctgccagaataattcctttaaaagtcaaatccaggaagcacagatcaacatctcacaaaaaactttagcagtgggaggcccctgaggaacttttcttctcttcccacaatggtatcccattctctcttcgtgctcccactgatgggcccagccacacaccctacataccttggcttctcctctaaaagtgctaataatctggggacatattctctttaaggataaaagcccctaccttctaggagattagacccctacttgttttcacacaatagtcctgaagactaaagaaaggcaattcctatatatttgaagaccagaggtcttggctctattttcctttcagatagttaatagggatcttacactgagaccaaagtggcctgggagtgctatcctgatattttaacaaaacgggaggggagaggaccaagatggtacacatacaaattatttttacaaagtgaatggagaagctcattaggtacatctgtttgtttcaagatgtagacatttgccagccaaaaggaagcacctatttccacactctccccctaccctccctaagtctctat

SEQ ID NO: 12768 - DNA, 465 bp, Homo sapiens
  misc_feature (1)...(465): n = a,t,c or g
gggttgntnnnnnatttgaaanccttttgaancctatgacnnnnnnnnnnnnnnnnnnnnnnnnnnnnnnnnnnnnnnnnnnnnnnnnnnnnnnnnnnggcacgagagttccccnnnnnnnnnnnnnnnnnnnnnnnnnnnnnnnnnnnnnnnnnnntttctggtaccccttggccatccccactatcccccatgccctgcatnnnnnnnnnnnnnnnnnnnnnnnnnnnnnnnnggtaaaacatccttcagttttaagtgnnnnnnnnnnnnnnnnnnnnnnnnnnnnnnnnnnnnnnnnnnnnnnnnnnnnnnnnnnnnnnnnnnnnnnnnnnnnnnnnnnnnnnnnnnnnnnnnnnnnnnnnnnnnnnnnnnnnnnnngaatagtactccactgtgtatgtgtgccatgggtnnctttatccattcatctgntgacagacaccctttcccatttggctccac

SEQ ID NO: 12769 - DNA, 1192 bp, Homo sapiens
  misc_feature (1)...(1192): n = a,t,c or g
ggtcctgaattcaccttgagaaagacccaaaggccagtcagggggtggggggaactcagctaaatagacctagttactgccctgctaggccatgctgtactgtgagcccctcctcactctctaccaaccctaaaccctgaggacaggggaggaacccacagcttccttctcctgccagctgcagatggtttgccttgcctttccaccccctaattgtcaaccacaaaaatgagaaattcctcttctagctcagccttgagtccattgccaaattttcagcacacctgccagcaacttgggggaataagcgaaggtttccctacaagagggaaagaaggcaaaaacggcacagctatctccaaacacatctgagttcatttcaaaagtgaccaagggaatctccgcacaaaagtgcagattgaggaattgtgatgggtcattcccaagaatcccccaaggggcatcccaaatccctgaggagtaacagctgcaaacctggtcagttctcagtgagagccagctcacttatagctttgctgctagaacctgttgtggctgcatttcctggtggccagtgacaactgtgtaaccagaatagctgcatggcgctgaccctttggccggaacttggtctcttggctccctccttggccacccaccacctctcgcacagcccctctgtttttacaccaataacaagaattaagggggaagccctggcagctatacgttttcaaccagactcctttgccgggacccagcccgccaccctgctcgcctccgtcaaacccccggccaatgcagtgagcaccatgtagctcccttgatttaaaaaaaataaaaaataaaaaaaaaaggaaaaaaaaatacaacacacacacaaaaataaaaaaaatattctaatgaatgtatctttctaaaggactgacgttcaatcaaatatctgaaaatactaaaggtcaaaaccttgtcagatgttaacttctaagttcggtttgggattttttttttttaatagaaatcaagttgtttttgtttttaaggaaaagcgggtcattgcaaagggctgggtgtaattttatgtttcatttccttcattttaaagcaatacaaggttatggagcagatggttttgtgcccgnatcatgaataccagnccaaggcacacactctggaaacttgcaactttttg

SEQ ID NO: 12770 - DNA, 355 bp, Homo sapiens
gacgaattggtgttcctgaggaggtctcctctgtggtctgcttcctactgtctcctgcagcttccttcatcactggacagtcggtggatgtggatgggggccggagtctctatactcactcgtatgaggtaccagatcatgacaactggcccaagggagcaggggacctttctgttgtcaaaaagatgaaggagacctttaaggagaaagctaagctctgagctgaggaaacaaggtgtcctccatcccccagtgccttcacatcttgaggatatgcttctgtactttttaaaagcttatagttggtatggaaaacattttttttttttttaagtgttattaattatatctatgg

SEQ ID NO: 12771 - DNA, 1145 bp, Homo sapiens
cgtgccggagttcgggagcggcaacagagtgggcatagacactccgagcagcctcgccgtcgtctctgcgttcctgttgactgcctggctgccccctcccctactcctcggttcctggtgaagaggctgcgcgctgctgtttggggagggggtgtgtggagccgggtcctgtgtccgcagtggctgctgtcggggggtcgcctgttcgcggaggtgcggagagactccttgggggtcgagcacataacggggttcgggtgtctcgtgtgtgaacatcacaggtctattctggataagcaggttttgtgaagacatttattctttcttggacctcagatttaccagacatcacagggtttgtggatgcacttagatgtttgcaatgagcactgtggctggcatgccccagtgttttggataccaatgcataggactccatagtaatcgaatttaccagaggcgaacgtcatgagcatagtgatcccattgggggttgatacagcagagacgtcatacttggaaatggctgcaggttcagaaccagaatccgtagaagctagccctgtggtagttgagaaatccaacagttatccccaccagttatataccagcagctcacatcattcacacagttacattggtttgccctatgcggaccataattatggtgctcgtcctcctccgacacctccggcttcccctcctccatcagtccttattagcaaaaatgaagtaggcatatttaccactcctaattttgatgaaacttccagtgctactacaatcagcacatctgaggatggaagttatggtactgatgtaaccaggtgcatatgtggttttacacatgatgatggatacatgatctgttgtgacaaatgcagcgtttggcaacatattgactgcatggggattgataggcagcatattcctgatacatatctatgtgaacgttgtcagcctaggaatttggataaagagagggcagtgctactacaacgccggaaaagggaaaatatgtcagatggtgataccagtgcaactgagagtggtgatgaggttcctgtggaattatatactgcatttcagcatactccaacatcaattactttaactgcttcaagagtttccaaagttaatgataa

SEQ ID NO: 12772 - DNA, 2966 bp, Homo sapiens
aaatggtttaattttaatccatgcccctaaaaccaactttggggttggcattcagagactgtttatgtccaacaggagaatggcatgaccgaacagggttgtcagcttctgaatgtcagggacaggtggtttttttctttctcaggagaaacacctatgttagagaaaggggagaggaaacagaagacaggaagatagatggtcatggcaagcgcacagcaccagacttactggctcaccaagatgatggaaaaaggcagatgattttttaaaaagccgtaatgactcctttagaccagccatttagcgtggtaattttgaaaggcctagctccattgcagacttccaaagggtcagctctgagactgccctccaggtgggcagttgattatttccaccagtgttttccagagccttaaactgtcctaaagtgacaactacctcagttggcaggaaagagacatatagtagaaagtgaaaaatgagcagtatttgtgcagatgctatgggttacagttgaagggtaaaaggaactttacattgggaaacctttatacccttgtgaattatgtacatggtaaaatgttctctctctacaaagaactattaaaacttctgaaatatactatttactaccttatttatagaaattgagacctagcatatttaagcataagtttattttaaaaaataattcaactcgtgcaagtggtctcaggattctctggagattttggtgcctcccctacttagggaggtgatagcttgcctataagggtgacttttcctgatcatgtctttatttcaatgagaaagcactgtgaaattgtgaaagattctcctctttctctgtttaataaacccccatgaaatatagtttccatctctagaccagttttttttccaccgtgtttagacttgaggtgaataaaatcaaactgttttttactccctatctggtagttggagacctgagctgtaggcagtggagatggcaattggttctgcagcctgagagttgctctcacacagtgaaggacggtgctgctctggtgtgctgtgtgtccttgccctgcctgcctgtggctctgcccagatgcttcagatcctctgtgttccggagattgcttgacttcaaccttctttaggagctgctcttgtctccctcttggccacttagtttgctggctcagtcactacttgaagaccccatttaatttttctctggcagttatagctcttgtgatttcagtacagtctcatctctcagaccaatctcatcaagaaggattgaagggataactatgaggtaagctggacattggagccgtgtttgctgccacgtcagcgtcttgctgggtgaatgtcaagccataaatgggctccagggctctggatctcatcagcattggaaatctattgcctctcatcagtctgaccaaattatgtagagcattaatgtagagactcccattaatgggaatacaagaggcagctggcataaaacatttctttcactttcctttcccactcagattgcttcaagagaccaacagaacacagggatcaaaaacaaggaaaatttagcaacttcattaccttctaataagtaattcctgttagccactgcatcccaccaaaactagtttatttttcccctcaaattcatgatttttacgtctgttacaaagggaattttgctgatagctctttgggtcccactgttccattttatgctaatagattccattctagggcccagccgtctcttgactgatggtgttccctttaacccttggcatgtataatagaattttggtgaatgaaagaacccaaataggccagatagtccccccaggccctgatatccataaaaggcttgggaatgcattatgtaattgtccttagtctttttgttgttttagaaaaaaaaaacaagatgggctcagatggatgcctacgtaaaaatggttcctagctgtgtactcataacttttctttgaattgagtagtgaaaggaaggaggaggaaaggaaattaaatgtccttctagtattctctggactcaagtctgacatatgagataataacctatattgaaatgccaagaattgtatctgaaacaagagaacagtttgacacatttatcatgccttcatattacatattaactgaaaccaattaataaacatatgaaatatccattgcacaaggcaaaggcacctaaaccttttgtttctttttctacatagcagaaattgattttttttttatttttttaggggaacctatataattatgacccagtgatgtcttttggtgacttaagcttatgaattcaggttacaattgagttgattctagatggttactaccttgaaaaggatgttggtgccttatgtgacacgagccagagcctgctgggaataaacaaagcagattcatgccaacaccaactcgtagctttagtggcagatgggagtggtcacagactcccaaaatgtggggctttggatttccacaccatcccacgtgtgtgtcatcttcctctttcacactcttgatgataatttgaaaatgatgaaatcacctctgaatttgcctatagcatgagcacattcttatgacaacataacaaatagttcataatgtgaatattagaaactgttacagcctgcagttaccataattttccatgtttgtggaattgatattgaaatagcagggctaaggaattactggcaagttttagcctgtgggtaataccttagggttatttaaatatttgtaattttatttaaatgttcatgaatgtttgaaaggaacaaaattatcagggatggctctttgccatgggtcttattttcaccctcttttctgtaagaaaaaagaacaatgtcttaatgtatttttaaagtttttggtatagtttctaattccaattttaataaaagttttatagatat

SEQ ID NO: 12773 - DNA, 1337 bp, Homo sapiens
tttttttttgtggcgagcagtcagtactttaattcaggtcaggctccgacacctggggagacggggtcctgcccgccccaccctgaggtggaacccccagctgctcctgggcacagaatcatttacaaaaataaatatgaaaaaagcagcaactctttagtgatcatggaattaatctgacagcaattaaatgtgtttaagcatctggcatatctcctcaattgcaccaaaagaatttggaagcacttggtttggtctcaaaggcaaaaggaaaggacgaggaaggggccaggcctcccgccaggcccccgcccccctcacatttctgagtccgcatacatcccgttgattaagtagtccacctgggtgtagtccttcttcttgtagctctcataggcctgcagggcaaacaaaaccaagactgtgatgaaaagggtcaccccgagtaacagcaccaccagaaggagagttttgtctaccacggcctgggtgaggggctcagtggtgaccaccatgtactggccttgggtgctgggctggcacgagtccgtggctggcatcttagtgccccctgagctcctgggtgttggcccagtggaatcagtacctggtgtggcttcagtctctacctgctccggtgcctgggatgtgcctggcccagcggccctctgggtatatggcatggggcttggctgtgtcgtgggggacatggcctccatctcagggattgggctggtgtgaggtactggcactgggctggcagttggctccctggcttgtgccttggtggtggtcaccactgtgggggtgggggcgggctctggggttgtgtttgagggcatgggtgtggatttatttgttgtgttaaccacaggctggtccactgacacctggctaatgggaccttgtgcttggggacgcatagggggtacagggcttgccgcggtgtcactgggcatgtgcttggaaggacttggacgagtgctcatggggctgcttgtgtttgctgtggtcgctacagtctgagcacgtgtggccaatgtggccagggttgctgttcttggcaacgcgctgctctttggcacttgtgcgagggctgtgctgagagatggatgcccagtggcggtagtggacggggtccgccctgtggaagtggacgtgggcgcggggagtgcaagtgtcatgggagtgctggaggccgcagtcatactggaggctgcagtcgtgggagcaatggaggccacagttgtactggaggctgcagtcgtgggagcactggaggccacagtcatactggaggccgcagtcgtaatggaggccgcagtcgtactggaggc

SEQ ID NO: 12774 - DNA, 1183 bp, Homo sapiens
tgatgcagagttcgcctgcagacggatctggatatacactatgtataattgttacgtgtaatttaaaatatatctgtttgccatcgtcatgagaagattatatgtaaggctctgaagggagagggagatgtacattctgccaggctcctggggaccttatccgagtcatgaaattgatgactgttgatccagtggtgcaagaagctacactccatgtgtcatcacgcttatgactcctaatgtatttttaaggcaaaaaatgtcagccgactccatcttcacccctcgattcctcgagtccagcctttcctgtggccagtgcttcactggagccacaacgctctcgccatcgggacccggctgggcctggagtctcggggcacagttgccatgggagccctcctgggtcattctacaaatgtgctgagtgccagctgaaaaccccacaggagatggagtaccttgggccaagcttaaagagaagattttctcagggtatttattagtgtgtccagcagggtcagggaagcaggatgggaaagatggcattcagactgttaatttattaacaaggcaaatgattttgtgtttcttgatgacagactattaagtttgggacttattttcccatttgagaagttataatatatatttaagatgataagtttcctgcttaagttgtgcctttcagcttcaatgagtttaaggagcactaagggtaatgataccaatgagggttggtttattatcaaacctgaatagctgtggtttctccagtaaatattttcttctactgaacatggagccattattaagagttgtgtgttttttattatgtacaatttgtatatttttttgcttgtttgatgttctatttttctaatagttttcttttagtttcttaaagttgtgatactagatttagattctgatgctaactgcaaatcaggttggtctctgctgggtctctcctgcttttattttactttaaggacaagtgtagttgtcgtccaccacctttcaaaaaatgtgaaactgccctgcctcccctttttgctgacaacactgtgtacattgaccacttcctaccatactttatgttgtaaaatcaaactcttttgtggtacattatctcatgcttctgcaaattcgaataaattctatggcttccaaaaaaaaaaaa

SEQ ID NO: 12775 - DNA, 862 bp, Homo sapiens
  misc_feature (1)...(862): n = a,t,c or g
ggaagggcagaaagggagagtgctgggcgggcttagtcggagattgaggactgggaatccgcttccgggagggcactgtctagtgcacaggcaacctggccttcgcctcctagcccgagaagccgaatctccctaatccctgtgacctgtgtcaacctctgcatcgcgaggagggggataagtggggagaagtctggtgtcagatgggatggcgccggaagagggtgccacagcggggacggaaggcgcccccaccccaactccacgggaatataaacaatttgtattttccgatcaggtggcgggacaggcttcattgggacagccctaacccagctgctgaatgccagaggccacgaagtacagttggtctcccgaaagcccgggcccggccggactcacgtgggatgagctcgctgcatcggggctgccgagctgcgatgccgccgtcaacctgggccggagagaacatcctcaaccctctccgaagatggaatgaaaccttccaaaaagaggttctcgggcagccgcctagagaccacccaattactggctaaagccattcaccaaagccccacaaccccccaaggcctgggtcttagtcacaggtgtagcttactaccagcccagtctgactgcggagtatgatgaagacagcccaggaggggactttgactttttctccaacctcgtaaccaaatgggaagctgcagccaggcttcctggagattctacacgccaggtggtggtgcgctcaggggttgtgctgggccgtgggggtggtgccatgggccacatgctgctgccctttcgcctgggcctggggggccccatcggttcaggccaccanttcttcccctgg

SEQ ID NO: 12776 - DNA, 1454 bp, Homo sapiens
gcgacccgcaggagcgtagagagcgcgggactagagtgcagagctccgggacgtggatcggagccggcgcgatgggcggagagcaggaggaggagcggttcgacggcatgttgctggccatggctcagcagcacgagggcggcgtgcaggagcttgtgaacaccttcttcagcttccttcgacgcaaaacagactttttcattggaggagaagaagggatggcagagaagcttatcacacagactttcagccaccacaatcagcctggcacagaagacccggcgggagaagagagcccccgcaggaggccgagcggcgggagaaggcggagcgggcggccagactggcccaaggaagccaagtcagagacctcagggccccagatcaaggagctaactgatgaagaggcagagaggctgcagctagagattgaccagaaaaaggatgcagagaatcatgaggcccagctcaagaacggcagccttgactccccagggaagcaggatactgaggaagatgaggaggaagatgagaaggacaaaggaaaactgaagcccaacctaggcaacggggcagacctgcccaattaccgctggacccagaccctgtcggagctggacctggcggtccctttctgtgtgaacttccggctgaaagggaaggacatggtggtggacatccagcggcggcacctccgggtggggctcaaggggcagccagcgatcattgatggggagctctacaatgaagtgaaggtggaggagagctcgtggctcattgaggacggcaaggtggtgactgtgcatctggagaagatcaataagatggagtggtggagccgcttggtgtccagtgaccctgagatcaacaccaagaagattaaccctgagaattccaagctgtcagacctggacagtgagactcgcagcatggtggaaaagatgatgtatgaccagcgacagaagtccatggggctgccaacttcagacgaacagaagaaacaggagattctgaagaagttcatggatcaacatccggagatggatttttccaaggctaaattcaactagcccctgttttttcctccctgaactcttggggctgagctgcaaccacccaactttctttcccactcttctctgggacttgtgggcctcagggcttggggcaggcatgggactggcccaggcacacaggtcccggggcatcaggagaaaggctgggtcttgggaccttgtcctccccagttggcctactgttacacattaaaacgatttgccccagctccttctgtgtcctctcttcgctctggcctttctctggggcacaggcctcttacggctgctgctgggaactgggagtttggcttctagcccagattctgccatgtgacctagggcacatccttgcccctctctgggcctcagtttctcattacttaaagattaaaacaa

SEQ ID NO: 12777 - DNA, 788 bp, Homo sapiens
ggcgttcggtcactgaggtgtagcagaggatgcgctggcggctgtgagtgcggcgacaagggcaaatgcagcgactcctcgctgttgggcaagagactctccgaagactcgagccgccaccagctgttgcagaagtgggcgagcatgtggagctccatgagcgaagacgcgtcggtggccgacatggagagggcgcagctggaggaggaggcggcggctgcggaggagaggccgctggtgttcctgtgctccggctgccggcggccgctgggcgactcgctgagctgggtggccagccaggaggacaccaactgcatccctgtcgctgtgtttcctgtaatgtttctgtggataaggaacagaagctatccaaacgtgaaaaggaaaatggttgcgtccttgagactttgtgctgcgcggggtgctcactcaatcttggctacgtgtacagatgcacgcccaagaatcttgattacaagagagacttgttttgcctcagtgttgaagccattgaaagttatgttttagggtcctctgaaaagcaaattgtgtcagaagataaagagctttttaatcttgaaagcagagttgaaatagaaaagtctctaacacagatggaagatgtcttgaaagcattacaaatgaagctgtgggaggccgaatccaaattgtcctttgccacttgtaaaagctgaactctagtctgtgtcctccattctgcccccgcccttcctccccttatttgttaaatgaagcaacatagtgagacgtcgtctctacaaaaaaaa

SEQ ID NO: 12778 - DNA, 2265 bp, Homo sapiens
tttctcattataaaatgaaaacttgttaactttaatattaaagcaaagacaaaatacaattttatcattattttaatcaagtaacttagctgtttaaacaaatccttaagacagttcaatagagcaaagtgaagaattactctattaggataacctcgtgaacaaagttcagattatgtgaatttgtattccattcgaagtttggcaccagactgaacactggtttaagccaaattttttagtgttctagaagccctgaacatgttttccctcagattaaaagtagaacctttataatagaacctcattagcttgacactgagtatgctgagtgcaacttagcttaggtcacccagtatctcctacagaattccagttaatggaaagcagatccacgttgcggcaaagaatttgaaacctaggcaacatacaagtttgaagaaaaaaaaatcctctttggtgtgacaaagcacattccctccaggtatatggctcctgctccacttgcacccgaatcttgatcaaaggcagctggagaccaattcttgtctctccaataagattgctaggtttcaattccttaaaatatcaagccaaccaagttttattacatcaaatgtttctatcatttcaatgtgaaaatttttttacgcctatttgttattaaggtctcattatctgtgaaataatcacaaaaaaacagaggtgaatggtataagccactgctccaaaattaaccctatcgattctcgattcccactgtgcactttgtgaaaagggtaactgccaagaggtttaaccttgaagatgattactcaaacagtcagaacccataatatgagtttagatcaggcaaggagttcatgaggaagttatcaactcttgtgtgtccaaatctaaagccctgcatgggctctgtcaggtccttgtcacctgcactcaggtggccatcagacttcttgggtgccctggctatattcaatgtgaagtaaaaaatatcccaagtcttacacccaaaatagaggctctgacttagaagtatgcttttagctttctttttaaataagacattctggaagaaaaaaaaaagaaaaaggaaagaaaatcaagtttgaaacacagttaacacttattttggcaagaaagcaaccaaaatctaaaaagcataaactatgtgtccaaatgtaaaaggcattacagaacaaactgcaagaggggaaaattaaagccacactgaacgaaaaaatacagtatgtctaacattttggaattgtaatttaaaccctaagggcaaaagctgaaaaatcatgcttaggttgctagttaagtgcacccttccttgtttctcccaaataaaatcagtttattgtttaattgcaccccaaagcaagttctctcagtacaaagtaactactacgtacacacaaaatgcttgttaatgtaataatttccctggctcatccaacgtgcaatgcacacgacttcaaagacaatttggggcaagtgtacatgaaatgagaaaacagctctccaagtttcaaatcctgctcttacattatttataggacactgaggtcatatttacttcttggttaagatgttgcactgtcatttcattatcagtctacctcacaatgtacattaccagatgccaatttgaggaactacagagataaaactttagtactttcttaatgggctgaataaattaattacaattaagtttgctttacatcctgttgaggacctctttgcagccccaggacctaacaatatctggcaggctccaagaatgctcatcaggtgaaatgatggcagaacatttaaagtaaggagccagttacttcagcttaagtcattcagagccaaacatctgaagaacgaccaaaatcaaacctttatttttataactgtataaatgtgaaccaaatgtgtccaccactagtttttcaaaaagaaacatgctataaataagcaaactacatctgctcactgatgtgtatggactccctagatgtctcattgggcttaataacagaccactcacagtaatagatttttagtgtaaagtgtagcatgatgttaagccattttagcttttgcacatacatgttgcacttctggctgataatggaggaaaatttgcagcattatactgttaagctaggttgcatccatccctttaaatggcatcaatatcgatgtcgtcatccttgttgtctgactttacagtctcaactttcggtacactggcagccttcgaat

SEQ ID NO: 12779 - DNA, 1149 bp, Homo sapiens
tttttttttagaaggcaatctcatcttttaatacattcctcacccccaacctacactgtccccctcagtggcccttattgcagcacatcctggctcagggcctttgcatgtgctgttgcctccagctgcaagcccttactcagccacccctgttgctcctgctcaccccttgacggagcacgacctgggcagtgtggccctcaattcaaatcacacatcccaccccctgctggatttcccacacagcagttaacttgcaggcatactacatatatattttccttatcttgtaaactctgtctccctgccctagaactcaactgctggaagacagggttttctgtttcttttgttcagtgtggactccccagcgcctagaggaggtgctcaattactttttgctgagaatgaaagtgatgaaggggttttagggggtgctttagcgggatgaaaggacagggtccaggagctgagtggggcagcagaacagcacatgaggggactgcaggtgcgggtggggacgactgccgaggaatcctggcgctgctttcttccaaatgtcctgggggaggtgaggtgttggggtgaacagtgtcaagttctcggcttccgtttgaaccctctcttcagctgcacagcttctgcagggccccctgggcctgaacccagcgcagccgccactggggcagggacaggccctggcagagctcctcagagagggcggcctggcctggctgctcccaccagtcccccacgatcccctgcagctcagggattcgctccagtgcctgtttcagtagcttctccagcctcttcagagcctgccccaggttctctttctgctgtttttcctgggatgcctggatctgcagcagctctgagggtgagaaagccaggaggcagcttttgagtcctctggctcgctggtaccttacagcaatgagtccccaattctccagtcccctagtcttgacctcagcagctcccgcaaaccaatgatgagtctgtctccttctcttcccagcctggaagtccccttctgagggactgcccccagccccatccaggcctccttctggatgccttcctccctccccgtgagagcccatcaatctccatggcctgtccgctcagtctcctgagcgtttc

SEQ ID NO: 12780 - DNA, 1882 bp, Homo sapiens
  misc_feature (1)...(1882): n = a,t,c or g
ttttttttttgttgtgtagtctcatttattatgaagattcttccagtatgtacatacgaaccaaaagtatcagtttatcagtcccactcacatcccacccccacaggcataccaacagggtcaatcttccttcatggtacctagaaaaactgtctttttccttaggtaaatggctaaaaatgtattcatgactgctgcagtaagagcatccacctatgtatctttacatactttgagacagtgtgataaagctctttcaggcacaggcagtctattcattcaaagtcatctaaccaaataccttcccccacagctaagaaagaatcccagtgtttccctagtttagagatgaagatactgaaattggcaaaagcaaaaaggctaggactaagatccaggtcagtagttcagctataccagcagtacacattagaattacgaagagttttaaaatatacctgtaggggcctattctgactcagaacagcctggggctgtgtgtcttaaagagtacttgagatgactcagttgtgtgactaaggctgcaaaggagtagagtgttcagataacacagacaaaaggttacatcattcttaggtttttaggttttatataaacaccccccatttttagttttatataaccagataaatatggttcacttttatttaaattcaaatgggtgctatactgtcacgtgcctaatccccactttacaacttcatgctggatgctggtagcaaactaagatatttttctcttttatgtattaaattccacttgtgcttcatgaaacagactataagaacaacaattcaccataatccccctttgccatgaggaaggtaattctggtcagtttgccaggtattgataaagtaaagtaagagaagacagggcagcaaatcagcagaccaaaaacttatggtagaaatgccaggctgaatcaccacacccacagcgcacaggaacaccagcccatatgaatctacagttctacttagaccagcagggacagcaccaagtcacgtgttacaactgaaagcatcacttgacgacatcctgaaaggtcataatcagttgggaatgaaagtcatttttcctttaaaatacaaaaatggcagtgtgtaacaacccctccttcactaaggctaaattgaggaaacctgaatatcaaaaacgacagatttaagccattgatcgggtgccacagagacaggaatgatagctattcttccacattactagacattattctccctacacaaaaatggatttagagcttgacagaatttgtcaaaggtctacttttctttgacagctcagccaactcttccctgatgtgttgtacagaaatttcatcttttttcagctttgcttgcttcagtgcttcctggtagatctcttttgcttgtgtatatcgttctctgtgcatcaaaactgcagctagattactgagtaccatgtgtagctcaggatgatttatctgtcttgccagatctgatgccctttgcatataaatataggcctcatcaaagcggccctgtgcatccagggtagtagccaggtcactcatcagcacaatggtctgtgggtgtctttctccttgtatttcttcagaaatctgcagagctttttcatacatcctttgtgcctgtgacggctgcttggagaacagaaggtagcgagcacaggcgtctaagcacatgcccaagaggaggtgggtattggctttctcttccactgacataatgtcttctgctaattccttttctctttcaattttttcctctagagttgaaatgcagaattcatagccagcaacagcaaattcgctgtctgttcgcgcagcatagatnctngccagctcntcgtgccgaat

SEQ ID NO: 12781 - DNA, 1614 bp, Homo sapiens
  misc_feature (1)...(1614): n = a,t,c or g
aagcttggcacgagggtgcagctgggctcagctccccgtgccctacctttctgttctcttccttggtttcccctactctcctcctgccccaagcagtgcctgcgtgccgagttccgtctctcgggtcttttcctggtcccaggcaaagcggagcggagatcctcaaacggcctagtgcttcgcgcttccggaggaaaatcagcggtctaattaattcctctggtttgttgaagcagttaccaagaatcttcaaccctttcccacaaaagctaattgagtacacgttcctgttgagtacacgttcctgttgatttacaaaaggtgcaggtatgagcaggtctgaagactaacattttgtgaagttgtaaaacagaaaacctgttagaaatgtggtggtttcaggcaagggcctcagtttccttccttcagcccttgtaatttgggacatctgctgctttcatattttcatacattactgcagttaacactccaccatataggacccggctttaccttatatccagtgacactggtacagtagctccagaaaaatgcttatttggggcaatgcctaaatattgcggcagttttatggcattggctaccatttatgttcgttataagcaagttcatgctctgagtcctgaagagaacgttatcatcaaattaaacaaggctggccttggtacttggaatactgagttgtttaggactttctattgtggcaaacttccagaaaacaaccctttttgctgcacatgtaagtggagctgtgcttacctttggtatgggctcattatatatgtttgttcagaccatcctttcctaccaaatgcagcccaaaatccatggcaaacaagtcttctggatcagactgttgttggttatctggtgtggagtacctgcacttagcatgctgacttgctcatcagttttgcacagtggcaattttgggactgatttagaacagaaactccattggaaccccgaggacaaaggttatgtgcttcacatgatcactactgcagcagaatggtctatgtcattttccttctttggttttttcctgacttacattcgtgattttcagaaaatttctttacgggtggaagccaatttacatggattaaccctctatgacactgcaccttgccctattaacaatgaacgaacacggctactttccagagatatttgatgaaaggataaaatatttctgtaatgattatgattctcagggattggggaaaggttcacagaagttgcttattcttctctgaaattttcaaccacttaatcaaggctgacagtaacactgatgaatgctgataatcaggaaacatgaaagaagccatttgatagattattctaaaggatatcatcaagaagactattaaaaacacctatgcctatacttttttatctcagaaaataaagtcaaaagactatgatatcatagttttttataccttatttaagagaaacaacctgacgtgcaccaatcagtctgcacatcccaacccttcacattttataaattattgtagatcatgttttgttaggagcccttttatggagaggacattttcccatgncttaagtaatccagccttt

SEQ ID NO: 12782 - DNA, 1107 bp, Homo sapiens
ggcgcaaggagcaagcgcagattgtgggcggctgtgtcagctgacccaaggggccttcgaggtgccttaggccgcttgccttgctctcagaatcgctgccgccatggctagtcagtctcaggggattcagcagctgctgcaggccgagaagcgggcagccgagaaggtgtccgaggcccgcaaaagaaagaaccggaggctgaagcaggccaaagaagaagctcaggctgaaattgaacagtaccgcctgcagagggagaaagaattcaaggccaaggaagctgcggcattgggatcccgtggcagttgcagcactgaagtggagaaggagacccaggagaagatgaccatcctccagacatacttccggcagaacagggatgaagtcttggacaacctcttggcttttgtctgtgacattcggccagaaatcccatgaaaactacccgcataaatggatagaagagagaagcacctgtgctgtggagtggcattttagatgccctcacgaatatgaagcttagcacagctctagttacattcttatgatatggcattaaattatttccatatattatataataggtccttccactttttggagagtagcaaatctagcttttttgtacagacttagaaattatctaaagatttcatctttttacctcatatttcttaggaatttaatggttatatgttgtctttttttcctatgtcttttggctcaagcaacatgtatatcagtgttgactttttctttcttagatctagtttaaaaaaaaaaaaaaccacataacaattctttgaagaaaggaagggattaaataatttttttccctaacactttcttgaaggtcaggggctttatctatgaaaaagtagtaaatagttctttgtaacctgtgtgaagcagcagccagccttaaagtagtccattcttgctaatggttagaacagtgaatactagtggaattgtttgggctgcttttagtttctcttaatcaaaattactagatgatagaattcaagaacttgttacatgtattacttggtgtatcgataatcatttaaaagtaaagactctgtcatgcatttttccccaaaaaa

SEQ ID NO: 12783 - DNA, 1325 bp, Homo sapiens
ttttttttgttttttagatatttaaaatctttattgtttcatcatcaaaagttttctttccatagaagaatggtaatgttgtatcagtgcatattctatggaaaattcatatctcaagtaactagcctagaaatcagagacagcactatgtcaagctagtatacaaggtcaaagacacaatgctgccaatgcaattagtatatagaaataatacgcagctgttagaaaaagtctgtggccaagtgggataaaacagtagcagtgcactgcactgacatccagaacagaaaatagggaaggaccagagaatgcacttcctgcaaaaaaaaagtccagtagatcacaagcacaaagagttcccaactgtctcaccagctctctaactcatgtgtacctgcaccttcctcttgaaatctgaacattataataccacaagccactttcagcctccagtgggaaggctccagccacacgccgatatttcggtcctgcttcccgtcatctcatatctaaaagtcatgggcttaagttaggcaataaaacctgtggctttaggcatctttagtaaaaaagctgaacaaatcccaaatttattcccattttcttgagaaataaacttcataaaacaacagacagctgtcatgattactgagttttggctgatggcgaaataatttttatgtaagtatactgaataaacatacaaacaaatatccttaacaaaatactgtcagaccaacttgaatgtttttataacccactcctgaaaaaagtcctgataattattagatgtaaacgaccactataaattgatcatgcctggttactgggaattttttggtcaggtatgtttctgaagctgctatatagctggacttggctactttgcattaactcacacaacaaatgccttttataaggaaacagcagatctatcatgatgaactcaaaatcaaaacagttcagaggtatacaggaaacttgtcttaaaaatacttttaaattacatatgatataaccttagagaataagaactactattaccatggtctaaatcttaaactgttaatgcatgaattatctgtaagactaacaagttacttgttaatcatggcaaggccttgcaggggagggggcactctgaatgtacggcatagcaattattttccaggtaagtaaacacttctaagtgttattaaactatatttgaaaagttattttatgtaatatatacaacataccaaataagtcaaaaggaggaagcagaggaaggttttctggcatatatgatgcaaacatacaactgtccctcatcagtagtggtt

SEQ ID NO: 12784 - DNA, 1330 bp, Homo sapiens
gcaattctctgaagcgtttacaagaagaaaccttgacaaaaatgtccatccttgggaaaggttccatgagagacaaggccaaggaagaagagttgaggaaaagtggagaagcgaagtacttccatctcaatgatgatctccatgttctcattgaagtgtttgccccaccgtgcagaagcttatgccaggatgggacatgctttggaagaaatcaaaaagttcctcatccctgattataatgatgagatcaggcaagcacagctccaggagttaacatatttgaatggtggttcagaaaatgcagatgttccagtggttcgagggaaacccaccttgcgtacaagaggtgtaccagccccagcaataaccaggggaaggggaggagttacagcccggccagttggagttgtagtaccacgagggacgccaactcccagagggagtcctgtccacccgagggccagtgagtcggggaagaggacttctcactcccagagcaagaggagtccccgcaactgggtacagacctccaccgccacccccgacacaagagacttatggagaatatgactatgatgatggatatggcactgcttatgatgaacagagttatgattcctatgataacagctatagcaccccagcccaaagtggtgctgattactatgattacggacatggactcagtgaggagacttatgattcctacgggcaagaagagtggactaactcaagacacaaggcaccttcagcgaggacagcaaagggcgtctacagagaccagccatatggcagatactgattgtactgtctgatgttgtgaaatagccaatctccaccagtcctgtatactgttcaaagtaatttttttctatgaacaatccctttttaaataaatcaaaatgcttaaaatctgaatggatggaacttaaaactactttgttgaaacatcaacctgggcagaaaaaaaaaaaaaaagacatgtaaaattttgttatttccagtctgtatatgaaaaaataggtcatcaaaaggaaaaaaaataactttgattaactagtgttaaacaaaaaataggtttactaaatatgttaatctattcttttaacataagcctcacctttcattttaaaggtttccatagaatttagttattttatctttcagccatatgctagtttttttttctcttgccaacatgcgtaaaaagggaagccaattacaagtgcaaataatgtggtattcttttgtaactcaagtcttgaaatgttctgtagtgttaagcaaagtctcctcttgcttgatactaaataaacttttgaaagaaaaa

SEQ ID NO: 12785 - DNA, 2913 bp, Homo sapiens
tgtctatgaacccggtaattatctcctgagtaattctgctaactggctgcaaaggattaggatctgcttgtttaaaagactggattataaaatagaatcaactgtagtgttaggctgatcatgggaaatcaaagtaagtttgttttctcttgctgttccaacaattataggaaactatggtccaggaggcagtggaggaagtgggggttatggtgggaggagccgatactgagcttcttcctatttgccatgggtaagtagcttttgagttttacaattattattatcttggggagacatagctgcaggagtaaaagctttttaagatcatgttatctttccttaaaatctggttagatggataatttcatacctattttttttttactcttttcttctgttgaaacaggcttcacactgtataaataggagaggatgagagcccagaggtaacagaacagcttcaggttatcgaaataacaatgttaagggactcttatctcagtcatgcataaatatgcagtgatatggcagaagacaccagagcagatgccagagagccattttgtgaatggattatttaataacattaccttactgtggaggaaggattgtaaaaaaaaatgcctttgagacagtttcttagctttttaattgttgtttctttgtagtggtctttgtaagagtgtagaagcattccttctttgataatgttaaatttgtaagtttcaggtgacatgtgtttccttttttaagatttttctcaaagttttgaaaagctattagccaggatcatggtgtaataaggaccataacggtttttcctttaaaaaaaatttaagtgcgtgtgtagagttaagaagctgttgtacatttatgatttaataaaataattctaaaggaaattgtgtaattatagactttttattttaaataagttaaggagtgggtagtataattaaggtccgttgcaaagctgttgttatatttgtataagataaatgctggtcagatgtaagtgtgttgtctgcaattcatcaggattaaattatgtagataacttaagggatatctctgcaaggagaaacacctttttagatcttttagatgctgcttcttcaatgcaaggaaaggaaataaccccagcgaggtactcttcagggacacaggtctagtacaagagaactcttgacggctactaagttcagccagtcttaaaaaactgtgctgtttctacaaaactttaactacagtagtttataaggatgccaacggaaagctgagggtgtagagcaaaatagttctaagcttcagttaaacttctttaggtaagatcttatttacttttcctttcttaattttcctccctaaaagataaactaatactcttaaatggtctttcagtatagtggttcttacgtagtttaacatagctataaattgagtttaacaatttataaactcaagagaataatttttataaaccctgttttccaatctgtcatttacttaaattattttggttgtttttccctttttttccttcttttcccaccccctccccctccatgtgaagatttgggtgcttaacatatcatttttttccctgccggaattttagcattgatatgaaccatggacaagtatattctgctgccacaaagactgtaaagtgcttcatttcaacagctgaggcaagccaagtgatcattaataaagcttttcttggttccttcagtggtgttggtagtaaaatggaaggtaaaagttaggctgcaagttcaataaatcatgagatttcccatcgttacacccttgtgtattcacatttcttggatcaaacattttgagtgaactaggggtttttattaaagacatttgttgtatttatggttgtaactgtacatgcttatcaggatgagactgaaagaaggtagggcaaaaatggttgaatctattttcagatagtagttcatacttgagtgaagtgtcttgtctgcattatggaagcctgggtatgtatccagtactaaataggtgggttaaatgtggtaattctagttcagtgtcttaccctgaagagaaagttgtaggttggctgttgaaattcattccttagatatgatcagtttgattgcccggctttattgcctttacaggaatgtgatactcagggcttactctatacaccaatgagtcttctttgatcctaagaccaccactgaagttgtttaggttcttttggacaaacatgataaacttcttcagatactttttttttcctttggcaggaaggtgtcttgctgcaggtaactaatgaagaagtggtcaaccacagagtcttcaagaaataagaaattctgtaccatctgaaagtagttcttgttggtgccttcatttaaaaagcactctttaaaataaaagggaaatgttttctgataaaacaaacatttagttgaggttcttgatataaaacaattacaaaatgagtgttgtttgtaaaacagtaacatcaaattggctagagagataaatgtatcatgttttaaattaggttttgtgagtagacagattacaattctattttaaatataaagtttataaaataaatactttttgtatccaaatacttggtgtaatgtttacacataaaatgtgtgaatcttgttctataaatatttggttgtctaaaagatcaccatcccctaaatttttaaaagcagtttcacaaagctatgcatattttaatattaacaggtaaatgagaagagcattgtggacattattggctgtccccaataaaatgctgttcattatgcactgtaaaaaatttaggggatggtgatcttttagacaaccaaatatttatagaacaagtttcacacattttatgtgtaaacattacagtcgagc

SEQ ID NO: 12786 - DNA, 1036 bp, Homo sapiens
caggaagattctctcttacatggccaattttcacaagcagtcactcccctagcccatcatcacacagattattcaaagcccaccgatatctcatggagagacacactttctcagaagtttggatcctcagatcacttggagaaactatttaagatggatgaagcaagtgcccagctccttgcttataaggaaaaaggccattctcagagttcacaattttcctctgatcaagaaatagctcatctgctgcctgaaaatgtgagtgcgctcccagctacggtggcagttgcttctccacataccacctcggctactccaaagcccgccacccttcttacccaccaatgcttcagtgacaccttctgggggatttcccagccacagctggcccaccacagctccacctgtaaccactgtcacttctcagcctcccacgaccctcatttctacagtttttacacgggctgcggctacactccaagcaatggctacaacagcagttctgactaccacctttcaggcacctacggactcaaaaggcagcttataaaccataccgtttacagaaatctccaacttaactttgaacacagggaatgtgtataaccctactgcactttctatgtcaaatgtggagtcttccactatgaataaaactgcttcctgggaaggtagggaggccagtccaggcagttcctcccagggcagtgttccagaaaatcagtacggccttccatttgaaaaatggcttcttatcgggtccctgctctttggtgtcctgttcctggtgataggcctcgtcctcctgggtagaatcctctcggaatcactccgcaggaaacgttactcaagactggattatttgatcaatgggatctatgtggacatctaaggatggaactcggtgtctcttaattcatttagtaaccagaagcccaaatgcaatgagtttctgctgacttgctagtcttaggaggttgtattttgaagacaggaaaatgcccccttctgctttcctttttttttttttgaaaca

SEQ ID NO: 12787 - DNA, 1918 bp, Homo sapiens
  misc_feature (1)...(1918): n = a,t,c or g
tttttttattatatgaatattttaatgcaaaatgcttaacacttaaaattagcaaagcgtcatttaaattaaaattccatttaactaaagatggttaaccccaagaaattgtacagtagttgatttctgctatataatgccagtcctatgccatacaataagaactgcaacattagctgtcacttcctccattgctcttctggaccctaagggatgagggaggggactcagacacaaaacacaacccaaataaactgtgcagtgattcctaatagttataaacccaatctaagttgtccaaacagctgaagaataactgcaggtattgttccagagctgatacgaggttttgcttttacagcctggtaaaagttctgcactaggtgagaagtcacagtttaaggatgcatgttctgtaaatagttactacatatacacatttactgtctgtaaacactagaaatatacattagacagagtaccctcacaagttgggtacagtttaaaaaagaagatgaggtaacatgaatctcaaagtccacaggaatcctgcctgaagagtttgaacagctgcctgtaattcatttccaatgtgcagggagattaaggtttgccaaaactggattcactggctttcagcatagcaactgcatctttcactgcatggtagataacattcttcacctgtaatttatcttcgtgattggtatgagtctgtgacagatatcggaattcctgagtaagccagaagcagtgtttaacatgctctggagaaacaaaatcttcagccactttgatgcagctatataagttatgaacctgatgtggagctcctgctgggataaacaccacatccccaagaaactgtacaatagcccagccttgaactccatactcttgatgaagacgttttcttaatgatcggtctaaatacccagctttgatcatgaataggatcgtggtctgctgggttttcttgaccttgctcttctgatacctttttaagaaattcccttatcttctccgtgtcctttgcagcatatatgtgccacagtgctcctggcttctcttttccttcaataaatcgctttattgtgagttcgtcagaatctccatcttggatggtcttaaggacttcttcttcttgctcacactgtcctttgggaattcccacatagaccatgacattagctgcatcagatacatctaagtgaagatttgttgttccatatttccgatcttcaggagtgattaatccataagcattatacatcttggggcccagatctggccgaacaaagtagtttggcagcctagaggccaaattcagtttgccatctcgccttgtgtactcgggcagtggaatgttggccatcagatcatcaaacctggaaggcatcatatctctaaaatcttctcctggtggccagtccttaagtttcaacaccattggttctttttcatttttcaaacgatttggaacatcttcaaatccatcccagaagtctcctactgtggctcctgtgatgatttcattggtcctacaattaactaggtctacttcctgctcaccaaactctttcctgaaggattcaggtttccaaagttcagagttcaatttatgatgcactccagacaccatcactggctgcccttgtttccagcactccctaaacacattccagttgctcttattgttggggtcttgcaagcacagcaagcgattatcacaaagccaatagtgaggagtgtcaaagcccagaatgctgggcttgatggttagtccttgaggcctcttagataaatcagaagtcgtcttattttgcaccaaagaggcctcgtgccnnnnnnnnnnnnnnnnnnnnnnnnnnnnnnnnnnnnnnnnnnnnnnnnnnnnnnnnnnnnnnnaaagtttcaa

SEQ ID NO: 12788 - DNA, 2565 bp, Homo sapiens
gcgaccgctgcgccgaatcatcagtgtgggacgcaccgctccagccgcccgcggccagctgcaccggtcccccagcggcacgcgagcccgcccgcgcgccgttcgtgccctcgtgaggctggcatgcaggatggcaggacagcccggccacatgccccatggagggagttccaacaacctctgccacaccctggggcctgtgcatcctcctgacccacagaggcatcccaacacgctgtcttttcgctgctcgctggcggacttccagatcgaaaagaagataggccgaggacagttcagcgaggtgtacaaggccacctgcctgctggacaggaagacagtggctctgaagaaggtgcagatctttgagatgatggacgccaaggcgaggcaggactgtgtcaaggagatcggcctcttgaagcaactgaaccacccaaatatcatcaagtatttggactcgtttatcgaagacaacgagctgaacattgtgctggagttggctgacgcaggggacctctcgcagatgatcaagtactttaagaagcagaagcggctcatcccggagaggacagtatggaagtactttgtgcagctgtgcagcgccgtggagcacatgcattcacgccgggtgatgcaccgagacatcaagcctgccaacgtgttcatcacagccacgggcgtcgtgaagctcggtgaccttggtctgggccgcttcttcagctctgagaccaccgcagcccactccctagtggggacgccctactacatgtcaccggagaggatccatgagaacggctacaacttcaagtccgacatctggtccttgggctgtctgctgtacgagatggcagccctccagagccccttctatggagataagatgaatctcttctccctgtgccagaagatcgagcagtgtgactaccccccactccccggggagcactactccgagaagttacgagaactggtcagcatgtgcatctgccctgacccccaccagagacctgacatcggatacgtgcaccaggtggccaagcagatgcacatctggatgtccagcacctgagcgtggatgcaccgtgccttatcaaagccagcaccactttgccttacttgagtcgtcttctcttcgagtggccacctggtagcctagaacagctaagaccacagggttcagcaggttccccaaaaggctgcccagccttacagcagatgctgaaggcagagcagctgagggaggggcgctggccacatgtcactgatggtcagattccaaagtcctttctttatactgttgtggacaatctcagctgggtcaataagggcaggtggttcagcgagccacggcagccccctgtatctggattgtaatgtgaatctttagggtaattcctccagtgacctgtcaaggcttatgctaacaggagacttgcaggagaccgtgtgatttgtgtagtgagcctttgaaaatggttagtaccgggttcagtttagttcttagtatcttttcaatcaagctgtgtgcttaatttactctgttgtaaagggataaagtggaaatcatttttttccgtggagtggtgattctgctaacatttttatctacgttttataacttggtgagtgacgatgagagccctgcacctggccagagtgtcacaggcaaaaggcatcgggaagcaggagcatcttcttggcagccaggctgggccatcttctcctggacacctgctgtgtaccaggaacttcgtcacctccttgaatgctggcggttcatttcatgatcagtgttaagcattttcctccatgggaaggaagcatgggatatagaaaagcgaagggctgtcctttacaaattctggttctgcaacttcctagcgtgactttgggcttgggcaagtttcttagccgttctgagccttcatttcctcatctgtacaatgagattaatagtacctatcatctaccttcaggattgctgacagacagaatttgaaataaaatatgcaagttagctaatacaaaaagtagatgatccaaaaatggtagccactcacccttcacaaactgaagtccatggaccacggaagtcgagaattaatgtacacctgtatcatgtgtaggaaaccagaaatgtgttccttatttcttgttcccaaacaggattaactgtgaagactaatttataaatgtgaacctaagaaaactccacctctgaaggaaatcatttgaattttgtttttgtacgtaaagttaaccttccaattgtctgagctgcgtcactgacttcatgacagtctggccctccagacaagagcaacgctggcatcgggcaggtgattcctgacacctgctgccctgcaggcattcactgaccaggcctttcctggaggaaacacccagggccgggcggctgctgtttccacacgtggactcggatctgctgtgacaccgtcagcccgacagtctctccatatgcagcctttcctctgtacttttctccatggttgaaataaaacagggtgactgggagttacttagaattcatgaaaaaaaaaa

SEQ ID NO: 12789 - DNA, 947 bp, Homo sapiens
  misc_feature (1)...(947): n = a,t,c or g
ttttcttcaatcccacctagctgcatttcaagtgctcaacagccacatgtggctccatattggtcagcaaagagaatgtttgcatcatcacagaaagctctttcagacagtgctgctctagacagcttcaacaatgataggttctggtaaccataaagttgctatgcatactactcatttgggaacaccagtttctgagaactgaaatagaataaaacacatctttgcagtataactatgttggggtgtaactgaggtcacctgaaaaagtttggaagctggggaataacatgtgggtgtagggcagttaggtctttccacaggagtatgcagataagggagtcttgatccttattaaaatgctgattctcagagccttgagatactgatttagaaagtctgtgctaggtcaggtatccgcatttgaaaagctgcccccatgtaattctgacggaagcagcaatgtgcttgtctaggttcgctattgtgagaatcaagttgatatttacctaacctatatcctccacaaaagccagacagtctggctctgggtcttctttcctccatccttagcccacagcacagaaactggcacattgcaggtgctttttgctatgtcagttcctcacctgcttaaagaggtcagggaggacagtcttcctgggcgactcctggcctcaggaactcagatgtgtgagcctcgccccataagaaacaaggtggaggaccctgtagggcaggaaaatcatgttaacagctttggcgtggggcactccccaggataggcacaggagctgtgcaggcaagtagaaaagagcactgggagaacggcccagtttcacagaagaggaggcagcaagtctgccacatttttgttattattgctggaaatttgtttcattcacttcgacagtttcaggaattaaatattagggnagatttttttt

SEQ ID NO: 12790 - DNA, 1344 bp, Homo sapiens
ggtggtagagagggggtctctgaaggcccttggggctgacagggccaggcagcctccccagctgaggcatcattcctgggccagagtcgtgtccaccaagggacagtagccagagctcctcttcctttaccaggcaaggtgcatcccctcagccctcctggcccttcagtcttggtgccacctgggcacaggggcaagcttggtggttgtgagtccattcatctatcagagctggaacctcatccctgcacagatgaggaaaccaaggcatggagcagttcccagagtcgaatctagatctcatctgtcatccgggtcttatcctttgctctgtttttctcttcaggctctggaaaatcagatctgtgacttaatcctctccctggccctcacccacttagtttctttttcattcctgctccctgccttaactcctcctcccactgcccctgatcccaggcccaggcttttacaacctggtgctcagcttccccatcagtgaaaaggggtggctagagtaactaacctcagcaggccgtccagtcctgatagtctgtggatttcggatccttctcaggaagcttcatgtctaatggagactataattataactcctgttctgcatagagcatttgcatcaaaggctttccatacccctccctcccctggtcctcataagatccttgaagcaggttcctattcctcattggcaacatggcaaacagatcacaggagtcaaagggccttgctcaaggtccccagcttcagccccaggccctaagccagcgtcagaacagtcaatctgcatttttcatcagtcattctatagtgacatcatcccagactgccttctgtattcccctgtgtacagtctccttctgtttctaggtttagaagttcagaggtgactgtgtttctccatttccacagccaaatgggggaagaggtgaggctaggggagtgctgtgctgattctccagccatggtcagacaggtcacccaggagcctcgaggaaagccctggagggaatcacatgtgtactttttcatgaagctttttgcaaagcacatctgcgatacactagtttattgaactaatgtccaggagtagacatgattggtggccaagttatttggggacacctaaacagatcagtgacctgaatgacttctcagaacctttaatatgccaatgtgtgtggcaaacttacaagaagggagctaagtatccagcctctcccaaacctctttgaacaaagcttctgtccctcccacacctctcacctcacaggcacatcaggctgcagaatgcgctttagaaagcattgttttagtccaggcaca

SEQ ID NO: 12791 - DNA, 560 bp, Homo sapiens
  misc_feature (1)...(560): n = a,t,c or g
ggtggatacagcctgctgtacttcgagggccagganaaggcgcacaaccaggacctggggctggcgggctcctgcctggcgcggttcagcacttagacctgccagccactgtcaccgagcgggtgcaagcactcggggtccctggagggcaagccctgcccacagaaagccaggagcagccctggnccccatcagcccngncnaanncaacgccngaagggaaaactnaccaatttccacacanccatgttaccaatgnantttccaatgccacangacaactcacattgttcaactcccttctcggggtgggacanacnanacancagcacacaggcagccagncgtgggcaaangctcnaagggctcaagggctcangnaaccgtccccanaccaagggcccntntggtnggggcttgggcctggntttntanncaatgttttgcangtccatgttctccccaaaaaacgttnntggtgnaatatttttanggnnaaanttggcccctntnttntaanaannnngtntnancnnngnggggggngtntttttnaaaac

SEQ ID NO: 12792 - DNA, 2572 bp, Homo sapiens
gaattccgtcccgagctccgcaatgaagacgtgcagctccgactcaacagtattaagaagttatcaacaattgccctagcacttggagtagaaaggacccgaagtgaattgttgccatttcttacagatacaatttatgatgttgatgaggtactattagctcttgctgagcagctgggaaatttcactggcctagtgggaggtcctgactttgcccactgtctgctgcctcctttggaaaatctggcaactgtggaagagactgttgttcgtgacaaggctgtggagtccctgagacagatctcccaggagcatactcctgttgctctggaagcttattttgtacctctggtgaaacgcttagcaagtggggattggttcacctctcgcacatctgcatgtggtttgttcagcgtttgctatcccagggcatcaaatgctgttaaagcagaaaccagacagcaattccgttccttgtgctcagatgacacaccaatggtacgacgtgctgctgcttccaaattgggtgaatttgcaaaagttttggaattagacagtgtgaaaagtgaaattgttccactgttcactagtctagcttcagatgaacaggattcagtgcgcctccttgctgtggaagcttgtgtcagtattgcccagttattgtctcaggatgaccttgagactttggtgatgcctacacttcgacaagcagcagaagataaatcttggcgcgttcgctatatggtggctgacagattttcagagctccagaaagccatgggtcctaaaatcaccctaaatgacctcatccccgcctttcagaacctacttaaagactgtgaagctgaagtccgggcagctgctgcccacaaagtaaaagaacttggtgagaacttgcccattgaagatagagagaccataattatgaatcaaattctgccttatataaaggaattagtatccgataccaatcaacatgtcaaatcggctctagcttctgtaattatgggattgtctactattttgggcaaagaaaataccattgaacatcttctacctcttttcttagctcagttaaaggatgagtgtcctgacgttcgtttgaatatcatctccaatttggattgtgtaaatgaagtgattggaatccgtcggctctctcagtctctccttcctgccatagtggagctggcagaagatgccaaatggagggtccgcctggccatcattgagtatatgccgctgctggcaggccagctgggtgtggaattctttgatgaaaagctgaattctttatgtatggcttggctcgtggaccatgtatacgccatccgagaagctgccaccaacaacctcatgaaactagttcagaagtttggtacagagtgggcccaaaatactattgttcccaaagtgttagtaatggcaaatgatcctaattacttgcatagaatgaccactttattctgcattaatgcactgtctgaggcctgtggtcaggaaataactactaagcaaatgctgcccatcgtattaaaaatggcaggagaccaagtagcaaatgttcgcttcaatgtggccaaatctctacaaaagattggaccaattctagataccaatgctttacagggagaagtgaagccagtactacagaagttaggtcaagatgaagacatggatgtcaaatactttgcacaggaagctataagtgttcttgcattggcataatgaggagcaggagggaaaaggcctttactagattcttgtcacaaatttctagtcaatgtgttcttaactgggtggagaaagaatggaaaaccttcaagatctcatccaagcaaatggcaacaacttagaagaaatcatttagtgacttaattctttctaaagatgaaatgggattgttttttactcgtcttccttgttaaatcattatttaagccgttcttattgaccaattcctgacacttgattgtctcctaatgctttatccatcaccacctgggctcctgcatcctcactgtggaatcaggcaccagccacataatgttccagacaaagcctggaagggtgtggacccagacgtggagtggagtgattctcttgacgtttacatatatctctgtgtctctccatcattccaaagctaaatgtacatgtttagaataacttattttataaactcttcgggagacatgttgagatttgaccgtaatgaaagccacattttcctgaattatgatggtctgcattagtctcatgtgaaaggggaatgtggaagctcagggttaatgtagtggttgttttggtttttatttgctcaattttgtctgtactcatgtcattcagaaacctgaagtgtggctgcatcttgctgctaatgtgtgatgttgacgcctaactgaatttgaacagctcaccactgtgcctacatttaaaaatacttctctctcttttctaaaaagctttaactgtagtgcctcctaataagcagtatgtttgtttcattgtgagattgcagttctgtatttcgaaatgagtctaagaacccacagggataaatactgtgcaa

SEQ ID NO: 12793 - DNA, 1872 bp, Homo sapiens
  misc_feature (1)...(1872): n = a,t,c or g
aagtgctatcctgaggtgcggcaccactgtcccaacactcccatcatcctagtgggaactaaacttgatcttagggatgataaagacacgatcgagaaactgaaggagaagaagctgactcccatcacctatccgcagggtctagccatggctagaggagattggtgctgtaaaatacctggagtgctcggcgctcacacagcgaggcctcaagacagtgtttgacgaagcgatccgagcagtcctctgcccgcctcccgtgaagaagaggaagagaaaatgcctgctgttgtaaatgtctcagcccctcgttcttggtcctgtcccttggaacctttgtacgctttgnnnnnnnnnnnnnnnnnnnnnnnnnnnnnnnnnnnnnncaacggtggagccttcgcactcaatgccaactttttgttacagattaatttttccataaaaccattttttgaaccaatcagtaattttaaggttttgtttgttctaaatgtaagagttcagactcacattctattaaaatttagccctaaaatgacaagccttcttaaagccttatttttcaaaagcgccccccccattcttgttcagattaagagttgccaaaataccttctgaactacactgcattgttgtgccgagaacaccgagcactgaactttgcaaagaccttcgtctttgaggaagacgggtagctttctgcagttagggagggtgcagacacttgctctcctatgtaggttctcaggatgcgtaaagcaggaacagcctcccgaatgaaggcgttggccattggaactcaccagtgagttaggcaggcacgtgtttccccgacataacattgtactgtaatgggagtgaggcgtagaggcttcagcttctttgggatcagtctttgtggattttcataggcgagtttttcttgaccagcttttgcgggagattttgaacagaactgctatttcctctaatgaagaattctggtttagctgtgggtgtgccgggtggggtgtgtgtgatcaaaggacaaagacagtattttgacaaaatacgaagtggaagatttacactacattgtaccaaggaatgaaagtgtcacgggtaaaaactcctaaaagggttaatttctgtcaaatgcagtagatgatgaaagaaaggttggtattatcaggaaatgttttcttaagcttttcctttctcttacacctgccatgcctcccccaaattggggcatttaattcatctttaaactggttgttctgttagtcgctaacttagtaagtgcttttcttatagaaccccttctgactgagcaatatgcctccttgtattataaaatctttctgataatgcattagaaggtttttttgtcgattagtaaaagtgctttccatgttactttattcagagctaataagtgctttccttagttttctagtaactaggtgtaaaaaatcatgtgttgcagctttatagtttttaaaatattttaggataattcttaaactatggaaccttcttaacatcactgtcttgccagattaccgacactgtcacttgaccaatactgaccctctttacctcgcccacgcggacacacgcctcctgtagtcgctttgcctattgatgttcctttgggtctgtgaggttctgtaaactgtgctagtgctgacgatgttctgtacaacttaactcactggcgagaatacagcgtgggacccttcagccactacaacagaattttttaaattgacagttgcagaattgtggagtgtttttacattgatcttttgctaatgcaattagcattatgttttgcatgtatgacttaataaatccttgaatcataaaaaaaaaaaaaagtcgacg

SEQ ID NO: 12794 - DNA, 1763 bp, Homo sapiens
cctttgaagtataagcgcgctatcgtggactgcatcatcagcatcattgaagagaactcagagagcaagggagacagggctgtcaacatcttgtgcgagttcatcgaggaactgcgagttcacagtgctggccacccgtattctacaatctcctggggccagggaggggcccaagaccaccaatccctcaaagtacatccgcttcatctataaccgagtggtcttggagcatgaggaggtccgggcaggtgctgtgagtgctctggcgaagtttggagcccagaatgaagagatgttacccagtatcttggtgttgctgaagaggtgtgtgatggatgatgacaatgaagtaagggaccgagccaccttctacctaaatgtcctggagcagaagcagaaggcccttaatgcaggctatatcctaaatggtctgactgtgtccatccctggtctggagagggctctgcagcagtacactctagaaccatcagaaaaaccttttgacctcaagtctgtgcccctggccacggcgcccatggcagagcagagaacagaaagtacccccatcacagcagtcaaacagcctgagaaagtggcagctaccaggcaggagatcttccaggagcagttggcagcagtgccagagttccgcggtcttgggcccctcttcaagtcctcgcctgagcccgtggccctcaccgagtcagagacggagtatgtcatccgctgcaccaaacacaccttcaccaaccacatggtttttcagtttgactgcacaaacacactcaatgaccagaccttggagaatgtcacagtgcagatgggagcccactgaggcctatgaggtgctctgttacgtgcctgcccggagcctgccctacaaccagcccgggacctgctacacactggtggcactgcccaaagaagaccccacagctgtggcctgcacattcagctgcatgatgaagtttcactgtcaaggactgtgatcccaccactggggagactgatgacgaaggctatgaggatgagtatgtcctggaagatctggaagttactgtagctgatcacattcaaaaggtcatgaaactgaacttcgaagcagcctgggatgaggtaggggatgaatttgagaaggaggaaacgttcaccttgtctaccatcaagacacttgaagaggctgtgggtaatattgtgaagttcttgggaatgcacccttgtgagaggtcagacaaagtgccggataacaagaacacccacacgttgctcctggctggtgtgttccggggtggtcatgacatcctggtgcgctcccggctgctgcttttggacacagtgacaatgcaggtgacagccagaagtttggaggagctgccagtagacatcatcttggcatctgtgggataagaggccagcctgcataggacctcatacccttccccaacactacctggaagttgtgccttcctcatgaaactggcagaaaccccttcccaagcttctgtattgaaaaacaattaggaatcattgcagatttttttttattctgctcccacctcccacccgggactacttgctggtgactttttttttttttttttttaaataggggatgattttagcttgtcctaaatcttgctgtccacccttccaggaaagggacattgtaaatgaataaaacattctcaactcctcttgaatctatcccccaagaaaccatcttatccctgtaataaatcagcatgtatttattgaaaaaaaaa

SEQ ID NO: 12795 - DNA, 755 bp, Homo sapiens
ccaccacctgtgatacagagaccctgcattttgtgagcattaacaagtatcgtgtcaaatacggcacagtattcaaagccccttaactgcaaagccagagcagataacttggggtgtgtgtggggatgtgtgtgtgggcctatgcactcacacactgaagaaacaaggaagatgcctttcaagcctcactgggcctctctgggacatggccacctgacctgtgtgtggctggtgcagcctggcaccaagtgggctacctgttaggaacatgaataccttacaaagctgaagctggaacttttcccaaagggttttgggtatagcctgccctggaggggaaggaagtccatgcaagcaaagacatgcagtttgcttgcacacaccagcagagctaagactggagtctcctgtggcctaactttcaatgagggaaccggatgctgttcacactttgactggatggagatgcatttacaaaacagactggagaaggacttaatactcagatggattggaactatcatggtcactgctcctctcccctccccacaaaaggaaaaaaaagctggatttgattttttttttctggtcactcgagcacatctaagatcacccattaggttttatctgggacctgcagtttggctttgggattgatcatcttgtggattttattcctgacgattcccttgctgcctacccttttctctcctctggttctcaacctcaacgagttcaaatcagttgtccttttt

SEQ ID NO: 12796 - DNA, 1244 bp, Homo sapiens
ctgacagtggatttgaaatattgccatgtaatagatactcatcagaacaaaatggagccaaaatagttgcaacaaaagagtggaaacgaaatgacaaaatagaattactggtgggttgtattgccgaactttcagaaattgaggagaacatgctacttagacatggagaaaacgacttcagtgtcatgtactccacaaggaaaaactgtgctcaactctggctgggtcctgctgcgtttataaaccatgattgcagacctaattgtaagtttgtgtcaactggtcgagatacagcatgtgtgaaggctctaagagacattgaacctggagaagaaatttcttgttattatggagatgggttctttggagaaaataatgagttctgcgagtgttacacttgcgaaagacggggcactggtgcttttaaatccagagtgggactgcctgcgcctgctcctgttatcaatagcaaatatggactcagagaaacagataaacgtttaaataggcttaaaaagttaggtgacagcagcaaaaattcagacagtcaatctgtcagctctaacactgatgcagataccactcaggaaaaaaacaatgcaagtaagtaagggagatttgataagcatatcttttaaaagtattttcacacaatttgctttataaagtgtgcttcagtagttttaaacttttaaatactcagagagactgggacttgtgagctttggctgcacttcaaggctctagacgtgatttgagtagaggcacagtctgtatcccatctctaacttcagtaccgtcctctagactatttttcttgaataccttggtaactggatatgagttcttcatcatatgttccaaggtcatcatatgttttaaacattttcaaggtgttagagactgtgatgatgtcgctaagtcctgcaagaagacaaaaggactgagtagaattaaattagactctatacattccagtgcctagccagtttgttagaaaagatgatggacttggggaattcatagcttctggccttaaggcttccaccttttcattgcttgctgacctttttcaaaacgaactgactcagttcagcagaccaccagtaccagactcaggaattgtgatagagggagcattttgaacagtgccgtattgtggacatgctgtattgggctactccaggaaagtagggagttaaaggtgggaaagggaggaaaggaaggcaacctcttgaggtttc

SEQ ID NO: 12797 - DNA, 665 bp, Homo sapiens
ggccggggagacaggtggggtactcgggaagctggagcgggccggcggtgcagtcacgggggagcgaggcctgctgggcttggcaacgagggactcggcctcggaggcgacccagaccacacagtgattctcttctaccttccttagacactgggtcaaggagtaagcagaggataaacaactggaaggagagcaagcacaaagtcatcatggcttcagcgtctgctcgtggaaaccaagataaagatgcccattttccaccaccaagcaagcagagcctgttgttttgtccaaaatcaaaactgcacatccacagagcagagatctcaaagattatgcgagaatgtcaggaagaaagtttctggaagagagctctgcctttttctcttgtaagcatgcttgtcacccagggactagtctaccaaggttatttggcagctaattctagatttggatcattgcccaaagttgcacgcactgcctccttacctgtgaggaatgcaaaataaagcatggattaagtgagaagggagactctcagccttcagcttcctaaattctgtgtctgtgactttcgaagttttttaaacctctgaatttgtacacatttaaaatttcaagtgtactttaaaataaaatacttctaatggaacaaaaaaaaaaaa

SEQ ID NO: 12798 - DNA, 1079 bp, Homo sapiens
cccaaaaagtctcagagtcaaggaaaatcagtgtcaaatgttaattgtgtttcacctagtcattctccatcacagcctgatgctgcccagcccccaaaaccagcctggaggcactcacttcacagggtcctgccacatgggaaggagccagtaatccagataaggaagaggaagaagaagagccttgtgtgatctgtcatgagaatctgtctccagaaaatctttcagttttgccttgcgctcacaaattccatgctcagtgcattagaccatggttgatgcaacaggggacatgtccaacgtgcagactccacgttttgctaccagaagaattccctggtcaccccagccggcagttgcccaagatctgatacaaggtacccatgaagagattatgaactacttgaaggtggagactgtacggtggtgtgttggagctggcttgtaatgtcttatgagtgacaatcgttagtttgaggaattttgtgagacagttgtcaaattgttgctaggcttgaaatctgcggcaattggagtatttacaccatagaaatgctataagtgaagacctacctttcccttaagagctagttgttaaacctttaccagcataccactggaccttgtctaaaatttctttgtgttcccagtgtcttgcccagtagatacaagataaatattgccagaatcagatatcaggaagtagtaagaaaaggagttaatatgcaaactaaatcactcgctcaattgaataattgagatcttctgttcatttgttccttggaccttaatcatttgcattttggagaaaattttttctgctttaaaagtctgtaatttcagtttttgtgtcggggagagggaaaaactatttgtctgtagttgctttttgtgacaaagtgaatacccactgggctaagtttcatatctaaagcttgtcactaagaattttcatttttaggggtcaaaaacctattttgaaaatagtgttgtgtgaatgctgtaagtgttgtacatgtctctggtttcagaattaaaagaattcagagttaccttgtggtataaaaaaaaaaaaaaaa

SEQ ID NO: 12799 - DNA, 235 bp, Homo sapiens
  misc_feature (1)...(235): n = a,t,c or g
gagaccccagagatgttgcctgcatacatagcaatggatcaggctataagaagacttggaagaagagaaatgtctgagacttctgaactttggcagataaagttggtgttagaggaagccatcaggagcggctgcagaaccaccctaagcgggggctctttatgaactcggaattcctccctgttgtgaagtgtaccatngntaataccctggaccagtggctacnagtcggcgg

SEQ ID NO: 12800 - DNA, 636 bp, Homo sapiens
ccctggggccgtagtaggccgcagcgaggaggtagagggggcgggggtcgcactagggtgtccctagagaacgaggactctgaaggcgggacatttgggcgacccccgggcggggccagccattaaacagtcccacttctgtgccagacactgaactgggctcttgacgggcatcatctcttaatcctcagaacatcccagggagctccacaggatccccatatcctgggccatgagtgagttgaaagactgccccttgcagttccacgacttcaagtctgtggatcacctgaaggtctgtccccgctacacggcagtcttggcacgctctgaggatgatggcatcggcatcgaggagctggacaccctgcagctggagctggagaccctgctgtcttctgccagccggcgcctgcgtgtgcttgaggccgaaacccagatcctcaccgactggcaggataagaaaggtgacagacgattcctgaagctgggtcgagaccatgaacttggagctccccccaaacatgggaagcccaagaagcagaaactggaagggaaggcaggacatgggccgggccctggcccagggacggcccaaatccaaaaaccttcagcccaagatccaggaatatgaat

SEQ ID NO: 12801 - DNA, 985 bp, Homo sapiens
caacctcagctgcttccatccagctgacatctttggtactagtgaccctggtggcctggccagctggacccacagctattctggctgtagcttcacatcaggcgtcctggatgagaatgccaacctggatgccagctgcttcctaaatggtggccttgaagggtcaagggaaggcagccttcctggcacctcagtgcaccccagcatggacgctggccggagtagctcagtggatctcagcttgtcttcttgtgactcctttgagttactccaggctctgccagattatagtctggggcctcactacacatcacagaaggtgtctgacagcctggacaacatcgaggcacctcacttccccctgcctggcctgtctccacctggggatgccagcagttgcttcctggagtccctcatgggcttctccgagccagccgccgaagccctagatccctttattgacagccagtttgaggacactgtcccagcatctctaatggagcctgtgccggtgtgaggaccaggatgtcttttcccagccccaagagacctgttgctgctttcttgtaattatggggctccccagagtctgcgtaacagtctcccactggctggctcacccacaggtgccatgtgcacactcctggttttcaaacaattctctggatttatttatttgttttaacttttctgtgctgaagagaggactagggggagggggcttcccctttcagctgcccggccccccacacccacagcttgctcttctatctccacaacgtgagcctggaagaggagaaaatgtggctcctctggagcttggcagaccacttttcggtctttgcgtgatgttccttagcccaaagacggtgagacagggctgaaatcaggtggcttctgccacctggagccctagacccatgggtggctaaatccactggactgtgaagactataatttatttccataatttatttggagattg

SEQ ID NO: 12802 - DNA, 1084 bp, Homo sapiens
tttgatgattacttggagttattcctgcagtttggttatgtgagccttttctcctggtgtttacccattagcagctgcctttgctgtgttaaataacttcactgaagtaaattcagatgccttaaaaatgtgcagggtcttcaaacgtccattctcagaaccttcagccaatattggtgtgtggcagttggcttttgaaacgatgagtgttatatctgtggtcactaactgtgcgctgattggaatgtcaccacaagtgaatgcagtctttccagaatcaaaagcagacctcattttgattgtagtagcagtggagcacgcactcctggctttaaagtttatacttgcatttgccatacctgataaggccacggcatatccagatgaaactagccagactggaatttgagtctttggaggcactcaagcagcagcaaatgaagctcgtgaccgaggaacctgaaggaggaaccaatggaaagcgggaaggagaaggcaacctgagtgcccagcgtgcccagctgccctgttgggcagaggcctgtgtctgtgccacacctgccacggtggcagggggggtacccggggcagcatcgtggctcctgaacccagacccaatgcttagccaaacgaagtgactcccatgtggcaagcacccttcatcagtttcgcaagtggcttgggctcgggatcctttggcagttcccccagccgcaccctgtctgctccttcccagttccttcccggggcccccacacgcttgctccaactgccaactttgctgcagagccactgccgcccttgagcctctcaccatgagtgagccaccagctctccacgttcccctcatagcagtgtcactcccaaccccaccatgggcccagggacccgtggacaggttggggatggggtgtgtgcccactgtgctcatcacaggagcctcagttgagagtgagcggggtacagtaaggcagtgcttcccacactggacctctttcctggttctcttttgcaatacattaacagaccctttatcaacataaacaatagtaactgagctattaaaggcaacctctctgactca

SEQ ID NO: 12803 - DNA, 2147 bp, Homo sapiens
  misc_feature (1)...(2147): n = a,t,c or g
actgggaagaatggtgatgctgttcaagtaataaggacaaaggggaaccaggcactgtgagcctctgtggggtgtgttactcttttagctcatgtgtttcaagtcattctaccccttgccgtctccacatccaaacctaactactttggattttaattgcagctcctccacccccaccacctgtgatccgaaatggtgccaggggatgctccccctcccccaccaccataccgaatgcatggggtcagaacccccgagccgaggaaagcccccacctccaccctcaaggacgccagctggggccaccccctcctcctccaccgcccctgaggaatggccacagagattctattcaccactgttccggtctttcttggatgattttgagtcaaagtattccttccatccagtagaagactttcctgctccagaagaatataaacactttcagaggatatatcccagcaaaacaaaccgagctgcccgtgggagccccacctctgccacccattctcaggtgaagcctggcttggtcccgttcctcaggaaaaggatggaccttctcttcttctcagatggtcccttccattcccctgaaacctgcatgagagctcctaacatgtttctccaatgcaatcaagccctagactccaaatgtcctcccagctcacctccatctatgcatctcatctctggatttggtgatcagactctatattgacagtaggatctcaaaccctgcatccatccttcctccagcaagccctgctagccacatgaggaacaagtttccgtgtcttctgccttcctcttggggaaaggtgccttgttgtgatgaattaactcactgttagggcagggtggagaatggtactccttccttctcctgtccactgtgggggaagcttggcaggtatattatatttcatcatttaggaggctggcatgaccaggacttatgggtgggaggggagcatttttagtgaagcaagaaaggagtttgccaagaagtgatctgttttaaaggtcatatttggagaaagggcaaggaattgggtctgctttatttttgggggtattttgtttttgttctcacctgctgcccccccaccccaccaccccagggataaattggatataaacactaaatactaatcagttgaacttaacatttaataaaaagaaagggtgaaataaactgaagaccattttagaactagtcagttctctgcagcaaagggaacaggagccatttgaaccctctgggacccctcaccccactgcttcagggtgctaggctgagggatgtttttcctcccccttaccgcccatgcccttgaaagaaaagtcactttttgtggagggcatcattcattcctgattcacaaaccccaaaaacctctggtgggagataggaagataggggcgtgggcctgggccttaacctcaatcttgtgtctgcctcagtcttttctgactggccctgaagttgtcagtggctctttctgtccttcagcccctggaaggtgctccaggataacaaagaagggcaggttgaagcccctcatggaaggagctggctttgtggggctgcaaaggacttttaagtcctgcctgtactgaagttcacagcccacctgactgagcagactcttcctgttcctttctctaccacccttgccttcccaggactgcacggtttaacacagcagagtacagaagggtgaagaagtgagcagaggcttatgaagatattcagatactcttctatgccaggaagcacaaagactttgttgagatttgcctcagttcagtagatcttccttggcagccagccataggttgtttctttgtcttccgggtcctaaagagcacagagaaaatggaggtccccagtctaggtaggaagctgattggatgaggacttcttttttttccgacagcaggatggggctcttgggctccacacaccagatgctttggttttctacaactgttgctatgtgtagagggtgctcagagcgtggcatgagagcaaggagaccatggctactctttgaaatggatggggaaaattagcttaaaaatttaatcacggagattgcgccacntgcactccagcctgggtgacagagcttagctccgtc

SEQ ID NO: 12804 - DNA, 948 bp, Homo sapiens
tggcaatagaatagctggatacactaatctctacaaggtgtcaggcaggagattcaccttccccagtcccaggggacaggagagaaatctgtaaagggacagatgcaccatctttatttcaaaagaaaaagctccctcagattgtgttactaggagtctcttttgtgacatttactgacctttctccccaatcttaccttcctattggctactttttaaataaaaataaacattttaggctaatatgacaaaaatgagataaaatcttaaaaacattgtactagtgtacagttactaaaatgtgcttactacaaaacagtaaaatatttcactctgtaaatcatcactaagtagttattctgtcctgttgattatgagcctccaaaaatgtttaatgcttgaaggatggtttgggaggcagggaatccttttcttaaaacaactttaatgaggcatatgttacatatcataaaacacccatttcaagtgtacatttcagtgattttagtaacttccctcagtggtgtagctgtagctattactcagttttagaacatttttaaccctcccaataagatcttcatgctcagttacagttaacctgtgcttaccccagcaacactaatctacttctctataaattgcctttctggcagtcaatcatggaatcatcatagtggccgtggtctggcttgtactagaatgtttgaggttgtcagcagtacgtctggactgtcgatatgcggggaacggtgtgtggccattgctgcgggcttacatggtcatctgtctacgactcgcgtgctatggacgtggtcaaaccatcgggagcgtctccgcgtcgagttttgcttgtgtaggggcactggtgcagtttggtgggagaggccggtccccggggaaactctggagactttgcgagagccgctctagcgccccctggtggct

SEQ ID NO: 12805 - DNA, 2493 bp, Homo sapiens
ctcaaccagttttatttttcctcacaatgaacggaagaaaaaggcagaaataaatggtagggtcatttgctagtagaaaagaaagctgggattccccatttactttggaaactgaggagaaagaactgctttccccactcgtgtctgggcaaagggtgtgcccagatgttggcaaaggaaccagacaaaatcaacagccagcagttttctgttccaaacagttagctcctctacagtccagagggaagctattccctgagttcattcaaggtgacagcagaagtgtttctctctttctgcttggcccaactgtgcctgagggctgatggatccagaccttgtaaacattcagctaggtgtaacataaccagaaaggctgaaggaagctcttggccttcccagcttgagaagtaggggcctcatgtgtatctggtggcctgcagagcccaaagcagagagctatgatgaataaaatatttttattgcttttctaaaataactcctttcatatacaaggattccttcagttaggtcctctattatcctaaatgctctctggtcatgagcaggtgaggttctatttagccaagataagtggctgcctcagagtttctcatagggaaaactgaaatctgattattttcttttcttcacatagtctctaggttgagaactccaagtagtaagaggcacaggataaggatgggagagactgagcatttttgagagaatactcctctgctgaatgccactttgaagggaaagaagtcgaatggccatttccagtccattttgggttggccccttggaggctgtggcttctgggtaatgtccacaaagttcacaagagttgtcaaagatacttctgtaacttgctgagaatcctgtatagactggcactggtataggaatcgaactcctgatacatgagcttgcgggttggacaggagacctacatatgcccacaatacctggatctccagggaaactggtatgagacagcaggaagtacagtttatagctgaaatgctgcagtgcctgttgaggatcctggtccaccctcctttctgggctgggtcagcattaccaaagatggcaacatactctggtctgggccttccatgaagagtctgataaatctcctgctgcaagtggctgcagtctgccttcttcaacctgagcttgcatccagatattgcattcactccaaactgcacttcatgtcttttaacagagcaacttccattaccctggctctgtaagagggtcattgagtaacttatatcatcagtcagagccaagagtggcttcccaactatatagccaggattcccacttctaggactggtgagagaagcagctgtgcctctgttgaaaagccctgaagcgaaggatgaagtgttgctgtaaggaagcgccctggctcaacagtcaggttggtttgtcccaaactgacagaaactttctggattccaaaagtcccattggtctctatctcataggtgacctgagaaactacattctgacaagtgtttccagccaacagaggagcattagcctgtgaggtaagtattacaggaacctggaactccatattctgtggatcagtcatgcttcttggaacctttaagactgtgaagttatagtaagaggcagcattgagggctgaatccaaggtacagctactagccaggttcttgaaaaaacgagtgcaagttgtacttttactctctaggaaacctgcaggattgctttcagcacagagtcccccagctccaactcctgcaggttgtctcagcaagcttattacagaccacttggggaagtaagtaagaatggggtccccagccctgtaaaaagatggtggtgattgagtttggaatgttgaagtgaatgattcgcctccaaactctgcagccagggccctggaagttggttgcattgaccttttgaagcttctggaaatagtttaagtttgagttgttcacatggacacaaaactgcctgattccattagaatccatgaaaactcttgaaggaaacggggaattactcctgaagataacagagttgtctacacaaacccagcttgaagaccttacgctgcctggaaggcagaaggagaaaactgtcctcggatggagaagatagcagtccctgtcgcagcagcaatttatatcgcaggctccaggagtcaagtcacagacacagatcggtaagactgggaagaggtccacagtcctattcccaggggccgagggagtcacgagagtagggaccactgtagggagtccaggcacggccgggcgagttgcagtcgcctctgaaggggactggagggttccgccatccgtccctcgctgcagctccaaagacgtgggcactgcccctgatggggaggaagagggctgaggccggacgccatcggggaacaccagaaagaacacttgcaggagcgcgagctgtggggtgcgcatggggcattcagggcct

SEQ ID NO: 12806 - DNA, 907 bp, Homo sapiens
gggagctgggctgcagggagagagcagcagatggaaagaagccttctaattgtcctgatctcatggaaaaccactgtcaggaggtgctagggaactagtgccagggtcagtctgcaggaaaggcctttcttatagggaccaacagttggacaggtatgttagtcaagaacctcactacccattgcccattctgactctcctacctttcttttactctcctgctcctttgcacatgatttgggcctgggtgggatgactaatagttattctgtgggaccctaggtgaattccaaggacctctgtagtgggcatgagcaagatattccatcctacatttcctctcacaaactaccaggtgttctttagccactctgtggggaagacagaaatatgcccctcatccctctggatttttctgctgattctcttccctctcccccaagaaaccaaatccccaacttttctgttgcaccgtctcttgtctcctgaccaactcatgctccctttctttctctgcctgtcatctaggatggaggaaccaggggacgccgctgtgccattgaagcagatatgaagatgaaaaagtgaagcctcagagttaccctctttgagccgaacctaaaaataaaagtaaacaagataggagcttggggcttgcggggcccagtttccagaggtgggaagttacagaagaggaggtacctgggccacacgacatgagctggaaaatcctctcttagagagttggagtaggcacaattgcctgttttagggcagaaaccatgggctatgttaatgtcctaatgtgtagctagcagatcgtagctagtttgtattgtcttgtcaattgtacagactttttaaaaaaaacaaccaccagtgaaatgtgtgtgtatacaataaactg

SEQ ID NO: 12807 - DNA, 3558 bp, Homo sapiens
taccttattgaaacattaaatgacagttcacataagaagttcttcgatgtatctaaacttggcaccaagtatgatgttctgccttactcaatacgggtcttgttggaagctgctgtacgaaattgtgatggctttttaatgaagaaggaagatgttatgaacattttagactggaaaaccaaacaaagcaatgttgaagtgccctttttccctgcccgtgttcttcttcaagattttactggaataccagcaatggtggattttgctgctatgagggaggcagtgaaaactcttggaggtgatcctgagaaagtccatcctgcttgtccgacagatcttacagttgaccattctttacaaattgacttcagtaaatgtgcaatacagaatgcaccaaatcctggaggtggtgacctgcagaaagcaggaaagctctctccacttaaagtgcagcctaagaagcttccctgcagaggccagactacctgccgaggatcttgtgattctggagaactaggccgaaactcaggaacattttcttcgcagattgagaatacacccatcctgtgtccttttcatttgcaaccagtgcctgaacctgaaacagtgttaaaaaatcaagaagtagaattcggcagaaatcgagagaggcttcagttttttaagtggagttcaagagttttaaagaatgtggcagtgatccctcctggaactggaatggctcatcaaataaacttagaatatttgtcaagagtggtttttgaagaaaaagacctcctcttcccagacagtgtagtcggcacagattcacacataacgatggtgaatggtttagggattctggggtggggggttggaggcattgaaacagaagcagttatgcttggtctgccagtttctcttactttaccagaggtggttggatgtgagttaactgggtcatcaaacccttttgttacatccatagatgttgttcttggtattacaaagcacctcaggcaagtaggagtggctggaaagtttgttgagttttttggaagtggagtttcacaattatctatagttgatcgaactacaatagcaaacatgtgtccggaatatggtgctatcctcagctttttccctgttgacaatgtgacattaaaacatttagaacatacaggttttagcaaagccaaactcgaatcaatggaaacataccttaaagctgtgaaattgtttcgaaatgaccagaattcttcaggagaacctgaatactcccaggtgatccagattaatctgaattcaatagttccatctgttagtggtccaaaaagacctcgggatagagttgctgtgacagatatgaaaagcgatttccaggcttgcttaaatgaaaaggttggatttaaaggcttccaaattgcagctgaaaaacaaaaggatattgtctccattcattatgaaggaagtgaatataagctgtctcatggatcagtggtcattgctgcagttatcagttgtaccaataattgcaatccatctgtcatgcttgctgcaggtcttttggctaaaaaggctgttgaagctggtctgcgtgttaaaccttatataagaacaagtttatctccaggcagtgggatggttacacattacctcagttcaagtggagtattaccatatctaagtaagcttggatttgaaatcgttggctatggatgttcaacttgtgtgggaaatacagcacccttatcagacgcagttttaaatgcagtaaaacagggtgatttggttacctgtggtaattttatctggaaaaaaaattttgaaggtcgtctttgtgattgtgttcgtgccaattatcttgcctctccacccttagtggtagcttatgccatagcaggcacagtgaatatagatttccagacagaacctttaggtactgaccccaccggcaagaacatttacctgcatgatatttggcctagtcgagaagaagttcatcgagtagaggaagaacatgttatactatccatgtttaaagcattaaaagataaaatagaaatggggaataaacggtggaattccttagaagcaccggattcagttttgtttccatgggacttaaagtctacttatatcagatgcccttcattttttgataaacttaccaaagagccaattgcactccaggctattgaaaatgcccatgtcttattatatttgggagactctgtcacaacagatcatatatcacctgcaggaagtatcgctaggaatagtgctgccgctaagtatttgacaaacagaggccttacccctcgtgaattcaactcttacggagctcgaagaggtaatgatgctgtaatgacaagaggcacttttgcaaatatcaagctttttaataagtttattggaaaaccagctcctaaaacaattcattttccatcaggacagacgctagatgtatttgaggctgcagagctgtaccagaaagaaggtatcccactgattattttagcaggaaagaaatatggttcaggaaactccagagactgggctgccaaaggaccgtatttactgggtgtgaaagctgttttggctgaaagttatgaaaaaatacacaaagatcatttgattggaattggcatagctccacttcagttccttccaggagaaaatgcagattccttgggcctctccggtagagaaacattttctttaacatttcctgaagaactgtctcctggaattacattgaatatacagacaagcactggaaaagtattcagcgtgattgcttcgtttgaagatgatgtggaaataacattatacaaacatggaggattattaaactttgtggcacgaaaattctcatagtatctacttaccatagatacctttcataactggtaactgcaaagccttttgtgctggacccaggaatccttaccgatggagcagcagatagtcccagtatactcacttatctcatccatggatgtaaatgatgatgaatcaacatagtaactgaaatgaaatcttcttgattttaaataatatacgaatggtgctattaatattgctaaaatcaacgtgtgaagtgtgttgtggaagagacctgtaagtatgggggggggcgatattttatcagaccattttgtaaataaaggcagaatttgtgttgaagattcttatatgaataaccttcctggatttgtttagttttgcaccaataaaactgtgtactactgtttgttggtttaagagtagcagattgaaatataagaagccagattagactctaaaattgtggccattgggaatctcatttataaatggaccttttaagtatattaattcctcttcagaattgagctggacacatttggcattcttagtttgtcatataaccaggtttatccttagtctaactgcaagggatagaacctgccccaggtcacaatcattctgtccaatccagccaaggttcctccacatatgaagatggaccatggcaggatacaactgattgtgtgcaccatgtattagcagtgggaatatgtacacatatgatgc

SEQ ID NO: 12808 - DNA, 1225 bp, Homo sapiens
cctggctcgagatgccgaagtcgtgcgcggcccggcagtgctgcaaccgctacagcagccgcaggaagcagctcaccttccaccggtttccgttcagccgcccggagctgctgaaggaatgggtgctgaacatcggccggggcaacttcaagcccaagcagcacacggtcatctgctccgagcacttccggccagagtgcttcagcgcctttggaaaccgcaagaacctaaagcacaatgccgtgcccacggtgttcgcctttcaggaccccacacagcaggtgagggagaacacagaccctgccagtgagagaggaaatgccagctcttctcagaaagaaaaggtcctccctgaggcgggggccggagaggacagtcctgggagaaacatggacactgcacttgaaagagcttcagttgcccccaaatgccgaaggccacgtaaaacaggtctcgccacgagaggccgcaagcaacagaggctgttggccggccgactggccctgcaggcctgagaaggacccccaacaagcagccatctgatcacagctatgcccttttggacttagattccctgaagaaaaaactcttcctcactctgaaggaaaatgaaaagctccggaagcgcttgcaggcccagaggctggtgatgcgaaggatgtccagccgcctccgtgcttgcaaagggcaccagggactccaggccagacttgggccagagcagcagagctgagccccacaggctccggacgcagaggtggcagtggcaccagggccggcagagctttggagctctggctgtggacatttttgtctgctgtggacactgagaaagttggccatgaggcctgcttggccggggatcgagacagtagccaagctccccggcgagagccccaatgccgtctgggggacgtttagaggcgtggcactaggagtgcacatctgtgagcatgacaagcttatcctcccatggtaacagaagtccaggctgaggctgattcctgacgctgtcctttcagcacacgcagagcaaagatcgttggaagcccccagtgtgggagatgctcctcagggaggaagccatgtgagggggctggctctgtggcgggtgagtggtcccctcctccatcagcctggacagccgctcggggttctaaggagtgactcctgtcccggcctggtgtgagtgggcagtgtaataaagtgtctttctatacggaaa

SEQ ID NO: 12809 - DNA, 752 bp, Homo sapiens
gcagaacaatgggctgagttataaaaagcgtgtattgaatttaagaagacagactagcacaaaacacagaattcgtgttaaccaaaggaggcattgatttcagttttaaggctactcagtgttgtgtgtccagggaaattcacagctcagtatgagaataccttggttagtgctcacccacaagcttccaggagcccagctgggaggagacaataggaagggatgtcagctctgctctccctgtaaatgttagttgaactaagttatggatttgtggtctttcaaatacatgacgcctttagtatgccacactgaaatgaataagaagtcttctggaaactggggaacttcataacattgaaggcagaagattctgctaaggaaaaaagcaggcaggaaagaaaatgtctcatcctttcttgaaagcatttgcagaaaatatatcatttcattttattcccatctgttttcaaactcgtgatcttaaaaggcattctgatgataaatttagaattttcatctataaaatttagaactctaatccataaagttagaattgagctaatagagtggtatgacatggcactaaaaatataaatttttgttgtaagtcaggattggagtaagctggaaaagtatgtttaggcaaatcttggagaaaaccaaccataaacttacagctctaaaattcagaaagccctaaaatttcaaacactgtttgaaagaagaggtgggggccgggtgccgtggct

SEQ ID NO: 12810 - DNA, 1833 bp, Homo sapiens
ttttttttttttcattttgaaaaagctatttactttttttccaaatattatcccaaataggtgttttacagataagggtcaatacgaatcaaacattctacagaagaaaatcgtttttacagacattaagaataattttaacagaagaaaaagctcacatctatctagatgtggctatgttccatgggaaaaatttcagcatccaaagtgcaaagaaaaaatgactgtagcttttcttaccacaaaatattgacaatcttcccttatagcctactctttattgttagttgggatgccaaaggatgatatattgacctttagaagttgggctccactggacaaggttgggggtatgggggccaagcatcagaatgaattcaattttaaaagaaaaactggctttgaccccaaatgaacccaaagttcagccagcggcacatcagagataaatacgagttgtactttcacatttacaaggttgtgccactcaacactattaaagacctaatcatccaaatcaaagctacgcatactcccatcactagttctgtcctcaatgcatcccatttttatgaaagctccatattatagctcagttcataatggggaatgagaacttctggttcttagaaggaggcatcctaaatcctctggtctaatcctttctttgccctgccctcccacttcccaccctgagacaagctaatcttatcagataggtagggtttctgtcattgtctcacggaaatcagttctaaatgaaactagagaaagatcattctatgagcagcatttggctttaagccaaaggaacaataacccccttccccaaaaagaatcacaaccaattccatactaacccttctacccctggaaagatgtctcatctaaaagctcccaacaatgaccagcacaaagtgctgatattatgtgacttgaggagaaggaaggggagatatatatagttttaataaaaccctcatgcacaattaaacttgagtaaaagcctggagaatgctaaaagtagtaatgagtacaggaggctgcagagcagagtacagatgtgtcctttcttatagtcagtcaatgctgggaagtaacaggcagatgtgacttcacttgagcattggagaagcaaaaaagttgccttgtcgtcctaggttagtggcagacttgcttttgctcccaaatctaggagtgttcttggtgagggtggaacggactctctgtgacagggaactagatgaaggagtcttgagaagctgatgttcaggagtggtcacaggtcccagtaaactcactttaatatctggtgtctgtggtgttgaaaaggcatttgagttttcaatgacatgtagggggtcaatgttctcttgctccaccatcatgaactgactccaatactccagaggcaaggaaagcaggcgctcaaccaccttgggttgacgcttgatgtcctgtaacattgtcactgggtctggattgggcacagcatgggccactattgtagggccaaagactttagccagattggcaacatccattttagtatgtggactctgagccactctctgcaagtgaatcatgaggaaagctaatgtgtccctgttggcctggggcagttcaccaacagcttggtacatggcagctatgctgttgtcttcatctgtgatttctgctgcttccataaaggctctgttaaggcgaaaggtcagaagaggttctttgaggtttcgaagaaagtcttttagaaggctacagatagcatggatatcatccactttgctgaggaggggtacagttttcactctgaggaatttctctttcagctcc

SEQ ID NO: 12811 - DNA, 2042 bp, Homo sapiens
cagaatgtttaaaggccttaggtgatatggagcgagctgctgaaagctatggcaaggtggttgatctggccccactccatttggatgcaaggatttcactttctacccttcagcagcagctgggccagcctgagaaagctctggaagctctggaaccaatgtatgatccagatactttagcacaggatgcaaatgctgcacagcaggaactggaagttattgcttcatcgttctactctgttgttttcacaagggcaaaatgtatgggttatgtgggataccttacttactatgttaggccatggcttttaaaggtagcaatgaatcgagcccaagtttgtttgatatccagttccaagtctggagagaggcatctttatcttattaaagtatcgagagacaaaatatcagacagcaatgaccaagagtcagcaaattgtgatgcaaaagcaatatttgctgtgctcacaagcgtcttgacaaaggatgactggtggaatcttctgttgaaggccatatactccttatgtgacctatcccgatttcaagaggctgagttgcttgtagattcctcattggaatattactcattttatgatgacaggcaaaaacgcaaagaactagaatactttggtctgtctgctgcaattctggacaaaaatttcagaaaggcatacaactatatcaggataatggtaatggaaaatgtcaataaaccccagctctggaacattttcaatcaagttaccatgcactcccaagatgtacgacatcatcgcttctgtctccgtttgatgctgaaaaacccagaaaatcatgccctatgtgtcttaaatggacacaatgcatttgtatctggtagttttaagcatgcgcttggacagtatgtgcaagcctttcgcactcaccctgacgaacctctctatagcttctgtataggcctaacctttattcatatggcatctcagaagtatgtgttacggagacatgctcttattgtacagggcttttcctttcttaatcgatacctcagtttacgtggccctgccaggaatcattctacaatttgggccgtggccttcatcagttggggctgattcatcttgcaatccactattatcagaaggccctggagctccctccacttgtggtagagggtatagaacttgaccagttagacttacgaagagatattgcctacaacttgtctctcatctatcagagcagtgggaataccggaatggctcaaacgcttttgtatacctattgttctatataaagcaccgcaactgagaacagagcaatggcagctgctgtgtgaggaccagtgtcttctgtctcagggcttattatttgtaactccaaaatagaaatgacaatttcagaattacctaacaaacagtgtatttatttttaatatgtgataatgatcttgtggtatatatgcaaaattattcctacaaaaatttgtatattggtctgtcattttcctttcacattctatagtgaattgttcccaatgttgaaatggacgtgtaagcctttgagctagcttggagtcgaatacactatttttcactcacaccatttattcatctttgtatttaatactatagctctgtcaatatcacatgaggcagtttttcaaatacgtataaacagaggttgcttattattaaaggaaagacaaagtgggactctttatgatgtcatgacccatgataactaagcacctaagaaaattatttaaaatagttatgtggtaggcagaaagacaaataatttagttttttacttttcaccagcatgtatcttagctacctaaactgaaacatgggaggctgggcttaattcaaaatatattgctccaaggcaaataaaaaaatgctttatctatatttgtggctttctgatgaaaaaatagagaagagcttgttcaataacaggacatggtttccatttcaagatcacaagtaatataagactgggcaagtagtacgtatggaataaaggacatactgctgattgataaagtaaaaaaa

SEQ ID NO: 12812 - DNA, 1234 bp, Homo sapiens
  misc_feature (1)...(1234): n = a,t,c or g
gtatttaaaggtagaaatattaataatttttcctaaaacatctccctaagaagtcactgataattataattagtttaaatttattcttacactacttaagaaaaatttcatttagaaaaggctaccatgagatcttttgactatatggagtagactgcatacagatctctttatttctattatgaatattttagcgattataatcagctattccactgagtattagatttggtcactaagtaactcatgtttttctttagtcaatcattcattcattcactaaaacatttgttgagagttggctaaactctagattctgtgccaggcactgtacagggtgatggagatcactccataagaaggcctcttggctcttagccagatcatatgtaatactaaatttaaattttttgcattaaaaggctaaaaaatcatttgtttttgttaattatatactggttgatttatagatgtaattagcacatattcataagagacaaatatatacaatgagttactatacatatacaaagtgattttagctgtataaagtgatattgcaaaaaactacagctaatgtttcttgctgggtaattattagcataaatatcaggttcttagaggtctttaagagaatactttagagctaccaaaattagcagcagtgatgtaatatcaccctgaaataccaggagcagaggtgccccagagtgcttgcacagctatgatcaggaaacttgacctgccccattggctacagcaacgggcataaggactaggaaggttccactagctggggaggtcttgggaaccctccgagccagaaagaagcattccagcatgattcctcagatgcaatgaggaaggtttacagaattttcacagggcaacagagatcaagtggtatgaaaaggtaggagttttaagctcaagtctcaaagataacctacctttacattctcagtcagaatttgacccagaaagaggaagtttcttcaggaacagaccgtacgttgatgaagtagaagtcatttcagtaaaaacggagtacagaacttggtcataatatcttgcattttatagatttattaaagattagtttcaagtttcacattcgctattcagttgtaaaccgaatggatgggaggggagaaatnccagctctccacacaggtatgctcctcnctttctgagagagaaggcatgggattttccagcttaaattccntggtta

SEQ ID NO: 12813 - DNA, 913 bp, Homo sapiens
ttaaagaaaagcaaatgcagtcccagtcctctgaatgggtcagccccttagatggaggaggtgggacgtttgggcttgggggctcggcaaggcaagcaagacacaccagagctcttccctcgatgccagccattcatcgacagtcagcatgtcatccacaagtatttcctgccccgagcctatgctgtcgccatcccactggctgcaggcctcctgctgctcctgtttgtgggactgttcatctcctacgtgatgctgaagagcaagagagtgaccaagaaggctcagtgaaggtcccgcagatcgacggctgccagccccttctctgcttcccctccagcacagggaccaagtgggggagcctgcagaacctgtccaggcacagtggctcctcaagcctgcctgtcctgcagagtccccatggcatggagcttacacctgactgactggagccccctccccgactcccacttccagaagctaggagggagggatacctggaagactccggtcacctccttcttgctcagggcctaaaagatgctggtcctcccaacctcactctcagactccctgccaccttttcccctgggttctgccgtcttgcctcacttcccctcctgtcacatgctgacgttggacttagcaggttctaaggccacatgtgtgacctctctgacttctcttcctccaccaaggcagctttccttaccctgacacagccccagaccccacaaagccttctggacctggaaagcctggggaaggactgacagaccccagggaccagccctggggctcagggcagccaccccgggccgctgaccgactgacctctcctcacggaggcccagccccaaagccccagggctggcccgtttgggacagctgaccaataaacactgatggtgtg

SEQ ID NO: 12814 - DNA, 5670 bp, Homo sapiens
ttttttttgtctataaacaagattttaatatctgtataaatagaccacagaattaccaaaactgcaaagacagagtgtggaaaacaggtttgaaacccgtgcatagagccctctgctgggctgccgcctctcccctggccggcagtgctgtggggaatgctggaaaggaaggaaagttcctctagggggcgtctgcagcgtgaggacctgagcacagaagactcggctccccatgcctgctgttgacctcttcatctagtataaaaataacgtcagtgggtggtggctggagtcgtggctactccgggaggggggtgacaggaggtgccctccattgtataggccctagcagccagcagcacccctgccagccagggtgcagtgtaggctggtggagaggggtaggtgggcagaacagcactgccctatctttgcatatgccggacaaacgcctgcaccaactggatcagaggctcctgactctcagggctggctttggagagagaggtggacttgccctgccggcgaggggaggacaccagtggcaggggagctgggggctccccaggcggaagtagcgcgagaggctggacagcagcgtgctcaactcagagctgagctcctgcttcatccgctgtttgtcccgggggtgcacagccgggtccctaaggtaccgcatcgcctgagagatgagcaggtagaagcagttttccatggtaaacatcaggagggactttaacgtcctggtcccttctgcctgtgtgctgagccccactgcctgggtgaggggctcctttttcttgtccagctctccaagcatgttgagggccacattcactgtggccagaagggtcccgaaggagggggccacttcggagtcaaaggtgggagtggtaaagctcagggcaaacaggaagttgtattcagcaaggtccagggactgatccagcagaatctggcagacatctggggtgaagtggcgcagggctgccagcgtcttgctgaggatcttgagaaggccatactggactgtgtgcaaggcctgctgctctgatgcctctgtgtcagcagcgggctgctttgaggaggagggggcagcagaagcagcagacggtggcctctggactcgctgggcaacagctgaggggaggccatccccatttttgttctgtaagtaatgctgcagcatctttcgactgtgcaggagagaggtacatgcctggcacaagtaaccccaggttgacctggatatcacgcatgagctgaggcaggtggaagtgccactccttcatgaagttagagagctgcagaataaaacccacggtgtggtccgcctcctccaggcaggccagactctgcactgtcctcactgcgttgaggcactgtaaggtccgctcctggtggacacccacgaagtccagggcctcaggcaggaagttgtagcgcagagttttgagcagctgctcccatcagggacatggacaggcggtagactcctggccaagagggggcatcccagggacttccgagaggcactaggtgtctgtgctgtgccgttggtgctcagctggtacacactcagaaggggcaaacaaatgctctgggtgatgccagctccagccactgctgtggctccctgctgagtgcgagcccagggtgaggagcagatgcaatgtggcctcagtgaaatgcaggttctgcttcatgcgaaggctcacctctagagtggtgaggagggtgggtaggatggggagcctgcgggttacctgcagccaggagtcaccatcctcgtctacctcacacagctccttggccaggtgcaggcccaggacacacaccccatcacgctggtccctgtgccgggaccgagaacagtcgtcagtctccatgctgtccttgtcctctgtggcactgcctaatgccagactgtggcgggtctggtcgaagagtgcaatcacttcctcttggagggtctcacagacattcagcaccagctgggagtactgggggatgtcacttactttcatctccttcatttgcaacactgtgatgaatgctgagaacaccttggccttggtcttctccatgagttgctggtcggcctgcagcactccctccaggatctccgtcaagggtccaaggatttcatccacagaacctaactctctcttccactgccggaggaggataagcagcagagtgcacttcatggagccaaggcgaaggcagttcactgaggctggaactaggagtaatgctttggttccatcaagcacgtcaagaaagagctggcgacgcaccacagagtcagtcaggtgcattatatctgcatgagtggtggcaatgatgagaagcatcctccaggcggacaccagcatctggtactctaacaaggaggtgcagctgctgccttctgtttcggccacgtgaactgccaatgacttgacataccctgaccagtaggcaaagcgtttctcgatggaaaatttcttcagtgtatcctttaatgactggtctaatgaaccctttactacatagtatatctccaagcaaattatcttcatgattagggcacaggtttccaggatgctgggctctgatgtttcagagggaggagaaagggttccaaacagcggactggttaaattttcccaaaacttgggtttggttcggaggaccagcatggcactgtccctccgatcctgccacagagcatgcaaaaaggcaatggcggcacgatgcagcaggggtgggcaccagtatcgatcttgctgttgggaatcaatcagctccagcactgcatggagacagctccacatcccaaggctgaattcctttgagccatcactgccatccttaacttccaggttcagaaacagttcgatgaggcctggctgggtctctactgcaacagtgaggaactctagaatcatgactttgatgcgcatgtcctcaattttgctctgcaatcgggtcaggaaggcatcacgaatggcagccgcatcattgcccagacaagcatacactgacattggggccaccgtggccagacgtttcagcagctgaatggcaagacgtggcaaagcagggtcatgtttgtggtagatgtatttggctagaacagcaatgaggttgtttccatgagcaccatgttgtgagagagcctgttccaggggggacaccacattagaaggaggtttcagccgaataacattgttggtgacggagaatgccagtttcactgtcttgatcagcagctggccctgcccctggccctctgccccatcacttcgaggctgagcagccatcaccatgtcaatggtgtccacgccaatgcccatgatattgataactgtctgtcctgcttctgtgtatgccaggctgcagatgcagagaaactgcaggctgggagtatgactgctgtgcaggtctgtctcgtggcacaggttcagtatcgcatgaatcagctccaagatcaggcaaccaatctgttccctcactccatgagagttgtagcgccacttatggtagctgggaagcatctccttcagcacaaacattacacagggtacaagtccttggctctgggtactaccaagttgccccttgacaagggtggtgatcaagcgcagaaaggcaatagtaaccccatactcgccctgaggctgttcactgttcatcaagaggtttccgtaccctccagcattcatcccttccgcactaatcatctgactcaggctggagacaggatgggccacaaatggtaaaaaacctgtgtgacgaagatcagtccagacctttgctggattgcgggcagccaaaacagttaagcagttgacacaagaagcaatgacatccacaggtggggagatcactgtcgttaaccgctgcagcagcatgtagatgcgagatgtgatgggcaggagacagtctgctatcgacaggtctgtactgatgaccttatggacgagatcaatgatgggtttgactcgctggcagtgctgaatcacatctgcagttgaaacaacatgaagcaacatttcaatctcgcaggtaaagagggtccagctgctataggagtattcccagcgtaccaggtatgccctatcatccaacattacttggcccacagtgccttgaggtatgcgaaggttggtttgacccccaaggggataaaggagtttgggtgtttgtctccgccaaagagttccatcttcatgggagatcacatcatgaggcttgtgtttataaagttcattgtagaaagacatcttatccaagaagctatacacctttttggctgtggacttccctgataccagggctcggagcagttgcaggagtggggagagaaggtggggaaacattccacacacactgtccagaatgatcccaaggccagaagttggctctgttccccagaacagttccggaagagaagggtcggccaatacttcacatgctgtatcaattatatcctgctgattgcccagggtgtgcagctccaacgaggtcagaacgaaagagagcagtccatagacacacatgcatgcagtgctggtggtgcaatcatttcccccactggcaagggactggagcaatcgggtcaagtactgaaacacattcagctggatggctgtgccacctatcttccggaccacactgcttgtctcttctgggttcagagtgtgacggaggagagcccaggccaaaagcactggggcatgatgtggaatgtccccaaaggtcaacattaaacagtccatatcctgacaaataagcccatcctgcgcaaactgatgcagttctcttctgtcatccaaagcacacttatgcaaggactcgatatccatgccctccaccaggatgagggcactgaagtagccaatccgatctacaaaaggatccatagtctcatccaccaggtgcctattggtctgcctactaccaaatccttgctctttaaacatcttggttaatacaagtaagtcactgggtgccatctcaaagtatgcataataaaggaaaataatttctagcagcatggactgttcccgaaggcactgaacaaaccagcgagacacttggcgctctgtcatgagatttccatgtgtctcccaagttggtgcttcagttttataaagctcttcgaactgctgtctgtattttgaaactagttccttctccaatttatcaacacagtctgcatattcaaccctataggggtgtctttcatcttggaagtaagtgagaaggtgtaagacacaacgaagaatacaggttctttcttcataataataatctgcaatcttcaggattaaggcctggctctgcctctcatcttgcagtactgtctttactgagtcccgagtacccctgtagtcctcttgcaggtaacactggagtaactgcacactctgttcttcatcaagacccaaaaacttgctgattcttaaacccagttccttcaatggtgaagctacatctttattagctttcactttttcagctgaacttggactgggaggtttgtagtaagaaagcccctctaacaatcgccgccaatgtttattcagttctgcctcaatctgactcagctctctcagagctgaccttccaagcagaatagtccacagttctctactgctcctcacacacggcccgccggcg

SEQ ID NO: 12815 - DNA, 1684 bp, Homo sapiens
gctgccaggtcatagtaatgggagctaccaatcgtcctcaggaccttgactcggctataatgagaagaatgcctacaagatttcatatcaaccagcctgctttaaaacagagagaagcaatcctgaaactcatcttgaaaaatgaaaatgtggataggcatgtagacctgctagaagttgcccaggaaactgatgggttttcaggaagtgacctaaaagagatgtgtcgagatgctgccctcctgtgtgttagagaatatgttaattctacatcagaagaaagccatgacgaagatgaaattcggcctgttcaacagcaggacctgcatcgggcaattgaaaagatgaagaaatcaaaggatgcagcatttcagaatgttttaacacatgtttgtttagattaagagtaaagatcatttgtacagttcagtgatctagtttggtgtgtcctcttatcagttagtggaaatagaacggaaagagtgctctttaaacaatgagggagctcagtgtttatggttttatactctgaattctaagttattgagatatagttgttacataggtggtattactgttggtcaaaaatcatgaggaggaacagttgaatccagcctgaacgtgggtgcttgtgtttgaccttttcagccatatattgtacagccttatagaatctaagctggtcttaaagtcataaatgattcattgggtcattagtgagaaacggggatgtggttaggtgctggttcctagacatgtgagtatgcgtttgtgtgtgtgcgtgtatgtatgtgtatattaaatgtatatatccacacattttatattgacattctgtagatatgtttgaatatagaaactttttttaccccaactactgaatccaggagtaccaaataatatatagtaaaactaagatttaaggttgtgtcaaaaaggtacagtgattcagccatttccatttgtcatttgtttcaaccttttttaagttgagtgtttttatttctgcagttattagttggatcctccacatcttgcatatatacatgggctcaattattatgtttgtcaggataatcaaatgaaaatactagttcagtgatcagcattgaatggttgttaggcagccatgtgctcaacactgatttcacctcttgagtataaactttttaaatttaaattggtttacatgaaagtggattaaaaggcctttcaaaagaatgggtttgaaaaacctcagtaccctttaatacatgtacatttctttccttttttcatttaatgtaacatgtctgttgtaactatgtttcttaaatattattttaaggttatgtgttctttaattatggtcaaatataatttggtcaccaaaaatgaaataatagtttaaaacaagtagctgttactaagtgtgctaaaaatactcattttataattaattttagttttcttagtatattattataaattgtgccctaagtcaggtacaaatgtacacatcaaaatgccccatattgtatctatctgtaggtcgcttaatgtgaattatatgtgaatttttttcaaaattttactaaccagaattctgttataggcacctaaccacgcagcatgaggaaaacggcacaacacaatcttgaggtgccttctgaatcatcagattaaattatgagttcataaaaaa

SEQ ID NO: 12816 - DNA, 689 bp, Homo sapiens
tttttttttttttttttttaatcggtgttttgacagtttattttgaaggtcattttaaaaacaaagttaaagacaatctgagaaaaaaattgcacagaatacactcattaaataggtatggtttatggtgattaaatcaaaataagggaaatatgttatcttctgcaattccagaaataggttctgttgtccggaaggttcttatacatccaaaaagagggaatgatcatggcaattaaagctgcctcttaatcatgtaaatctacagtagcaactaaatttttctgttcttcccattaagtcagtttcgatcttcaaactgtgccttgttttttaaaagataagatgctagaaattcaatgggatttggtggtctttcctttgcaagcacagcaagtccctgtaataagataggcacaactgtctgatccaggtaggcacgagttgggcaaagactggagatctaccttctgctttgatgacttttctgcattaatcttctcattttctactattctctcaacgttggtctgtgagaccgtactcagagtgaggattttctgcaacctgcgtttgtccctccagcatctgctctggctccatggcggaccctgcaagtcacagtccccggataccagtccgcgcccaagccgttcgttcttaagagccctgcaccgcgccaccagctc

SEQ ID NO: 12817 - DNA, 1660 bp, Homo sapiens
ggaagcgctgcaaggacaaccggctggggtccttgcgcgccgcggctcagggaggagcaccgactgcgccgcaccctgagagatggttggtgccatgtggaaggtgattgtttcgctggtcctgttgatgcctggcccctgtgatgggctgtttcgctccctatacagaagtgtttccatgccacctaagggagactcaggacagccattatttctcaccccttacattgaagctgggaagatccaaaaaggaagagaattgagtttggtcggccctttcccaggactgaacatgaagagttatgccggcttcctcaccgtgaataagacttacaacagcaacctcttcttctggttcttcccagctcagatacagccagaagatgccccagtagttctctggctacagggtgggccgggaggttcatccatgtttggactctttgtgggaacatgggccttatgttgtcacaagtaacatgaccttgcgtgacagagacttcccctgggaccacaacgctctccatgctttacattgacaatccagtggggcacaggcttcagttttactgatgatacccacggatatgcagtcaatgaggacgatgtagcacgggatttatacagtgcactaattcagtttttccagatatttcctgaatataaaaataatgacttttatgtcactggggagtcttatgcagggaaatatgtgccagccattgcacacctcatccattccctcaaccctgtgagagaggtgaagatcaacctgaacggaattgctattggagatggatattctgatcccgaatcaattatagggggctatgcagaattcctgtaccaaattggcttgttggatgagaagcaaaaaaagtacttccagaagcagtgccatgaatgcatagaacacatcaggaagcagaactggtttgaggcctttgaaatactggataaactactagatggcgacttaacaagtgatccttcttacttccagaatgttacaggatgtagtaattactataactttttgcggtgcacggaacctgaggatcagctttactatgtgaaatttttgtcactcccagaggtgagacaagccatccacgtggggaatcagacttttaatgatggaactatagttgaaaagtacttgcgagaagatacagtacagtcagttaagccatggttaactgaaatcatgaataattataaggttctgatctacaatggccaactggacatcatcgtggcagctgccctgacagagcgctccttgatgggcatggactggaaaggatcccaggaatacaagaaggcagaaaaaaaagtttggaagatctttaaatctgacagtgaagtggctggttacatccggcaagtgggtgacttccatcaggtaattattcgaggtggaggacatattttaccctatgaccagcctctgagagcttttgacatgattaatcgattcatttatggaaaaggatgggatccttatgttggataaactaccttcccaaaagagaacatcagaggttttcattgctgaaaagaaaatcgtaaaaacagaaaatgtcataggaataaaaaaattatcttttcatatctgcaagatttttttcatgcaataaaaattatccttgaaaaaaaa

SEQ ID NO: 12818 - DNA, 457 bp, Homo sapiens
gcaacctcacctccttcggtgccgaccaggtgatggatctcggccgcgacgccacccgccgcttcttcaactggttttactggagcatcaacctgggtgctgtgctgtcgctgctggtggtggcgtttattcagcagaacatcagcttcctgctgggctacagcatccctgtgggctgtgtgggcctggcatttttcatcttcctctttgccacccccgtcttcatcaccaagcccccgatgggcaagccaagtgtcctctatgcttaagctcgctctccaaaactgctgcccccagctgtggcaacgacactcggccagagaccgtcaatgtgcccgcgtgctggccgacgagaggtctccccagccaggggcttccccgcaagaggacatcgccaacttccaggtgctggtgaagatcttgcccgtcatggtgaccctggtgccctactggatgg

SEQ ID NO: 12819 - DNA, 1092 bp, Homo sapiens
gatagtttaagagaattataaatcaagttgttctgtctactagagtcagaaattctgtgctagaatgggacttctaaaattaggtggtcctgtcactttctagagaaagacccaaattcataggtttaagtggcttgtctgacatacacatacagccagttagtaacagaattcagaatagaatagagttcttttttttctgtcagtccgttgttctacttctctttccttttcttcatggttgagcagcttttggcaaaatgtgttccatatagcagtagttccaagagatgttaatagatgtaagaaaaaaagtgtgtgtgtgttgggggtgggggattgcatggtcaattaaaatgaaggaatgctgagtttgtttccttactgtaggacttctaagagttttgaacatgctattacacattgtgaatttataaaaggggacaaacactgtttgaccttagactgcactccccttctttattcctcagagcatctcaaaggactacagggtcctttgagaaacatggcccttgatcaagtttacaactctttgagaagacatccctaatggaaatactgaatggcagatctattactgtggtaccatgtagtgtgtaataaatcttgaagtccagaaagcaagtatatttgctgtttagagctatacttaaggtatagagattcttttccacctgtggtgtgtaaaatcagtattgtgtttaattttgcaggtttttcaaggatcaactaatgtgcaaatacagtggtgatatattgatattacattttaataatgcttttgtatggcactttatagttttcagacaccttttgtaacagccctgtgagacagacaatattatccttattgtacagatgggggggctctggaggctctgaaaagtttttggtgatattcccctaagtttataccacaaaatgatggagccagaatttagttgcagaacttctgactccaagtccagagttctttactaggacatctggtttcttactagctttttgctagctttttattttacagtgaaaagtatgggaaggcaaatcctgataatttttgggcttatt

SEQ ID NO: 12820 - DNA, 742 bp, Homo sapiens
  misc_feature (1)...(742): n = a,t,c or g
ccttggagagcttcagcttcctcaatgaagacgaagatgaagacaatgatgttcctggggacaggcctccaagcagcccggaggctggggctgaggacagcatagactcacccagtgcccgccccctcagcacggggtgtccagctctggatgctgccttggtccggcacctgtaccactgcagtcgcctcctgctgaaactgggcacatttgggcccctgcgctgccaggaggcatgggcccctggagcggctgctgcgggaagcccgagtactggaggcagtatgcgagttcagcaggcggtgggagatcccggccagctctgcccaggaagtggtgcagttctcggcctctcggcctggcttcctgaccttcctgggaccagtgcacagagagactcagctgcttcctctgcccggtggagcgggtgcttctcaccttctgcaaccagtatggtgcccgcctctccctgcgccagccaggcttggctgaggctgtgtgtgtgaagttcctggaggatgccctggggcagaagctgcccagaaggccccagccagggcctggagagcagctcacagtcttccagttctggagttttgtggaaaccttggacagccccaccatgggaggcctacgtgactganaacgcntgaagaagngcannggtgcggatctgaantcngangnnaagngntttttnnaaaagnncccagnaatnggncccnnnnggntgttntcaaag

SEQ ID NO: 12821 - DNA, 1552 bp, Homo sapiens
tttttttttttttttttcttctttataaacacaagtacatgaggtttatttgaaattccaatttattacaagttcaccctttaatggggcccttcctctttgaagacaataaaaaaaaaaaaacaacaacaaacaattcaggtgtcactgaagtgggaacacaggattctcactatgaacaagaacagactggatgtaggaggcaggggaagctggcggtggtggggttatgaagctgtgatgtcagtgccaactccatgcctatagaagggacggtaaactacccagcagccctggagcaatcctcgtcgtccttgggcaggaggacggaggaagcagaggccacattccgcagtttaaaattaagaggcttgattctcatgttctaggagcttgcagtccccttggtggactttaaataggtacagaagagcttgggtgctcaaaatttccaaattcaaaggtgataaaaaagaaaaaccctgttttgtacttttatcaaaatccatcataaaagggaaagaagactacaaagttttgcctaaatataacaactagagctagatttgttgtgggggaaggggctctcagagcttctctgccgctctctcctcccaccccccaccgacactgaccactggaatcttcaggttcttgaggagttccaaggctgaggtcagaacgggcatgggaggcagcagacacagcactgccctgctccccctccaatgttgctgcttgcctcaatgagcctccaacccaactgctctagaggagagtggatgggctgaaggagaagccagggaagttagagcaaacacattatcatagaaactgtactgtacatgtgctaaagcaagatgtcaggagtatcttacaagatgttctttatacaatatcactgctgaaacaagcaacttttaataactagaaaagtcaatttaaaaaaaaaattaaacatttaaattcttcctgcttttcttctgctcccctaagagcttgactggtatgtgggtgggctgggctccaacacccctctggccagatccatcaaagtaaaggttatatgcatgattataagcaggactccagtctctaagtgaagtgccttagttttgtttttttgttttttgtggtttttttattttttgggggggtgggaggagctgtcacaaagaaggggagattcaggaatggctccaggacacgtccctttactctgccaagatcaactcaaaagaccacaactgtttcatgatgctggtgaatacacaattctgtatggcactcactgatactgtcacctgagaggaagacgggggaagagacagagtatgggcttaaagaaacaagactgtataataaatacagattaaaaaagaaaaatcgccaccatctcccctgttggcctgattaccccgatcctgctatgtaacacagcaatccctcccctggagaccagaggggcttggcactgtggtggaagccagagcgagcaggcccttaggaaagaaggcaggaacaggaactggcttcaccagaaaagctagac

SEQ ID NO: 12822 - DNA, 958 bp, Homo sapiens
gatcctctgaaagtgggcattactattcttatgccagaaatatcacaagtacagactcttcatatcagatgtaccaccagtctgaggctctggcattagcatcctcccagagtcatttactagggagagatagtcccagtgcagtttttgaacaggatttggaaaataaggaaatgtcaaaagaatggtttttatttaatgacagtagagtgacatttacttcatttcagtcagtccagaaaattacgagcaggtttccaaaggacacagcttatgtgcttttgtataaaaaacagcatagtactaatggtttaagtggtaataacccaaccagtggactctggataaatggagacccacctctacagaaagaacttatggatgctataacaaaagacaataaactatatttacaggaacaagagttgaatgctcgagcccgggccctccaagctggcatctgcttcatgttcatttcggcccaatggatttgatgacaacgacccaccaggaagctgtggaccaactggtggagggggtggaggaggatttaatacagttggcagactcgtattttgatcctgagagagtccaaaatgcactggtcacgaaacgtctaatactatgactgttaaaatgtcagactataacaaatatctatcttttatttttcattagacccttatacttcaagagaacacactcagtgcttgtttttattttcttgacacatttattaacaaaatgcatcatggaaaaaaaatctacctcttaaaattccatttgcttttatggttagacatgcttgaccaaaaatgttcagaagaaaatatgtacctggtccctaattaagctgcgttaaatttggtagaagcatttaaatggtctatcttcagttttactgaacaaaaaatgtaatttatttagcattctttataaaagaattgatgctagaggt

SEQ ID NO: 12823 - DNA, 1303 bp, Homo sapiens
  misc_feature (1)...(1303): n = a,t,c or g
acacaggtacagcacataggccaggagcagggggtgactggggtggctcggcttgggaggcctgggaccccacagtgcacgctgtcccctgatgatgtgggagaggaacatgggctcaggacagcgggtgtcagcttgcctgacccccatgtcgcctctgtaggtagaagaagtatgtcttcctggaccccctggctggtgctgtaacaaagacccatgtgatgctgggggcagagacagaggagaagctgtttgatgcccccttgtccatcagcaagagagagcagctggaacagcagggtcccagagaactacttctatgtgccagacctgggccagggtgcctgagattgatgttccgtcctacctgcctgacctgcccggcattgccaacgacctcatgtacagtgccgacctgggccccggcattgccccctctgcccctggaccattccagaactgcccaccttccacactgaggtagccgagcctctcaagacctacaagatggggtactaacaccacccccaccgcccccaccaccacccccagctcctgaggtgctggccagtgcacccccactcccaccctcaaccgcggcccctgtaggccaaggcgccaggcaggacgacagcagcagcagcacgtctccttcagtccagggagctcccagggaagtggtcgacccctcgggtggctgggccactctgctagagtccatccgccaagctgggggcatcagcaaggccaaggttgcgcagcatgaaggagcgaaagctggagaagaagaagcagaaggagcaggagcaagtgagagccacgagccaaggtggggacttgatgtcggatctcttcaacaagctggtcatgaggcgcaagggcatctctgggaaaggacctggggctggtgaggggcccggaggagcctttgcccgcgtgtcagactccatccctcctctgccgccaccgcagcagccacaggcagaggaggacgaggacgactgggaatcgtagggggctccatgacaccttcccccccagacccagacttgggctgttgctctgacatggacacagccaggacaagctgctcagacctgcttccctgggtgggggtgatggaaccagcactgtgcggagaccagcttcaaggagcggaaggctggcctgaggccacacagctggggcggnggacttgtctgcctgtacttcatggggggacggctccacccagcctgcgccactgtgttcttaagaggcttccagagaaaacggcacaccaatcaataaagaactgagcaga

SEQ ID NO: 12824 - DNA, 1689 bp, Homo sapiens
  misc_feature (1)...(1689): n = a,t,c or g
ggggctaccgcccaggatcaatcagaaagttatatgcaaaatttcggggtcccaacaaggagagaacaatatgtcaaccatttgcatggggtcgatggatgagaaacatgagcgtanaagnagttacattttgcagaaaaatagcggaggcacacccagagtagaagagcagccagcaagctgccatcctgatcaatttgtgatgcaaggttagggagtatgagcaccgcatgggtccatgctagggagatgtgcaccaggcttagctaagaaacttaaagcagtattttaccaactcttgtcttagggagcataaagtttggatgtccctttatttcagcagtgtgaaggtaaatggaagggtgagggtttgacttggtactgattggtcaagaatcctgctggataaagaaaaggaattttagaagtgaccagagggacagtccagccaaactattatttgataaggaacccaaggccctgggaggcaacaggctagcccttagtttcatggctagctgcagagcagattaggagccaacgttgtttgcacatgtcccatcacacctgagatgtcagacatggggaagttcgtgctattattcagttgcctctctggaccatggcaagatttcctcattcatcaaacagactccaggccctgacaaagcagttggatttggcatgtgtgatgaaaacaattagccatccatgtacaacattatgcttactgcatcccatggaaacttaattccctcctagcacatatttgcatactgaaaggtccgaaaagggcatccacggcagcttgagccccttagcaccatgtaaggagcacagcatccaaacggcttcttgagaaccattggggaatgtctttctttttcgcatccaattgtttagtgtctatttattcttgggtggccagttttgaaacctaaaaagggacaataaagcaaaaagtatcagtaaggataggtggctgagacccactgccctgagctactactagtgtgggctgtgcctgtgggtctctagaaccatctgcattggacgtgaagccacagcaggtggctggactgctggcctgttcctaatgagctacgctgggctttgaggtagaggttggggtttatgaacccccaactctggcttaaagatcttgctgtggctctgttatgttctgaggccttgggattagcctcttcctcattacggagctgattttctagtctgtggatcagctatgcctttggacacttctcttttccattgtgccttttgaatgttgtcttctcactcagcatcagcacttcgatctaaatgcagactagggagttgggaggaggaaccaaagtgaaccatccttcatttattcagtcattcgttcatctgtcaaacacgtatttggacatcaaggttgcagagatgaacaatgcatggatttcatctttgaggagttcaaaacctagtggagagaacacatggtacaatcgtaacacatgaaggacaagtaagtgctgcagtaaaggtactaataacatgttccttggaacagaggaagaaaaaccacgaaaccatggaaattagggaagcctttacagagggtgtgacaaaactcaatttgacattttcaagctatgtacaatgatgtgcaccttgcagatgctcaataaagtaattactgac

SEQ ID NO: 12825 - DNA, 3009 bp, Homo sapiens
  misc_feature (1)...(3009): n = a,t,c or g
ggccgcgtcgtgatcgactcggacacagaggacagcggcagcgacgagaaccctngatcaggagctcttgtccctggcaaagcgaaagcgcagtgactctgaggagaaggagccgcctgtgagtcagcctgcagcctcgtcagactcggagacgtctgacagtgacgatgagtggacatttgggagcaataaaaataagaagaaaggaaaagccagaaaaatagagaagaaaggaaccatgaagaaacaggccaacaaaactgcctcctcaggcagttcagacaaagacagttcagctgagagctcagccccctgaggaaggtgaagtgtcagactctgacagcaacagctcctcttccagttcagattcagactcttcctcagaagatgaagagttccatgatggctatggagaagacctcatgggagatgaggaagacagggcccgtctggaacagatgacagagaaagagagagagcaagaactgttcaatcgcatagagaagagggaggtgttgaaaagaagatttgaaatcaagaaaaaactaaaaacagccaaaaagaaagaaaagaaagaaaagaagaaaaagcaagaagaggagcaagaaaagaaaaaactgacacagattcaagaatctcaggtaacatcccacaacaaggaacggcgttccaagcgggatgagaaactagacaagaaatctcaagccatggaggagctaaaagcagagcgagaaaaacgaaagaacagaacagctgagctccttgccaaaaaacagccattaaaaaccagtgaggtctactctgatgatgaagaggaggaagaggatgacaaatccagtgaaaagtctgaccgctcatcacgaacatcatcgtctgatgaagaagaggagaaagaagagatccctcccaaatcccaaccagtttccttacctgaagaattgaatcgggttcgattatcacggcataagctagaacgctggtgtcacatgcccttctttgctaaaactgtcacaggatgttttgtgcggattggcatcggaaaccacaacagcaaaccagtttaccgggtcgctgagattacgggtgttgtggaaactgccaaagtttaccaactaggtggcaccagaacaaacaaagggctgcaactacggcatggcaatgaccaacgcgtgttccgtttagagtttgtctcaaaccaagaattcaccgaaagtgagtttatgaagtggaaagaagcgatgttctctgctggcatgcagttgcccactctagatgaaatcaataaaaaggaattatctattaaagaagctcttaattataaattcaatgatcaggacattgaagagattgtaaaagagaaagaaaggttcagaaaagctccacccaactacgctatgaagaagactcagctactgaaggaaaaggccatggctgaggacctgggggatcaggacaaggccaaacaaatccaagatcaactgaatgagctggaggaacgggcagaggccctggaccgccagcggaccaagaacatatccgctatcagttacatcaaccagcggaaccgggagtggaacattgtagagtctgagaaggcccttgtggctgaaagtcacaacatgaaaaaccaacagatggatccctttactcggcggcagtgcaagcctaccatcgtttctaattccagagacccagctgttcaagctgccatcttggcccagctgaatgcaaaatacggttctggagtgttaccagatgctccaaaggaaatgagcaagggtcaaggcaaagataaagatttgaattctaagtcagccagtgacctctcagaagatctgttcaaagtacacgattttgatgtgaagattgacttacaagttcccagctcagagtcaaaggctttagccatcacctccaaggctccgccagccaaggatggggctccaaggagatctctgaacttggaagactacaaaaaacgacgagggcttatttgagcacacccagcctgctgcttctgaccctgcatgccccatcgcagcgtcccacctttcctcctttcctttgatttagcctctttgggctggagcagctgttgaactgggaagagactctaaactgccagtcatctgtaatataaaccatttgctgtatagacctcctttgtctgcacaccatctccaccagcctcccctcccccagggccccacccagtgtgggcctgggctctcttgggctttatccatgtctttagatttgtgtttgccttttgtttttttaaccgcgcagttcattggccactctgcacgcattcagtattaccatggagctgggaatcttgctggagcccctggggcaatagcagcagcaccaggcggtctcctctacagactgccttggcccacccattgaacattcggcacgtgaccttgtggggggagcggggattgggcacctgcgatcctctttcctctcttcatctttctcttctgcccttctttttggaagaaggggtttcaaaaccagtttagtttccaaaaagtgtacatttgtggggggggggggtctaatttgagagcgagagtgtgtatgtgtgtgtgtgtaagtgtgtggatttttttatcatttttttaaaatgcagtactctttgtatcagtctgtcatgggtctatagctgtttcagatttttttcagctgtacttgagcatctgaaactgcaagaaagaaactcattaaatgtgattcttcttactaaacaggcctgactgctgtagctgtgtaacttccccattcccacctactcttcccatcctttcccaactttggagaaaactccccagtttagccccctgacctgcaggctgtgtcctgggcaggtgtgggagggaagcccatggccaggtaccagggagggcagtgaatgtcttgctcttcccatggggtacagcccacagcttcttggctgaacgtaggaacttcttttttcttcacccagtattaaccagcctc

SEQ ID NO: 12826 - DNA, 1451 bp, Homo sapiens
aaaaaactttgttttagaataagacgggaaatgaaaaaattttgtctatactaattacaagtaggcaaaagacagccactagataggggaactagaaaggaacagggaaaagtgaaatcagttaaatctgttgggccatcagctgaatttgttcataagggattttgtttctttagtcccatatgcattgctctctttatgtaatttctttaaaagtgaatttgaaattattttgaacttttcttccaggcatgttactaccagattcagcgtgagaagcttaactaggctgcataacagcttgaaaactggattatctactacagagtgttataacaccatctggagtcttcctgtagtggcaaaaaagaacagtgttgaaattggaaaggactttgtgttatttaggttgttagaatgagccttaccaataataagagccctgagcccagaaaaaaggactgtatagtttaaagggaggattgaaagggaggtaaaaaatcagattagaccagttcttggcctatgataagttccaaaaataccatttatctactatttgaaaaaagaagaggatatcccttcctacagtaaagggtatgtcagctacatgaagttgtaagaaaagcttccagtagagcttcttatattaaagaagttgatggatatttttgaatttctggtttgcctgaatccacctgcagttaccccgatccgtttgcaagaaccagatcgtacttgaaactatagtggccacactctgccttcctgagtcccttccagtcatgtgtgcatcatgtctctttgccaagggaggggagaaaggaacttttaaactgcagttttaactttttctaagctgtttcttgatgggagaggttctgtgcaaaactaccacattctgtccccaaaatgtggaatgcatccaaataggagtcttctgcctcttaacttaaaagaacataggaattttgtttttggtttctttatcatgctacagagagtgaatacactggaattcagacaccgactctgagctgctaggaacctcatttgtccatgtgcaaacgctgtattccaaggcctgtgaatggcagcctgaggaagttttgcatgcaggctgtgttttcgagcaggactaacaactgggaaataagcaaaaaactgcatcgatccccagcctggtgttgttcttccctatacttcacactgaactcaggatgggaagaaaaaggaaacaagctttggctttttccatctcaaaagtattgtggcacctcaacatttcagtgttttgctttttaaaaaatgccctattgtaagttgttggtttatactgtataagtaacactagtagctgttttggaataacataggtgctcttccctcatctcatccccctaacaccggtggtgaagccataccagagtggccctggatttggtggtaaa

SEQ ID NO: 12827 - DNA, 2214 bp, Homo sapiens
aaggtggtgtcagagggcaactggatgactcgcagtaccacagcactgggacagacagaagccacacctttcttttgggtttttgccaagcctcctccatctcccatcagtgctgtgggctggctgcaagcctcgaaacagttctcctggaagggaggtttttgctttacccccgccagcacttccgcacacaatcatagagaacctctctgctctctgctggcctacagcttgtctgtttctcaagcagaggcaggaagagctagtcttagcatttatattttaataggaagttgactcccagcatgtaaaagtgatccacgcagccggagtgtatgccgggagctaagtggtctatgggtgaacatatcccaccttgcttcctgagtccttggtcccaatcttctcatttgttcctctcgttttaaattttttccccccaactcttttgatgtaagagttcagtttgtcttcgggagtgggtctctgcaagggctctgggatgagtcttggcttccaagaggacaggctattaggttcttggacttttttctgtgctaccgctgctgcttggtggaagtaacaggacgtggattctgcctcataagtggcagtttcccttttctctctgacttgtcctaggccgatttctctatggcttccctgagaaaggtgaggcccaaaggagagaggccttcaaactgtcccaggtcctgcgcagttcagtgcgtatcttcttgcttccatgtgtcttttcccctgctgcctcactccccacccccacttgccaggtgtttgagccatttctacaccaaagcaaagtacggcctcaggagggagtaaaaagggtgccatctgtgtctggaggggcagctgtgttcatgccctgtgctactggacatttcacaattctggcaccttgcgattggtcagtcaacctcagaaagtaactatcttgaaggtttgaaaaacaaccaaagaaagggagtgaggactatggctgcatgtcctctgcttgcccggctgcagagcagacgatgtgcagccctctggtcagctggtccaggctggtccccgccggtccccttccagtccagccaccaagagtccacttgtcccgggcttccacctggctgacaggaagaatttctgagagctggatgtgcatgccctgtggacgaaggtacagctcgcctgcctgccccaatcccagccccgacaatcacatgcagctgactcggacactggccttgggaacaatgttcgagagaacacttgccccttgactgtaggagccagaaggggacccaggtgtggcatagctctctgtagacatttttacccaaacctgttggtaaagtgcccatctggtgctcaagagagcctgggggtctaacagggagcccggctgcctcacctggccacagcctccacaccagatctccacattgtcttgatccagaccagctctgtgatcagaaggaaattgggtccagtgtaggagcgagctggtcctgggcctggcaggcaagagtgtgggcatcctttcctggcctttctccactctccctcaagcctgtgctcaggttgccttgaatgtggactctggaagagccaggggcccagaatgccgggggaggcttctgggtggcactcatggaacaccgtccctctgccagccataggccctgcctccagtgtcagggaatggaggctgggctgcgagagtgttgctgccccctgtgtcgttcttctaatccaatgtagaaattgtacgtaatgtatttaaatcaacgcaaatgtatgaataacaaatacagttctgaccttttttgtccagtttctttgggggaaggaagacaaagaaggtaggaacggaattttgaaggcaaagaaacctgtgtttccatggaattgctgagacgtggctcctggggctatttctccctaataaaggatgatccaggtcctcatttccaaagtcccaatgctctgaaaaccaaaagtattttcataacccatttgaaaccaaacctgacctgaacttacactgataggaagctatgggtaattatgatgtgttccttttagtgtgattctttgttgcagaaatgtcaatatattttatgacatggttccctactagggattatacagtatttgctgactacttcctaagagccaaaaataaaaaatctgaattccaaaataaaa

SEQ ID NO: 12828 - DNA, 757 bp, Homo sapiens
gattggctgttgctaggaaccgtctcaaggccttatgggccctggttacggaagccgaggaaggctgagcgcgggctctcaaggaaagtagtcgcggaatctcagttagcggtggagaggcagtatgtccggttcaatggcgactgcggaagctagcggcagcgatgggaaagggcaggaagtcgagacctcagtcacctattaccggttggaggaggtggcaaagcgcaactccttgaaggaactgtggcttgtgatccatgggcgagtctacgatgtcacccgcttcctcaacgagcaccctggaggagaagaggttctgctggaacaagctggtgtagatgcaagtgaaagctttgaagatgtaggacactcttctgatgccagagaaatgctaaagcagtactacattggtgatatccatccgagtgaccttaaacctgaaagtggtagcaaggacccttcaaaaaatgatacatgcaaaagttgctgggcatattggattttacccatcataggcgctgttctcttaggtttcctgtaccgctactacacatcggaaagcaaatcctcctgaggaggccttgctgaagttagaaagtgcatccactttggggcgaaaactagagacttgcttgggggctgcagaagtgccctctcctcgaatcctgccagttgcattcttcccccttggagccaagacgatttggccagacatcacctcagatctgagaccagcgtcttccatctcctcaga

SEQ ID NO: 12829 - DNA, 1740 bp, Homo sapiens
gggaaagagccggtgaaggggcagaacaggcaggttccctcgacccaggaccccctgttcccaggctatggcccccagtgccctgtagacctggcaggccccccgtgcttgcaacccctatttgggggtctgggtggctactggagggccttgcagaggggcagagaaggcaggaccatgacatctagggcctctaaactttctccggggcgcaagttgacggctggcatcatcattgttggagatgagatccttaagggacacactcaggacaccaacaccttctttctgtgccggacactgcgctccctaggggtccaggtttgccgagtctcagttgtacctgatgaggtagccaccattgcagctgaggtcacttctttctccaaccgcttcacccatgtcctcacagcagggggcatcggccccactcatgatgatgtgacctttgaggcagtggcacaggcctttggagatgagctgaagccacaccccaagttgggaagcagccaccaaagccctagggagggggaaggctgggagaagctatcattgggtgccctcctctgcccgcctgcattatggcacagatccttgcactggtcaacctttcagattccctctggtctccgtccgaaacgtctacctcttcccaggcattccagagctgctgcgggcgggtgctggaggggatgaagggactattccaaaacccagctgttcagttccactcaaaggagctatatgtggctgctgatgaagcctccatcgcccccattctggctgaggcccaggcccactttggacgtaggcttggcctgggttcctaccctgactggggcagcaactactatcaggtgaagctgactctagactcagaggaagaaggacccctggaggaatgcttggcctacctgactgcccgtttgccccagggatcgctggtcccctacatgcccaacgctgtggagcaggccagtgaggctgtatacaaactcgctgaatcagggtcttctttggggaaaaagggtggcaggtgccctacagaccattgagacctccctggctcagtacagcctcacccagctctgtgtgggcttcaacgggggcaaagactgcactgccctcctgcacctcttccatgcagctgtgcagaggaaattacctgatgttccaaaccccctccagatcctgtatatccgcagcatctcccctttccctgagctggaacagtttctacaggacactatcaagaggtataatctgcagatgttggaagctgagggcagcatgaagcaggccctgggtgaactgcaggcacggcacccccagctggaggctgtccttatgggcacccgccggactgacccctactcctgtagcctctgccctttcagccccactgacccaggctggcccgcattcatgcgcatcaacccactgctggactggacctacagagacatctgggattttctgcgtcagctgtttgtcccatactgtatcctgtatgaccgaggatacacatcactggggagtcgggagaataccgtgcggaacccggccctgaagtgcctgagcccaggaggacaccccacataccgtccagcctatctactggagaacgaagaagaggagcggaactcccgcacatgacctcccaccctaggagggagggaaggacaccgtcctagggtataacctggcaataaaccgtgcctctcactgtgaaaaaaaaaa

SEQ ID NO: 12830 - DNA, 722 bp, Homo sapiens
cttgtcttgttcccgaagaagtagaagcatcgaaagcgttggagaggtgttaccggaacggcggcgacaagggtcgttcccgaactagagtggggcatacataatcttgctgctatgccttcgaagctgtagtctgaatcaacctaagttttaaacagaaggtgaacctctgagaaaatccagtatattttaaaagaagggatgtgggatcaaggaggacagccttggcagcagtggcccttgaaccagcaacaatggatgcagtcattccagcaccaacaggatccaagccagattgattgggctgcattggcccaagcttggattgcccaaagagaagcttcaggacagcaaagcatggtagaacaaccaccaggaatgatgccaaatggacaagatatgtctacaatggaatctggtccaaacaatcatgggaatttccaaggggattcaaacttcaacagaatgtggcaaccagaatggggaatgcatcagcaacccccacacccccctccagatcagccatggatgccaccaacaccaggcccaatggacattgttcctccttctgaagacagcaacagtcaggacagtggggaatttgcccctgacaacaggcatatatttaaccagaacaatcacaactttggtggaccacccgataattttgcagtggggccagtgaaccagtttgactatcagcatggggctgcttttgggtc

SEQ ID NO: 12831 - DNA, 1773 bp, Homo sapiens
ctggcctccaaaggcattcaggggatcatcaaagatgttggacaccttgtgttcaaatcttggttcaggtgcggcctgtgcagatcggctttttggtttggttgtcttagcctggataccagaggagaagatgtcatccatatcatcatcaaatatagactcatgaagtataatctctcaccttctttctctttcccctgcccaggccctaagttagggttcccatccatataacaaagacttctggtcaggtggcatttgctatctctgggattccctgcccatgaaagccacaaagagatttcttcttttacacaccctgaagcatattatggccccagcaaggctaactaaatcaaactgtggtttaaaaacaaaacaaaccaaccactgtgaaatatttatttttgttttgtagtattaagcatgattaaaccagtgcagaaaaataccaagtacattgggtgaacgatgagctagctgttctagtatttgctttttgtaatccagttaagaccatcagcatatacaacatcatcactaactcaacaatgtagctgcagggtaacatgtggataccctgtgtgctctactggcctccaaaggcattcaggggatcatcaaagatgttggacaccttgtgttcaaatcttggttcaggtgcggcctgtgcagatcggctttttggtttggttgtcttagcctggataccagtggagaagatgtcatccatatcatcatcaaatatagacttggcttccactttctttttggacttttcttttggttttacagttaagtcagcaaagatatcaatgttatcatcaaataaattagattccaatgttttctccttctctctggttttctgagagggtttaattgcttccgtagcaaatatatcatcctcaaaaatatcttgtgttgttaatatgacatcctgctgactactggattttgtctcattcttcttgactttctgatctgtaaagaggtcatcctcatcttccaggagaggaaagggatttgttttctttgctggttttggtttagcagactgaaagagatcatcatcactgctggcctcgcctagagcaggaaacatggggctctttgctttaccacccactggtgggttggcaggattctctgctatctttgccttgggttttgttctctccacggactgagatccagtgcccgtggaaaaaatgtccccagaatcaaaaaggtcagcctcccctctggaatgacccagagactttgcaaaggggcttgtgtccactccaggcacaggaccaccttcccaaggtgcagcggcagctgccagggcctcctcagtgctgtccttctccactggctgctctgagctgtggccgatggccatttggggaaatggcgccatcagcccactgtgcaatgggtcctctggggacgctcatgtcctcagtctcgctggactcctgagcagccagccgcctagctgcacgggtcctgcggtctacgcttccctctcatcttgacacggctcttgtttgcactgtgtaaggtgtctgcctgagctggaagatcaaaactcacaccggcctccccactcccgggaaggacaggcacactttccagaccgtggctccttctgtgttcagatgaaggaaaaagccaattctggcaaaacaggctttacttcagagatctgggaagccgctgtgggcagcaaggccgctgggttgatcgctaaatttgcttgtatcttcccgatccgagtggatggtc

SEQ ID NO: 12832 - DNA, 2657 bp, Homo sapiens
tacaggttgaacaatggcgatcaaaatatgggatgatatacagaaactcctccttaacttggtagatcatactgaagtggtcagagatttaacttttgctccagatggaagcttgatcctggtgtcagcttcaagagacaaaactctcagagtatgggacctgaaagatgatggaaacatgatgaaagtattgagggggcatcagaattgggtgtacagctgtgcattctctcctgactcttctatgctgtgttcagtcggagccagtaaagcagtggtggcagcaatattggtgtgattgaggttatgctggcaccactcgcacacaggcgcacaatggtgttagctgggcagaaagagtggcatctctggctaccgggctgggggcgacctttaccataggatgaagtaaccttgcattcggctgcaaggtgtactgtacgtacacaggtgctggtcgatgtccactttctgcttttctttctttctttttttcttttttaaagtaatttcccccacagtaaaatacactgactcctgagtaaattgattttccagttttatggaattgggagtctgacaagtgaaaccaatttaatgtaaagtatttggctttcaaatggtttctctgtgctattttttggaattctttcagattccagagatatcttacgtctttgattcaatttaaaatttgtacttattttcttttagaaataatgtattgtgtctgtgcagaaaaaaaaaaaaccaaaaaggattgctttactccaagaggagagattgtcttaggataaacctccaagctcacatttaatataacagactgaagtaaacattagaatcctgtttagagctattctgcacagttaactactggtctttagaatctaaaattgtatatgaacttattcttaaataattgaaccgttttatattcaaatgacttatgatcgtggttagtttgggaaaaataagatggttaaattttgatttattgaaatgtaattgtattattttcataaaatagcattttcattttgtaatgtggtttaacatccttgttgtttgccaaagaaatttcatttggctgtgaatattctatttgccttgcagtatctgtttctcttcctaggctcaagttggtgacccaagcctattgtaaacaagtgattatctcaaagggagatgccaatggagtaacaatttgttaaccttacgttttctgtctgtatatttttttaaaaatctggtagtttctcggaaaaaaaagagaagggggtttgtagtacttaaccctatttatttccgtatattttagttaattagtttttggaataaatggatttcacgtataagctttgtggttaaattgcattgccctttattttatgtttaggcttatttttaaattaacatttaacagaaacatttgaaatagaatttggcatgtctgccttaattaacttaaagactgattttaatctgactatgacactgagcatattctttaaattactcataatttataatgcttaatataatcttaattaaatttagcagttttagtataagatgtgccattttgtcctctgtatgtctgaatgaagctataacatttgcctttttattgcaggttttcctttggaatatggataaatacaccatgatacggaaactagaaggacatcaccatgatgtggtagcttgtgacttttctcctgatggagcattactggctactgcatcttatgatactcgagtatatatctgggatccacataatggagacattctgatggaatttgggcacctggtttcccccacctactccaatatttgctggaggagcaaatgaccggtgggtacgatctgtatcttttagccatgatggactgcatgttgcaagccttgctgatgataaaatggtgaggttctggagaattgatgaggattatccagtgcaagttgcaccctttgagcaatggtctttgctgtgccttctctactgatggcagtgttttagctgctgggacacatgacggaagtgtgtatttttgggccactccacggcaggtccctagccctggcaacatttatgtcgcatgtcaatccgaagagtgatgcccacccaagaagttcaggagctgccgattccttccaagcttttggagtttctctcgtatcgtatttagaagattctgccttccctagtagtagggactgacagaatacacttaacacaaacctcaagctttactgacttcaattatctgtttttaaagacgtagaagatttatttaatttgatatgttcttgtactgcattttgatcagttgagcttttaaaatattatttatagacaatagaagtatttctgaacatatcaaatataaatttttttaaagatctaactgtgaaaacatacatacctgtacatatttagatataagctgctatatgttgaatggacccttttgcttttctgatttttagttctgacatgtatatattgcttcagtagagccacaatatgtatctttgctgtaaagtgcaaggaaattttaaattctgggacactgagttagatggtaaatactgacttacgaaagttgaattgggtgaggcgggcaaatcacctgaggtcagcagtttga

SEQ ID NO: 12833 - DNA, 2246 bp, Homo sapiens
tttttcttcagactaccttttaataaactcaacttcccaatgttaaaaatcactgaatcaaaagatattttcaagcagccttttctcccagatatatattagatataaggaaatcgagtccaatttgaaatgaattttaaaacagcacacaaacatcacaagcccccagcgcacaatataaaatagttctctaaggaatataaacatttagtatattagaatgtgaaattacataggaaaataatctcttcaattagctacaatcacttgcgaaagattatttattgcacaatttatcagtgggtactaagaataacacagatcctattattctcaacctctaaattcagtacatagtaaaattcattttctcaaactaaggttctatacataatcggagtaaaccctctgttactgagttaggatagggaaaacaaattccttagagttcatgaaaccacttcacaaatcctagaaggcacacattatatttcctatcatagtaagtacatttaagtacttcatatttaaaaaagacaaagctgtacagaatacaaaaagtgtacatttcatccattaaacaaatttacaacttttacgattagttattacagtagaactgacctaacattcacatctaaataattatcacccagttcaatagagcgaacaaagagctgtgctcatttatttatttgataaggctaataacattttatattcacagtagatcagtaagtgtcttggagctcatattgtaaaataaaaaggtttgggccctattgagtcactgggctcattgttaaataactccttgaaaggtgaaggattctgggggataaaatcattggctatccctggaaagatccaaaactctgtaaggtaactctgttcacttttcagaaacattttaaaattaggtaatctgaattaaactcagcaagtctaatctaaaaggacaatttaaaatcttagagctggaaaagatttcagtggatcatctatcccaaggttttcaaaatatgttccatggaatactaagaatctatggaggagatacagggttctgcaaatttgacttgaatttaattaaaaaatttttttaaaaaaaacgactcccactatatgtgtgttactcaccaaattcaaacatgctggatatcaccaatgcattaatgtttttattcattgacttaatcacatttatagtatataaagtttatataataaggaaatttataataatatgaccttttaatatagtggggtaatagggtatgtgtgtatgccacacgtgtttaaaaggttctgtaagattttccttgaaaaagtttttgctgctgaaatagtgtgaaaaccacaaataaagtctcagtttctaaagtaagaacacataaacaagagtaagagactttctcaaggtcacacaaccaccaagtgcattgcccaggttgatatgatggaacccctggtactctgcttgcataaacctccatagggagtagttagctatttggtacttagctgtcccattatgaatgtcaatggattagtcttcagtatttttgggggcgaaatcaagctacccctggccagatgtttttccttgaaattgatttgaattttatttgctcgcctattaaaatcctactatccagaaattctgtcatcaataagtggcaacttaaattgtgtaccctggtttaggaaaatagtaatatttgcaacttatgaatgataagtcagaaaagttacatggaatgttaaattttaaaggagataggcccttgttttattacatgccgaaatgttaatgttagaaattttagttcataagcaaaaaaaatggttgaggtgcaactgaagatcacaattcccattattactatattgtttcaggaatatttttaatggaaagagtatttcaatggaagtacagtgaaacagtaggaatgccaaattatctttccattaaaatattctgaaacaatatagtaataatggaattgtgatcttcagttgcacctcaaccattttttttgcttatgaactaaaatttctaacattaacatttcggcatgtaataaaacaagggcctatctcctttaaaatttaacattccatgtaacttttctgacttatcattcataacgttgcaaatattactattttcctaaaccagggtacacaatttaagttgccacttattgatgacagaatttctggatagtaggattttaataggc

SEQ ID NO: 12834 - DNA, 754 bp, Homo sapiens
catgccaacctggcaaccagtttgaaaaaaaacacatgtaactgccaggctgatctcttgtcctggagatcctgggtgaatggtatctcctgccactgtcccaacctcagaccattgtccaaaagcatcttcagggactccacatccctctattccctgtcccagcagaggctgtgtcctctccactcaaagcctgaagcatgttggggtctcttcgtctctgtacatgcccatttcagagtccagtctggtgggagagggaacagagtgggaaagaaaactagggtaagcagaaacgatgaaaccttataagagtgagagtatcatgtacaagagtgagattatcatgtacaagagtgagattatcacgtacaagagatcccaggaatactgacttgatgaaaaagtcacatcagagcactcagtttggcagagcttttctgccgaatgtttactcacattcactgtccgagattctatactgggggtacacacgtcctctgccctaaggcaattttgagtccaagagacattttgaggcctaaaaatcataggaaactgcccctgagctcacacatatttccaatggtgtccccagtttcagggaatccatggattacctaagccagcccctccagttcggctaagaaactctagtctatatatcaagttttgtatcatatgtattgctctgaactcagaaatttcccttccatttatggattctatgaataaaatatcacatgtacaaaaa

SEQ ID NO: 12835 - DNA, 2598 bp, Homo sapiens
tgacggccgcctcccggtaccgggacattctggagtccgagaagtcaacggcgcggttgctgcggccgccgcgctccccggcccgagcgattggagaacggagcggtgtacagccccactacggaggaggacccgggccccgccagaggccaccggagcggcctcgctgcctactttttcatgggccggctcccattgctccggcgcgttctcaagggcttgcagctgttgctgtctctgctggccttcatctgtgaagaagttgtatcacaatgtactttatgtggaggactttatttttttgagtttgtaagctgcagtgcctttcttctgagtctccttatactgattgtgtattgcactccattttatgagagagttgataccacaaaagtaaaatcatcggatttttatattactttgggaacaggatgtgtgtttttgttggatccatcatttttgtttccacacatgacaggacttcagctgagattgctgcaattgtgtttggatttatagcaagttttatgttcctacttgactttatcactatgctgtatgaaaaacgacaggagtcccagctgagaaaacctgaaaataccagctagggctgaagccctcactgagccacttaatgcctaaagactctggggagcagatgttacctaaggtagtgaccctgcattgtggtgcctgagccctggcagaagctcttgtaaaatttgttaattgtttaaaccacttcttttggagagcaaggggaaggtcaagaaggcagttttatcaatattgtgtcagtcaccacaaagtaggccagataagttaaaaaaaatttttttttaaataataattgaaacttatctcaaatggagattttggtgggaggaggagaaaacaattgtttttaaatcacacagctcaacggttgataaatgattctgtcattctgttacaggtcattcttttactagggcttagcttccaaattatgctttatagctgtataaacatcgtgattatattcatctacttagaaattgttttatttttaaattaatttgcttagctgtttgttttgatgcttagattatgttctgttaatgggaatttaacatatttaagaaaccaatatttaaaatgttggtctaggtttttttccttaacatatattaccaggctttactgtatttcactcagccttaaatgttataatatttttggataacggttattaattctttgagaccttcgtatagcctataaaatgtatgggagatgttggtattttatgtgtataaaagcaacaatatcagcaacttcgtgtttatactgcaccttggttgttgatgtcaagtaaaaaaaagattgttttgtaacacataaaaaaatggaagaaactgataccacacctaaggaccaaagataagaaagactttttgcccaagacagtgaaagtaattataaaaacaagctttgacccacttacccaagtatctgaagagatgagttcatactatggatttagaaagtgggttcaattcccctgttggccatatgattatttttactaaaattaatacagctctgtgggtcttccttagtgttttctttgaagccaatctgttttttttaggacaccagcctttggtttttcatctgttcgagatgcctcttctctgtctccttatcagatagaaatggagtcatgtgctgctgcttcatctagccagaggttgcgctctggctctgacactttttgtcagttgtctttaggtggtcctgaatcttgggcccttttgattgtgaatactgtgtagcaggatcttgagagtccttgttcttacataggcattgctctagtttgtctttggcaaaaaaaaaaaaaaaaaaaaaaaagtaaatatccagggaaccctgcccagactaatactgttggtggcataagagaatcaagccattctcaagagataacttcataaccagaattgtctgttggctagcagctgtcacagataggcagggcacttgggatatgacctttctgtccaggtgattcacagactagacctttcttatcctcctcctaggagttttgacttggggactctagtgttaaggatgatgagcccgtgcattcaggtccttctgcactttgggtgggaagtctcccaggggtaggtttcctatttgaaacagtggaatcatgtttccagtgataaagtttaatgacctcatccttttttttttttctcatctgccatttgtgtgtcttagatgggttttaattgcatgaatgtggctaatgtggttctcagaaattggtcagtatggcccaacatagcttctgctctgtcttactgactcaatacctttaggatttgtatcagagtttggatactagtgttagtggtggtgtcaccactacttaattgggagataatgaaaccaatcatggatgctgtttttattgggcatgtcatctaagagaggagaaatagctgggttttgggtctaattatgaataaggactgattcagaaaacgagtttatggtaggtagactaaagtttcacatcagactgtaccattgtgatttaga

SEQ ID NO: 12836 - DNA, 809 bp, Homo sapiens
  misc_feature (1)...(809): n = a,t,c or g
agaaaaaaagaaaaattctaaaactttaagtgaaatttattatcccttcccacttattttctgtggttttgtgtgtatagagcatcttcctttgttacccaagtacctcgaatgggttggaaactggcggtagaaggttagagtagccaattgatatgtaaaccaagtgtcagatcagatgagatgaaagaggtggagtttaaagcaagtgagatatgataaacaatgatgaaagcaaaaatagggcagttgaaccagagtcagccagttggcataactgccaataaatgaggcagtgtagaataactaataatgattggaatcaaggaaaagagagcatagaggaatcagctaaattagtatgttttatccatagttacatgactaacaaatgattaaaaagaagttattctctagataattttttaaataaaagtactgttaatatataaactaagttattcattcactgtttttcttcacagtaagaatgacaaaaatctgtgttctttgtacttatcaagtgactcaaattttggccacttcactgtcactgatggcttatagaatgattctagcaggactcaagttattgaactatcaaatgggtttttaattgatattgaagtaagtaagttttgtagcttttggagtttttaaaaactacttcagtgattttgatttatattctttttgatagttcaggaagtgtattgttaaaaaaacataaggcatgggccggggcacagtgggctccacacctgttantcccagctctttggggagggccagggcgggtaggntcacct

SEQ ID NO: 12837 - DNA, 478 bp, Homo sapiens
  misc_feature (1)...(478): n = a,t,c or g
gaggaaagaagccaagagccatctctactctggggtagggcccttcagttttgcccctttgaaatttcaaattccagtttgtggacaaagtcctaactatctcacaatataggtccccaaccactgaccaaactccagtccaggcagccaccagctggcctggtcttgctgcttcctttagcggcttccaaggtccagggacagggggtctgggccaccaagaggctctgctaggctgtccctgcagccacagccaccccactggacccctgcctcccatctgagaggacagccctcttcctggagctgggatctgacacttgctgataccaacggcagataccaggtaacgagatgtgagcagaaacaacctgtgtcacacctgggcagaagctttaaaggccagtgctgcccttgttggggaacaagtntananangatccgtccacaacgcggagcgcccctgccgaccatgctg

SEQ ID NO: 12838 - DNA, 948 bp, Homo sapiens
ttttcaaaaaccagaatgaaattttattgtgtaaagtttatagaagtatgactagtattcctttgtacaaagtacacaacggttttaaatataactgagagaaatgtgagtcctatgacaacatctgatacacgctgaaccatttacagacacactaaaaatgttttaaaatatcttctttctccaaagagtccattgcgcatttcttagagtagagatggggacacattccaggcaaggtcacaatggcattttgttgccctcaatgctgattttcactgcgtgtgcagatctgctttttttccttatatctgtgaactttctcatctgtttatccagtcgactgatacccttcttggaggtcgcctgaaacctggatgactccatttccacattccatttgggcctgacaacatagtccttgtttgaaggcattgggacccttgcacgggcacagaatccaggatctccaggtctaagagccttctcctctcctgtcagcaccttttccaggtctcttctgggtgtctgaccaccagtgctgttcattcttcgtcgttgaggcatctgttctagatctctctgctccctttcttctcttgtcattcctttgtagtttgaggtaagaccaaatataggcctagaccactcattgattaatttccctgccatgtccttgttagaccttgactccttggggtgtttatagagatacatcactgctcgtccaatcccactatgcttcagggtctcctggctcacactaggcagctcttgcaggatcttcagcagctcctcccggatcttgagtgcaggcaaactcctatctggtagaggtgagagccattctttgatggcagacatcacaccactgtcaatgaatgtttctttaaggtcctgcttcttaaggtgcataactacagcaggcagtaaagttaattcttccac

SEQ ID NO: 12839 - DNA, 1059 bp, Homo sapiens
ggaagaattagagcaaagaaacatcctaaaacaaaagagtgaataagaggaacaagaagcaaaaatggaacttaaacgcagactcagcagaaagctcatcctgagacccacagtggcagagctacaagctcgaaggatcctgcgatttaacgagtatgtagaagtcacggattctcctgactatgaccgccgatcagacaagccctgggccaggttaacacctgcagacaaggcatcaataaggaaagaactaattgaatttaaaagcacagaaatggaagttcatgaagagagtcgacagtttacaaggtttcatcgtccataacgaagagtgagactatttggaaacagagactgatcatctttgggggaagccctgcttcctgaaaacctgatattgcactgggatttgaatgtgtgtgtttccgtttaacttgtggtgaaggaagtgtgtgactcagcttggctgggaagtgctcctcacctgtgtggcccagatggctccaacaagcaaaaggaaggatgcagtgactcttgctgcccagaatgcacagcgatggtaagagacaccgtggatattcttcatcagaagctttaatcaaagaagatgagcagaagacaatcactgggctccctgttaccagaaagccaaattttataatgcgggtgaaagaaaaatatagattaaaattgctgggcactgaaaaggggtgggagttggaaatccaggaaaggaaagagaaatatttccattatggttaatgaagaaaagagaaaattgaagccataaatgtattttttggaagtagttattccggtagctgagaacttattaagggatttaggaatttaacctcctgatgtggattcctcaaagacttgatcggagaatactcttgtttcaccattatgttggtacagtatagtaccattattttatgttgtgccagtgaatccagttgccagaaataagtctgaatgttttcatgccatctttttcttaaatgccaaggagcttctactgactcttaacaagccagccttacccaaattttgttg

SEQ ID NO: 12840 - DNA, 338 bp, Homo sapiens
  misc_feature (1)...(338): n = a,t,c or g
aagacgacttgcttttgtatcaggacgaggaggcgctgaacgactccattatttctggaacactgccacggaaatgcaagaaggagctcctggccgtgaagctaaggaaccggccaagcaaacaggaactagaagaccggaacattttccccagaaggactgatgaagaaagacaggagatccggcagcagatcgagatgaagctttccaaacggctgagccaaagacctgccgtggaagagctggagagaagaattatcttgaaccaaagganagcaggangaangangagaattcacgcanagnttgcaanaagcttantcagagnccctttgtgg

SEQ ID NO: 12841 - DNA, 1441 bp, Homo sapiens
  misc_feature (1)...(1441): n = a,t,c or g
ggttaccaatctgaagtgggaggggccgcggttttttttttttttttcacagccaattttcacactgttgtttcacattctcacagccctcagcacaggtcacgtcccagcccagctctgggactttggttcagggctcagagcctctggtctgggctgatcgaaaacctcctttgaccctgtggcagcaggcggaccttggctcttctcgtccttacccagagctcagggcagtgccccgtgcagtcgccccacttccacgaaggcctccacgcagcggtcaatgtcttcctcgctatgcactgctgagatctgtacccggatccggggccttgcccttggggaccacggggtagctgaacccgatgacaaagatgcctctcttcagcatgtcatccgccatgcgagaggccagccgggcatcacccagcatcacagggcagatggggtgactggctcccgagatagtgaagccagcagcttccatcttactacggaacctctgggtcttggcagccatagactggacaatggtgttactccccatcagcagatctagggccttggaggcgcagccaacgacagcaggtggcagactgttggagaagagtatggccgggcgcgcntccgcagcagggacaccaggggccaggccctgtcgtgtagccccctgatgctccacccagggcctttcctgcaggttggagttgatgatggtgacctggtccatcacacccagcagctcatttgtgccccgtcctgtgggccccaggaagccagtggcatggcattcatccatgaagaccagggcaccatatctagaggcgaggcagcagatctcctgcaggggtgcgatgtcgccatccatggaaaaggccccatcagtggccaccaggcgcagccgatgcttctgggcctcctgcagcttggcttctaggtcggccatgtccaggtggcgatagcggtacttgtgggccttgcacagccggatgccgtcgatgatggaggcatggttcagctcgtccgagaagagctgcgtcctctggggtcagcagggcctcaaagaggccggcgttggcgtcataacagctgggatagaggatggcatcctcccgctggtggaagcgggctatttttgcttctagattcttgtggatgctctgggttccacagataaagcggacagagctgaggccagctccaaactcctccagagcctgcagacctgcctggatcacctcagggtggctgctcaggcccaggtagttgttggcacagaagttaaggatctctccggagacgccgtccacgcggatgtgcggcccctgacgggacgtgatgacccgctcactcttccaagtgccacgtccgcagatgccttccagctccccctccagaatgccacgcagctgggccagcgctgactgtgcgcggcggccgc

SEQ ID NO: 12842 - DNA, 1896 bp, Homo sapiens
gcgctaccgcacccaggttcggcccgtagcgtctggcagcccggcgccatcttcatcgagcgccatggccgcagcctgcgggccgcggagcggtcgggctactgcttgctcctcggcttgcatttgtttctgctgaccgcgggccctgccctgggctggaacgaccctgacagaatgttgctgcgggatgtaaaagctcttaccctccactatgaccgctataccacctcccgcaggctggatcccatcccacagttgaaatgtgttggaggcacagctggttgtgattcttataccccaaaagtcatacagtgtcagaacaaaggctgggatgggtatgatgtacagtgggaatgtaagacggacttagatattgcatacaaatttggaaaaactgtggtgagctgtgaaggctatgagtcctctgaagaccagtatgtactaagaggttcttgtggcttggagtataatttagattatacagaacttggcctgcagaaactgaaggagtctgggaaagcagcacggctttgcctctttctctgattattattataagtggtcctcggcggattcctggtaacatgagtggattgattaccatcgtggtactccttgggatcgcctttgtagtctataagctgttcctgagtgacgggcagtattctcctccacccgtactctggagtatcctccattttcccaccgttaccaagagattcaccaactcagcaggacctcctcccccagggctttaagtctgagtttcacagggaccacagaatactgggccatgggtgcaacttctggttttgggcagtgcttttacagggacaacaaggatatgaaaattcaggaccagggttctggacaggcttgggaactggtggaatactaggatatttgtttggcagcaatagagcggcaacacccttctcagactcgtggtactacccgtcctatcctccctcctaccctggcacgtggaatagggcttactcaccccttcatggaggctcgggcagctattcggtatgttcaaactcagacacgaaaaccagaactgcatcaggatatggtggtaccaggagacgataaagtagaaagttggagtcaaacactggatgcagaaattttggatttttcatcactttctctttagaaaaaaagtactacctgttaacaattgggaaaaggggatattcaaaagttctgtggtgttatgtccagtgtagctttttgtattctattatttgaggctaaaagttgatgtgtgacaaaatacttatgtgttgtatgtcagtgtaacatgcagatgtatattgcagtttttgaaagtgatcattactgtggaatgctaaaaatacattaatttctaaaacctgtgatgccctaagaagcattaagaatgaaggtgttgtactaatagaaactaagtacagaaaatttcagttttaggtggttgtagctgatgagttattacctcatagagactataatattctaattgggtatataatatttgatgttggctgttcttcaaacatttaaatcaagctttggactaattatgctaatttgtgagttctgatcacttttgagctctgaagctttgaatcattcagtggtggagatggccttctggtaactgaatattaccttctgtaggaaaaggtggaaaataagcatctagaaggttgttgtgaatgactctgtgctggcaaaaatgcttgaaacctctatatttctttcgttcataagaggtaaaggtcaaatttttcaacaaaagtcttttaataacaaaagcatgcagttctctgtgaaatctcaaatattgttgtaatagtctgtttcaatcttaaaaagaatcaataaaaacaaacaaggggaaaaaaa

SEQ ID NO: 12843 - DNA, 202 bp, Homo sapiens
actctctgacattggatttggcagtaatatcttaaatacaacaccaaaagcagaggtaacaaaagcaaaaatagacaaataggactatatccaactaaaaaacttctggcacatcgaaagacaataaatagtggaaaaggcaacctacagaatgagaagaaatatctgcaaatcatatatctgctaaggggttaagatctag

SEQ ID NO: 12844 - DNA, 190 bp, Homo sapiens
taaacgccactcctaaaggctggtcctgccactgggacaggtacgcactcttctccccttttcacctttcacctttgacatctcagacatgatttgtgatcaccaccatctgacgacatgacagcctgtctggagactgagagcagctgcagttagcggtgctgggcaggcaaagcaccgcaagcacaaa

SEQ ID NO: 12845 - DNA, 466 bp, Homo sapiens
  misc_feature (1)...(466): n = a,t,c or g
ttgnnnnncctttggannannnnnnnnnnnnnnnnnnnnnnnnnnnnnnnnnnnnnnnnnnnnnnnnnnnnnnnnnnnnnnnnnnnnnnggcacgagagaatctccagagaaaataaaagtacagacaacaccaaaagtagaagaagaacaggatttgaaatttcagattggagaactggcaaataccctgacaagtaaattcgagtttctaggcattaatagacaatccatctccaactttcatgtgctgctcttacagactgagactcgaattgcagactggcgggaaggggctcttaatggaaactaccttaaacgaaaacttcaggatgcagcagaacaactaaaacagcatgaaataaacgccactcctaaaggctggtcctgccactgggacagggatcatagacggtatttctatgtaaacgaacagtcgggcgagtctcantgggagtttccnnatgg

SEQ ID NO: 12846 - DNA, 1284 bp, Homo sapiens
gcctccttcagcctcctcctccctcatctgttccctgatgtcacattccctgtgcaatcttcccttgcccatggtctgtctatctctttcctatgtggcttttctttgtcttccccaaggctgagtgtcccagttttatctgctcctgagactgagcccagatccccaaatctaatctgatttacagttcaaggaagctgatggggagctgggccttacccctgatgtaggaggggcacacagctgggggtgcagagcccacctgggtacctgacccccaggggatgaaaatgcaaggatgagtctgcttgggcctgagagtttgatctgcaggggcaggctcatcttttctctcccctgccttctcctccttctctccccagagcccccttgagcccctctgcctatgtccctctgcctcctccccatgcccccagttgctgtggcttgattctgctaccctgaccccaccatgtgccaggtggcatctgccttactgccttccctgaggagctgggacatgctggggcagttgtcagatgtaaaggcacagctggagcagagggcatgtcagtaatgattggtccctggggaaggtctggctggctccagcacagtgaggcatttaggtatctctcggtgaccgttggattcctggaagcagtagctgttctgtttggatctggtaggacagggctcagagggctaggcacggagggaaggtcagaggagaaggcaggcagggcccagtgagaggggagcatgccttcccccaccctggcttgctcttggtcacagggcggttctgggcacttgaactcagggcccaagcagaagcacaggcccagtcctgggctgcaagcacgatagcctgaatgggatttcaggttaggcagggtgggaggggaggctctctggctttagttttgttttgttttccaaatcaaggtaacttgctcccttctgcctacaggccttggtcttggcttgtcctcacccagtcggaactccctaccactttcaggagagtggttttaggcccgtgggggttgttctgttccaagcagtgtgagaacatggctggtagaggctctagctgtgtgcggggcctgaaggggagtgggttctcgcccaaagagcatctgcccatttcccaccttcccttctcccaccagaagcttgcctgagctgtttggacaaaaatccaaaccccacttgggctactctgggcctgggctttcagctttgggaacccaattacctagggtttacagggccatcctg

SEQ ID NO: 12847 - DNA, 632 bp, Homo sapiens
ggtgagatcactaatactttatgaaaagtttatggggacaatgccccaaagaaatcagctgtttacaaattgataactcatttttaacaagggatcagatgatatggaaggtaaagccaatggcggcagatcatcaacatcaatttctgaggaaaaaatctcattcctgctctaattgaagaggacctatgattaacaacagaaatgatagccaacaccacagatatctcaactggttcagcttatacaattctgactgaaaaattaaagttgagcaaactttccactcattggatgccacaactgtacacccagatcagctgaagacaagagcaaagctttcaatggaaatttaaacaagtgtgatcaagaccctaaaggatttctttgaaaaattgtaacaagagatagaacatggctttactagtacacttttgaagacaaagcacagtcaaagcaatggctaccaagaggtggaagtggtccagtcaaagcaaaagcaggctggtcaagagcaaaggtcaaggcaaaacaggtttttggaatgctcaaatcgttttgcttgttgactttctggagggccaaagaacgataacatctgcttatgagagtattttgttgaaaaaaaaaaa

SEQ ID NO: 12848 - DNA, 726 bp, Homo sapiens
tttttttttttttttttcaagaaaaaaaaatcactttaattgaggaacactttcagtttgtgacaaaattatgctgtgaatcaggtgttgcaaattatggcccactgcctgcttttgtgtaagttttattggaacacagctacattcagtccatggctgcttttagaatacaacagtagactttaacatttggaacagggaacagaaaccagagccatacagctaataaacttgaaaatatttacaagttgatgctttacaaaatccatctgctgacccctgctctgtaccattgttctcttctgatggtctgtttactaaaaaataaaaacttcacaaacatgtaaaaaatagatttgccatttaaaatgtgcttttcaagtttgactttttaggatgcaattaattcactaaatacagaacttaactaaggacaaaaatttaaagatcagcattctttcccttcccatcacgctcaacttaacatgaagaactgtaaacatcctaagcttacaacaaacctatctagttagacttcagttaaccacttacacatccccctcccccatgaactatttggaaaaagctgcaggcgtaatattggatccctaaatactttattctccttataccattatcagacccaagtatcatctaatagtccataatcaaactgcctaaacagtttctacactgtctttttaactatttcaaactatcaaggtc

SEQ ID NO: 12849 - DNA, 807 bp, Homo sapiens
gcccccaagcgtccagaactccctccaactctaatgagaatgaaagatgagcctgaagtagaagaggaggaggaagaggaagaggaagaagagaaagaaaaggaggagcatgaaaagaaaaaactggaggatggaagcctcagtaggccacagccagagatagagccagaagcagcagtgcaggaaatgaggcctcccacagatctcacacattttaaagaaacccaaacccatgaaaacatgtctcaacttagcgaggaagaacagaataaagattatcaagactgtagcaaaaccacttcattgtgcgcaggaccctcagcatcaaagaatgaatatgagaaaagcagaggtgaattgaagaaaaagaaaacacctggtccaggcaaacttccaccaacactttcttccaaatatcctgaagatgacccagactactgtgtgtgggtcccacctgaaggtcaaagtggagatggcagaacccatcttaatgacaagtatggctattgattgcttcagaatcccaaaagaaaaccttgtggaccatgtgacatggaatatttgggataatgtatcaaattgaatggccagagaagtttagatgattatttgtaagatctggtgactggcttttcgttctgtgttcttggcttcctaaatttatctgcccatatgattctcatgcatttgatatttatgtttaaaagtgtttatatatgtatgtaaaaagggaaccatatgttttgagaatttgtaaagtgagagacatgatcctattaaaataagaaggcaaaaaaaaaaaaaaaa

SEQ ID NO: 12850 - DNA, 2562 bp, Homo sapiens
tcttttttttttttttttttgagtgaaatcaagtgcagtttttatttaagaactggaaagaataatcagtatctgtgaaagaaaatccaatttagaatatttaaataaacatttatgtaaaaagaagagtagaataattactccgttcagttcctctccttgcaatgggataggctgcctctgctgcagatggctgggtcttccaaacccatgacaagtgccacggcctctgcagcagtggccccagagagtaggcacttcccagcatgacagagaggccgaggccttctaaccttgccaaaccactacaaaagcaaactagggtgggcaagcccaactacctaaggcaggaagaaagtgcagtgaagggacagtggtgtgctgtgcgtatcgtgggggtactcctaagcagctagctgttggcgagatcttacaaagcctgatcgggctaacgcagcttcctggtttaggaacattttccccggtcgtatcaatcccccaggttggtaaatgaacagaagggatgaataaagcctactttttaggctcaaggagcagctcgtgaaggggtggcaggtgcgctgctgccttgttttctgtcctgctaagaggctcaccccgcgacctcttctgtaaactgccactcagcagcggcctgcaagccctcacgaaaggcttcactctatgctgtttccaggtagctttgttctgacagtacctattttccacttcagaatctccactttaaaacctgcaatggaaaaataaatctcttgacagttttttaaatcgagaaaattggtgatgtggccttggcagcaaatacccagaaagcctttacctcattaacctgattctccacgggccctgccactgctaaatttataaagctaaaaataatctcaagatcatggaactaaaaagaagtcaatcacttaccaaatcctgtccttaaggagttcatcttggctgggcgtggtcgtcacgcctgtaatcctctttggtatatataacaatgaaaaaattcattaagccatgaaatctagaaataagtcatatttctgagttgataaaatgcttttctgaacatacattttaggtatctggcacaattaaccaaatgtctgcccatttttgtgtagctttcatacagtacagatttcattgatgtcgctcccacatctgagtattaaaaacatttgacattgttcttctcagtcctcacaacacccctgtgaggtaggtggtattgaccccattccacagatggggaggtctaggcacggaaaggtttagtggctcctcacaggccgcgtggtggggcagcagagtggtgctctggcccccgcgccgacgccgccttcacattcacacttcttcagtgccaccgcaacactgcatggcaggatctcacgctgaggccaagttcctgtctagtccagaatgaagccagcgtctcacctcttaaagcttcgatgtgtgactcaaagccaacttactctcccaaacttgcaaaacaaacatactgactgaatcttagttgggactatttgcagtatttaagattatttttgagagtcaatctgcttggatttgtagttgtatatgctcaaatccctttggaaaacagtttgaaatgacatgagggacaatgtaattttgagaacagaacacagaaaacaagagttctgagactggcattgaaattgagaatataagctatggtaaaatgagaatcaaatcccaaataaacggagagcagcacttctcaatgtttaaggccacgcacagggcaggcattcagtaagcacttcttggatcaaaagaaactgatgctcctttgagccgcctatcactgacaacaggagctgagacccccgggaaagccagccagggccatgatccccttggcctggggccacggtcacacaaagccactcagccaaatcgtgtagagttatctaggcttacttgctgcaggataaaagttgaactagaacaccaagcattgagctaggaatacccctttgaatgtgtactgctacttataaaaaataggtatgtagctatgattaaatagatgaagggccaaagcatcctatgaggaagtatttttaaaattgtatagatgttcatgcagtgggggacagaaataaagaggttaaagcggtctgtgtttttcggttaaatgaaaggttgtaaatgcatttttaccgctgataagaaggggtacctgctacccctttctgctgtggagtgttgctgaggacagagtccatctctcccagcgagtcctggttatcctttacttacactctggcctcgggggcagtggcgtgtggcctcggtcctccccaggtaactctggagggcgctgtggaatattgctgtgatttgccccttactcgtctttcacccatgttccgccttgattcggcataaggacagactgctccagtggggccttgggtcctcaggccttctgaccgcttggtcttgagtgacattccagaagagtgactaatgacataaaacgattaagaaaatccatgtggcagcggc

SEQ ID NO: 12851 - DNA, 2179 bp, Homo sapiens
tatattaagttgactttatcaaatacacaaagatttttttgcatatgtttccttcgtttaaaaccagtttcataattggttgtatatgtagacttggagttttatctttttacttgttgccatggaactgaaaccattagaggtttttgtcttggcttggggtttttgttttcttggttttgggtttttttatatatatatataaaagaacaaaatgaaaaaaaacacacacacacaagagtttacagattagtttaaattgataatgaaatgtgaagtttgtcctagtttacatcttagagaggggagtatacttgtgtttgtttcatgtgcctgaatatcttaagccactttctgcaaaagctgtttcttacagatgaagtgctttctttgaaaggtggttatttaggttttagatgtttaatagacacagcacatttgctctattaactcagaggctcactacggaaatatgtaatcagtgctgtgcatctgtctgcagctaatgtacctcctggacaccaggaggggaaaaagcactttttcaattgtgctgagttagacatctgtgagttagactatggtgtcagtgatttttgcagaacacgtgcacaaccctgaggtatgtttaatctaggcaggtacgtttaagggtattttggatctatttataatgaattcacaatttatgcctataaatttcagatgatttaaaattttaaacctgttacattgaaaaacattgaagttcgtcttgaagaaagcattaaggtatgcatggaggtgatttatttttaaacataacacctaacctaacatgggtaagagagtatggaactagatatgagctgtataagaagcataattgtgaacaagtagattgattgccttcatatacaagtatgttttagtattccttatttccttattatcagatgtattttttcttttaagtttcaatgttgttataattctcaaccagaaatttaatactttctaaaatattttttaaatttagcttgtgcttttgaattacaggagaagggaatcataatttaataaaacgcttactagaaagaccattacagatcccaaacacttggggtttgggtgaccctgtctttcttatatgaccctacaataaacatttgaaggcagcataggatggcagacagtaggaacattgtttcacttggcggcatgtttttgaaacctgctttatagtaactgggtgattgccattgtggtagagcttccactgctgtttataatctgagagagttaatctcagaggatgcttttttccttttaatctgctatgaatcagtacccagatgtttaattactgtacttattaaatcatgagggcaaaagagtgtagaatggaaaaaagtctcttgtatctagatactttaaatatgggaggccctttaacttaattgcctttagtcaaccactggatttgaatttgcatcaagtattttaaataatattgaatttaaaaaaatgtattgcagtagtgtgtcagtaccttattgttaaagtgagtcagataaatcttcaattcctggctatttgggcaattgaatcatcatggactgtataatgcaatcagattattttgtttctagacatccttgaattacaccaaagaacatgaaatttagttgtggttaaattatttatttatttcatgcattcattttatttcccttaaggtctggatgagacttctttggggagcctctaaaaaaatttttcactgggggccacgtgggtcattagaagccagagctctcctccaggctccttcccagtgcctagaggtgctataggaaacatagatccagccaggggcttccctaaagcagtgcagcaccggcccagggcatcactagacaggccctaattaagttttttttaaaaagcctgtgtatttattttagaatcatgtttttctgtatattaacttgggggatatcgttaatatttaggatataagatttgaggtcagccatcttcaaaaaagaaaaaaaaattgactcaagaaagtacaagtaaactatacacctttttttcataagttttaggaactgtagtaatgtggcttagaaagtataatggcctaaatgttttcaaaatgtaagttcctgtggagaagaattgtttatattggcaa

SEQ ID NO: 12852 - DNA, 589 bp, Homo sapiens
gggcggggccggtgaaggaccgcgaggccttccagaggctcaacttcctgtaccaggtgagtctgcgacaagggccccacggggacggtgctcggcgtcccagagtgactgctcccctcccgcaggccgcccattgtgtccttgcccaggaccccgagaaccaggcgctggcgaggttttactgctacactgagaggaccattgcgaagcggctcgtcttgcggcgggatccctcggtgaagaggactctctgtcgaggctgctcttccctcctcgtcccgggcctcacctgcacccagcgccagagacgctgcaggggacagcgctggaccgtacagacctgcctaacatgccagcgcagccaacgcttcctcaatgatcccgggcatttactctggggagacaggcctgaggcccagctcgggagccaagcaggtgagagattccaaaccactacaacccttgccaaacacagcccactccatttcagaccgccttcctgaggagaaaatgcagacgaagggttccagtaaccagtgatggattcaccccatctcccgaataaagtttacttgttttacattccaaa

SEQ ID NO: 12853 - DNA, 771 bp, Homo sapiens
taagccctcgagctgtgggttcgcgtcctgggttgcgtgcattcgtggaaagcggcgtagccgtgcgtgtgtgtgatggttccgtggctgcaaggaagggaaacagtctattatacatagccctgtatatatgtacaccaacatgaaacttttatttaacagacgtgtcctggtaaatatgatttttgtagctttttgtaaattatttaaagtgatgtaaaagatatttttggaaaatactgttgttcaattttgtagggtgttcctaactgcagttttctgtgttctgcatacaagtcttagcttaggaaacatttggttcttaccatcacagccaggttcacagaggctctgatgctttttggttgattgctggtgagaatggccggcggtggctgcagtggtagcctgaggaaggccaagctgccctccctgggaatcactcagatgccccaagatgtccgttgggaagctcccaggacagcactttttatacagaggacaccgcctcggccccacgtccttagaggccagagcacatctgaaaactgcaatcacagccgtccgctggaaaaacgtttcgaagcacagtggccagcgagcgagcacgtggctactccctgttgcatgtcaaatccacacagatgtcagcggcagctgctcggcagcccagccctgggcctgggtgggttcatgtccaatcttgttcgatcactagatgattctaacatcgaaataaacctctttttataaaaaaaaaaaaaaaaaaaa

SEQ ID NO: 12854 - DNA, 1245 bp, Homo sapiens
  misc_feature (1)...(1245): n = a,t,c or g
gcgtcgcgcgccagggtctctagcagctgccgctgagccgccggacggacgctcgtcttcgcccgccatggccgagagcgactgggacacggtgacggtgctgcgcaagaagggccctacggccgcccaggccaaatccaagcaggctatcttagcggcacagagacgaggagaagatgtggagacttccaagaaatgggctgctggccagaacaaacaacattctattaccaagaacacggccaagctggaccgggagacagaggagctgcaccatgacagggtgaccctggaggtgggcaaggtgatccagcaaggtcggcagagcaaggggcttacgcagaaggacctggccacgaaaatcaatgagaagccacaggtgatcgcggactatgagagcggacgggccatacccaataaccaggtgcttggcaaaatcgagcgggccattgttgagttgtccttcaaccttcgccgggttcgctgaacaggaagctaccgttccagctggggttggtgagagtgggactcgggggaagaagatggccctgggggtcccctgttctctgaattctggagctttgcttctccaggtagtacagactgagggatggtggggtctctgcaggcctcaggaaacccctaagagcaagtggagtccgagtcccttccccttgccagttcccgtcagcctgtgctgttggcgatggttctctgagcctgagcacagcgggtccgggccctgtcagcatggggccggaagccagttccacagaggaccccggctccggttcttccgagaggggtgttcatggttntgttgtctaaggtgatcagactcatcctcttcaaaattagatgtgggaaccaggagtgctcgtgtgctgagagcccagtgaggcacgggagcggcgtggccccccttccctgggaagatgttgaagaggggcagcgttggggggaggagggagctggtgctgcagtggccagtggctgtggctcatttcaggcctcaagctccggggaaaggacattggaaagcccatcgagaaggggcctagggcgaaatgaacacaaagcctcgaaatcagtgcgctccagctgatctcgttccgccggttccccttggccgccagttccgttctcctcacgggccgaacggaacaaggggtccagcttgcgggggaccctccccagcccattcctgctgtcaaacaaacaaaaccttgcaaagcgaaaaaaaaa

SEQ ID NO: 12855 - DNA, 245 bp, Homo sapiens
  misc_feature (1)...(245): n = a,t,c or g
ttagcagagaaatcttgcatgaaaggatcaatcagnnnnnnnnnnnnnnnnnnnnnnnnnnnnnnnnnnnnnnnnnnnnnnnnnnnnnnnnnnnnnnnnnnnnnnnnnnnnnnnnnnnnnnnnnnnnnnnnnnnnnnnnnnnnnnnnnnnnnnnnnnnnnnnnnnnnnnnnnnnnnntttcaggattatgacttactgaaggttcccggtgatcactagcatttttaagcaataagggncttttt

SEQ ID NO: 12856 - DNA, 452 bp, Homo sapiens
gtcctggacaaatcaaaacaagtctccagggaaaatcttggtccattgggcttaccaatttgagccaattggtctgggtagatacacttatcatttaatatacttacctccatcactcttatctatattttcagtagttacttagtagaaatgtatgcaggagtcactggagaccttattaaaatgcagcttctgattcagtgagctggggtggggcctgagagtctgcatttctcccaggctccctggtgctgccagtggtgctgctctgagtaacaagggggtggggaatgatatggagccgtccattattatcccatctgacaaatgagtcacagagcccttaggtaattgaggtgggatcagtctgattctgtaagctgtgttttcagccacaacatttactgcaaacttggagtaggtaattatgaagttcctttaacttgctgggg

SEQ ID NO: 12857 - DNA, 734 bp, Homo sapiens
actgatatttctttgtacttgggcatatgttaaatactctggggagttcagagaaattggaacagtgattgatcagattgctgaaacactatgggaacaggtattgaagcccctgggtgataatttgatggaggaaaacataaggcagtctgtaacaaactctatcaaagcaggcctgactgaccaggtgtctcatcatgccagattaaagacagactgacagttcatctcctcacggactccactctctttttttttcatgcttgctgtacaatgagaactcaaataaaaataaaccaaagtttacaatcaactgtagaagtagtttagtgtaactggcttcacagatggctgccacagagtgtggaagattgtttgttagttttaagcattcttttaatggctcctaagacatgcagatggactgaggagcattggttaatcatggcacctttgtgccatgtttaactcttttatttctttttacttaatctaatgttagtgaatttgtcttatgtaaaaggatatttcagggaaatattttcagaaatctatttagagtctctttaacacagtgtcccattgaaattttaatttttagagaatttatgaatcactgtttcaagaaccagattggaaagacaatgaagcctttattgagccactacattaaaagtatatattgctttactgccttcaataccagtattacatcaatgcatgtatcagaaact

SEQ ID NO: 12858 - DNA, 405 bp, Homo sapiens
  misc_feature (1)...(405): n = a,t,c or g
gaagttaaggagttggttcctgtgtcacctttcagttagtgtgggaaaggaagacttctgttttcctgagatcagtgcagtctcaggcctttggcagggctcatggatcagagctgagactggagggagaggcatttcgggtagcctaggagggcgactggcggcagcagaaccgaggaaggcaaggttgtttcccccacgctnacncacaatcctcatgggaacangatcacccatgcnctgcccttgatgatcaaggttggcgcttaanngtatnnngatangcaaggtntngcttncttncnttntnnnancntganntcnncctctctntccttcctnnncnnangtggntatgttanccnnctccantacgtnantccttngcngtccacttnnnncccc

SEQ ID NO: 12859 - DNA, 1107 bp, Homo sapiens
  misc_feature (1)...(1107): n = a,t,c or g
ggtggaccgtgggcacaatgcctccaaagccacaggggctttctttaatcagaaagaccattaaaacaaacgttcttcttttaatacagccattgaaaagatgacacattaagaaacatgtaaacactgcagctgcttaattacaagttgcactgcttgatttagtacctatgcactcccaggtttggggaccttaagagagggggacaggagcctcccctcactttcacagttggatagagaaggcaagaatgtgggtagagtaagaaagagaaaacagaagacctggcttgtgcacagcgcctgagagaatcaaagcaaattctgtcttctagttctcccagaagaaaggtttaagatgttaggaaggttggaaaatgaacgtgtgttgtcagttgggaggcaaaggaattgacaaatgcttctagttagaatatcagctaggaaaaggagggatacagagcctgacctcatgctctgaaaaggcaaggaacccagaacttgcctcccttatccacttaagccccaaccttgatcatcaagggcagcgcatgggtgatcctgttcccatgaggattgtgtgtcgcacctgaacacaggacacagcgtgggggaaacaaccttgccttcctcggttctgctgccgccagtcgccctcctaggctacccgaaatgcctctccctccagtctcagctctgatccatgagccctgccaaaggcctgagactgcactgatctcaggaaaacagaagtcttcctttcccacactaactgaaaggtgacacaggaaccaactccttaactttccaaattactgagaactcagactgccaaataccgtacctcttggccagtggggcctgcttggtctttctataaagggaagggaggccaatgggagagtaatgcctgtcatttccaggggaagcagaaaaaggacagtaaacaactttactaccataggccccagcgcagagccgtagagggagaagtaccttcctctctagcataacaagaatattcacaagancccctttatatgtgttttttaaacacacgataccaatggtcctaaacttgggtcagtcaactggtgaagatgacct

SEQ ID NO: 12860 - DNA, 659 bp, Homo sapiens
  misc_feature (1)...(659): n = a,t,c or g
gcggcgagtctgtggaaaccctggatcatgacagtgtgntagaaatgattagaaagggtggagatcagacttcactgttggtggtagacaaagagacggacaacatgtacagactggctcatttttctccatttctctactatcaaagtcaagaactgcccaatggctctgtcaaggaggctccagctcctactcccacttctctggaagtctcaagtccaccagatactacagaggaagtagatcataagcctaaactctgcaggctggctaaaggtgaaaatgggctatggctttcacttaaatgcgattcggggtctgccaggctcattcatcaaagaggtacagaagggcggtcctgctgacttggctgggctagaggatgaggatgtcatcattgaagtgaatggggtgaatgtgctagatgaaccctatgagaaggtggtggatagaatccagagcagtgggaagaatgtcacacttctagtctgtggaaagaaggcctatgattatttccaagctaagaaaatccctattgtttcctccctgggctgatccacttgacacccctccagattctaaagaaggaatagtggtggagtcaaaccatgacttcgcacatgggcaaaagaacgggcccacagttacagccttcacat

SEQ ID NO: 12861 - DNA, 1065 bp, Homo sapiens
  misc_feature (1)...(1065): n = a,t,c or g
ttttatgtgccctgggactctttatctaccagtcactggatgccattgatgggaaacaagccagaaggacaaactcttgttcccctttaggangcntctttgaccatggctgtgactctctttccacagtatttatggcagtgggagcttcaattgccgctcgcttaggaacttatcctgactggtttttttcctgctcttttattgggatgtttgtgttttattgcgctcattggcagacttatgtttcaggcatgttgagatttggaaaagtggatgtaactgaaattcagatagctttagtgattgtctttgtgttgtctgcatttggaggagcaacaatgtgggactatacgattcctattctagaaataaaattgaagatccttccagttcttggatttctaggtggagtaatattttcctgttcaaattatttccatgttatcctccatggtggtgttggcaagaatggatccactatagcaggcaccagtgtcttgtcacctggactccacataggactaattattatactggcaataatgatctataaaaagtcagcaactgatgtgtttgaaaagcatccttgtctttatatcctaatgtttggatgtgtctttgctaaagtctcacaaaaattagtggtagctcacatgaccaaaagtgaactatatcttcaagacactgtctttttggggccaggtcttttgtttttagaccagtactttaataactttatagacgaatatgttgttctatggatggcaatggtgatttcttcatttgatatggtgatatactttagtgctttgtgcctgcaaatttcaagacaccttcatctaaatatattcaagactgcatgtcatcaagcacctgaacaggttcaagttctttcttcaaagagtcatcagaataacatggattgaagagacttccgaacacttgctatctcttgctgctgctgtttcatggaaggagatattaaacatttgtttaatttttatttaagtgttatacctatttcagcaaataaaatatttcattgcttaaaaaaaaaaaaaa

SEQ ID NO: 12862 - DNA, 1172 bp, Homo sapiens
cttatcagtcccttgtatttacctgggtcaccctccatctctgagggtatgggggccagatggctcttgctgccctgatgttttggggggtctgcctgggcccctcctggtgtgtcacacgcgtccagtcctggccccctaggaggcagcatggcgggagctggaggccgagcgggcccagctgcagagtcagctgcagcgtgagcaggaggagctgctggcccggcggaaggctgagaaggaacagctgagtgaggagattgctgccctgcagcaggagcatgacgagggcctcctcctggccgagagcgagaagcagcaggccttgtctctgaaggagtctgagaagatggcgctgtcagagaagttgatgggttacacggcacagcctgggccaccatctccctggagatggagcggcagaaaccagatgcccagagccggcaggagcaggaccgggtaggcctgccgtcgtagggaggcttgcggagcaggagcgccctctctccaccgagctatcccgcggtttccagcatcccatctggcggactcctcttcctctctcttctcctactctgggtcttctatcctggtgttccttgaatgcctatcttccttttgtgcctcggaacctctcacgcctgccacaagttactcttttccttggtagttctgaactttaaataaggtaatgcctgtaagaatgccataaatgctcaataattgtcatctgttattattttcatcagtaacatcatctgaatcatcagtattgtctgcttttaacagctgcatttttcattgtccaaatatagtcacatacatttgaccattttataattattgaataataaattcgttctgctattttacaatgaaaaataatgctgcagagagcatttttgcacatgtatcgtggcagatgtaggccagaggctcttcttttatccatcctatggccaacctatgaatgtatacacgtttaatgagattttgccagcaatcaaagccttcagggaaaatgtccctagctctttactacatcagatcaaggactctggataattggcataacatcctggaatagctgaaacagagatattattctctgctgtcctctgttgtctttgtcttttcacgtcttaataaaagtgctggtgacaagagtgaaa

SEQ ID NO: 12863 - DNA, 1386 bp, Homo sapiens
  misc_feature (1)...(1386): n = a,t,c or g
tggagaagctggggagaaggcgtgggaggaagatggactcggtggagaagggggccgccacctccgtctccaacccgcgggggcgaccgtcccggggccggccgccgaagctgcagcgcaactctcgcggcggccagggccgaggtgtggagaagcccccgcacctggcagccctaattctggcccggggaggcagcaaaggcatccccctgaagaacattaagcacctggcgggggtcccgctcattggctgggtcctgcgtgcggccctgggattcaggggccttccagagtgtatgggtttcgacagaccatgatgaaattgagaatgtggccaaacaatttggtgcacaagttcatcgaagaagttcttgaagtttcaaaagacagctctacctcactagatgccatcatagaatttcgttaattatcataatgaggttgacattgtaggaaatattcaagctacnttctccatgtntacatcctacatgatcnttcaaaaagttgcagaaatgattcgagaagaaggatatgattctgttttctctgttgtgagacgccatcagtttcgatggagtgaaattcagaaaggagttcgtgaagtgaccgaacctctgaatttaaatccagctaaacggcctcgtcgacaagactgggatggagaattatatgaaaatggctcattttattttgctaaaagacatttgatagagatgggttacttgcagggtggaaaaatggcatactacgaaatgcgagctgaacatagtgtggatatagatgtggatattgattggcctattgcagagcaaagagtattaagatatggctattttggcaaagagaagcttaaggaaataaaacttttggtttgcaatattgatggatgtctcaccaatggccacatttatgtatcaggagaccaaaaagaaataatatcttatgatgtaaaagatgctattgggataagtttattaaagaaaagtggtattgaggtgaggctaatctcagaaagggcctgttcaaagcagacgctgtcttctttaaaactggattgcaaaatggaagtcagtgtatcagacaagctagcagttgtagatgaatggagaaaagaaatgggcctgtgctggaaagaagtggcatatcttggaaatgaagtgtctgatgaagagtgcttgaagagagtgggcctaagtggcgctcctgctgatgcctgttctactgcccagaaggctgttggatacatttgcaaatgtaatggtggccgtggtgccatccgagaatttgcagagcacatttgcctactaatggaaaaaggttaataattccatgcccaaaaatagaaattagcgtaatattgagaaaaaaatgatacagtcctct

SEQ ID NO: 12864 - DNA, 3695 bp, Homo sapiens
  misc_feature (1)...(3695): n = a,t,c or g
ccattaggcctatgaattataagatacagtcactttaaaatccactggaaggctgaagagtgagttaaacctcttataatgaatatacagtgaaaccagtagaggcattttatttagggttcctacaagaaagtgcttaaatagcatcgacgcctacatgctacatcctgttcagtctctgcctctgtgatgcagttggccagcaaatatcctccaagtcatcatttgcatagtgctagggataaaatgaggagcaataccaaatgctatacctgcccttatgggtcttatagtccaacgggagaaaaagatattatacaaataatcacggaaaataaatagaaaacgcatccttgtttttgtttagtggatcctctatccttcagagactctggaacccctgtggtcttctcttcatctaatgaccctgaggggatggagttttcaagtccttccagagaggaatgtcccaagcctttgagtagggtaagcatcatggctggcagcctcacaggtttgcttctacttcaggcagtgtcgtgggcatcaggtgcccgcccctgcatccctaaaagcttcggctacagctcggtggtgtgtgtctgcaatgccacatactgtgactcctttgaccccccgacctttcctgcccttgggtaccttcagccgctatgagagttacacgcagtggggcgacggatggagctgagtatgggggcccatccaggctaatcacacgggcacaggcctgctactgaccctgcagccagaacagaagttccagaaagtgaagggatttggaggggccatgacagatgctgctgctctcaacatccttgccctgtcaccccctgcccaaaatttgctacttaaatcgtacttctctgaagaaggaatcggatataacatcatccgggtacccatggccagctgtgacttctccatccgcacctacacctatgcagacacccctgatgatttccagttgcacaacttcagccttcccagaggaagataccaagctcaagatacccctgattcaccgagccctgcagttgggccnagcgtcccgtttcactccttgccagcccctgggacatcacccacttggctcaagaccaatggagcggtgaatgggaaggggtcactcaagggacagcccggagacatctaccaccagacctgggccagatactttgtgaagttcctggatgcctatgctgagcacaagttacagttctgggcagtgacagctgaaaatgagccttctgctgggctgttgagtggataccccttccagtgcctggggcttcacccctgaacatcagcgagacttcattgcccgtgacctaggtcctaccctcgccaacagtactcaccacaatgtccgcctactcatgctggatgaccaacgcttgctgctgccccactgggcaaaggtggtactgacagacccagaagcagctaaatatgttcatggcattgctgtacattggtacctggactttctggctccagccaaagccaccctaggggagacacaccgcctgttccccaacaccatgctctttgcctcagaggcctgtgtgggctccaagttctgggagcagagtgtgcggctaggctcctgggatcgagggatgcagtacagccacagcatcatcacgaacctcctgtaccatgtggtcggctggaccgactggaaccttgccctgaaccccgaaggaggacccaattgggtgcgtaactttgtcgacagtcccatcattgtagacatcaccaaggacacgttttacaaacagcccatgttctaccaccttggccacttcagcaagttcattcctgaggggctcccagagagtggggctggttgccagtcagaagaacgacctggacgcagtggcactgatgcatcccgatggctctgctgttgtggtcgtgctaaaccgctcctctaaggatgtgcctcttaccatcaaggatcctgctgtgggcttcctggagacaatctcacctggctactccattcacacctacctgtgggcgtcgccagtgatggagcagatactcaaggaggcactggggctcagcctgggcattaaagggacagagtcagctcacacgctgtctgtgactaaagagggcacagcagggccagtgtgagcttacagcgacgtaagcccaggggcaatggtttgggtgactcactttcccctctaggtggtgcccaggggctggaggcccctagaaaaagatcagtaagccccagtgtccccccagcccccatgcttatgtgaaacatgcgctgtgtgctgccttgctttggaaacttggcctgggtccaggccctagggtgagctcactgtccgtacaaacacaagatcagggctgagggtaaggaaaagaagagactaggaaagctgggcccaaaactggagactgtttgtctttcctggagatgcagaactgggcccgtggagcagcagtgtcagcatcagggcggaagccttaaagcagcagcgggtgtgcccaggcacccagatgattcctatggcaccagccaggaaaaatggcagctcttaaaggagaaaatgtttgagcccagtcagtgtgagtggctttattctgggtggcagcaccccgtgtccggctgtaccaacaacgaggagcacgggggcctctggaagtcatgagagtagaaaaaccagtcttgggagcgtgaggacaaatcattcctcttcatcctcctcagccatgcccagggtccgggtgcctggggccccaacaaaggttctccctttggatggggaaaattcccctgagcaaggcgtaccaacccatggttgccattcctccaaaacaaataagatattgtttccggcgccgggatggtccctcctcagtctctgggccctgcctggtgtctgggcgttgcggtggtaacctcagctccatcccagggggaagtagagactgagaatgtgggtacaataggcacagaggttgtgcagcccacgcaggtggacctgcagcttcccactgggcagcttttgctgcagcagcagggccaagtagctgaagacgaaggcgtccaaggaggcaggggcatctccaaagaagaacttttgagagcccaggcgctgagagagcagggtcagacactcccgagcctctcggtacagctccttctccagctcttcctcgtcctcaggcctgtgctccccagtcagcagctgtagccgttccatgtactgccgctgcatgcggccaggcaggaagaagttgaggggaaagggcatagcctctgcataccacttccgggtcacttccacgtagttcttggtgtctatccaaaaagtatgtaccagcaccgggagcaacttctcctccaggagagacatgaaggccagggtgtctgccccttgccgagctgacagatcataatcagcattgtacttctcttttcgaaggtgggtgatgatcttgtgtggaactgagatgacctctccatgactggtccgaagggcaggcagagttcctgaagggctctgccaggggttgctgatcttgtgtaccttcagtggagcaccagtaaatctggcataggtcagcacggccaggctgtccaggtccactgacggcagcccccagccccctgaccagcagaacagctccatgggcgccgccatcttgcc

SEQ ID NO: 12865 - DNA, 1436 bp, Homo sapiens
ggcaacttcacgggccctgggagtctatgtgctttttccctgtctcagacaggatgtcatatttgttgcagacgcagcaaatgcaatattgatgtcacttgaagacaagtctctgaatgttcgagccaaagcagcctggtccctgggcaacctgacagacactctgattgtcaacatggaaacaccagacccaagtttccaggaagagttctctggtctcctgctcttgaaaatgttacgatcagctatagaagcatccaaggataaagacaaggtaaaaagcaatgcagtccgggcccttggaaatttgcttcattttctgcaaccctctcatatagaaaaaccccacatttgcagaaattcatttgagggagtctatccagggccctgaattttctactgttctaacagaagcttgccatgaaagtccgatggaatgcttgttatgcaatgggaaatgtatttaaaaatcctgcccttcctttagggacagccccatggacctcccaggcctacaatgccctgacatcggtcgtgacatcatgcaagaacttcaaagtgcgcatcagatctgcagctgccctttccgtcccggggaagagagagcagtacgggtctgttgaccagtatgctcggatctggaatgcattggtcaccgctttacagaagagtgaagacaccatagactttttggaattcaagtactgtgtcaagcctacggacccaaatctgccaaggcactgattcacctcttgaagcttggccaagtgcctcggacctccctttgtatgaaagaaacccttgaactgagtgggaatatggtccagtcctatattctacagtttttaaaatcaggagcagagggagatgacactggagcaccccacagcccacaggaaagagaccagatggtcagaatggcccttaaacacatgggcagcatccaggcaccaactggagacacagccagaagggccatcatgggctttttagaagagatcctggccgtttgttttgactcatctggatcacagaggggcactcccagggttaacaaatcagtgaagatcccaccatactttctagatgtcgaaggcggcagtaggaagacctgagcttgagcataagcatctgtgggatttcatcttaggggcagaaacaatccgttcactatttatttagaatgacttagcagccatttaaattttcacagagggctcaaccacctttggagtgactccatagcactggccatggtcagggttgttggaacatctgacctgtgcatccaggagccgaggagtcaggttgtaatacaggccaagcagacgggctttgagggcatttagtctcagaaaaaaaaaatgtagaaggatttcggaattagaattttgtgtattgtatctgtagttttgtaataaactaacgaaaaataa

SEQ ID NO: 12866 - DNA, 14282 bp, Homo sapiens
gcggcggcggcggcgggaagcagcggggctggggttccagggggagcggccgccgcctcagcagcctcctcgtcgtccgcctcgtcttcgtcttcgtcatcgtcctcagcctcttcagggccggccctgctccgggtgggcccggcatctcgacgcggcgctgcaggtctcggccgccatcggcaccaacctgcgccggttccgggccgtgtttggggagagcggcgggggaggcggcagcggagcaggatgagcaattcttaggttttggctcagatgaagaagtcagagtgcgaagtcccacaaggtctccttcagttaaaactagtcctcgaaaacctcgtgggagacctagaagtggctctgaccgaaattcagctatcctctcagatccatctgtgttttcccctctaaataaatcagagaccaaatctggagataagatcaagaagaaagattctaaaagtatagaaaagaagagaggaagacctcccaccttccctggagtaaaaatcaaaataacacatggaaaggacatttcagagttaccaaagggaaacaaagaagatagcctgaaaaaaattaaaaggacaccttctgctacgtttcagcaagccacaaagattaaaaaattaagagcaggtaaactctctcctctcaagtctaagtttaagacagggaagcttcaaataggaaggaagggggtacaaattgtacgacggagaggaaggcctccatcaacagaaaggataaagaccccttcgggtctcctcattaattctgaactggaaaagccccagaaagtccggaaagacaaggaaggaacacctccacttacaaaagaagataagacagttgtcagacaaagccctcgaaggattaagccagttaggattattccttcttcaaaaaggacagatgcaaccattgctaagcaactcttacagagggcaaaaaagggggctcaaaagaaaattgaaaaagaagcagctcagctgcagggaagaaaggtgaagacacaggtcaaaaatattcgacagttcatcatgcctgttgtcagtgctatctcctcgcggatcattaagacccctcggcggtttatagaggatgaggattatgaccctccaattaaaattgcccgattagagtctacaccgaatagtagattcagtgccccgtcctgtggatcttctgaaaaatcaagtgcagcttctcagcactcctctcaaatgtcttcagactcctctcgatctagtagccccagtgttgatacctccacagactctcaggcttctgaggagattcaggtacttcctgaggagcggagcgatacccctgaagttcatcctccactgcccatttcccagtccccagaaaatgagagtaatgataggagaagcagaaggtattcagtgtcggagagaagttttggatctagaacgacgaaaaaattatcaactctacaaagtgccccccagcaggagacctcctcgtctccacctccacctctgctgactccaccgccaccactgcagccagcctccagtatctctgaccacacaccttggcttatgcctccaacaatccccttagcatcaccatttttgcctgcttccactgctcctatgcaagggaagcgaaaatctattttgcgagaaccgacatttaggtggacttctttaaagcattctaggtcagagccacaatacttttcctcagcaaagtatgccaaagaaggtcttattcgcaaaccaatatttgataatttccgaccccctccactaactcccgaggacgttggctttgcatctggtttttctgcatctggtaccgctgcttcagcccgattgttttcgccactccattctggaacaaggtttgatatgcacaaaaggagccctcttctgagagctccaagatttactccaagtgaggctcactctagaatatttgagtctgtaaccttgcctagtaatcgaacttctgctggaacatcttcttcaggagtatccaatagaaaaaggaaaagaaaagtgtttagtcctattcgatctgaaccaagatctccttctcactccatgaggacaagaagtggaaggcttagtagttctgagctctcacctctcacccccccgtcttctgtctcttcctcgttaagcatttctgttagtcctcttgccactagtgccttaaacccaacttttacttttccttctcattccctgactcagtctggggaatctgcagagaaaaatcagagaccaaggaagcagactagtgctccggcagagccattttcatcaagtagtcctactcctctcttcccttggtttaccccaggctctcagactgaaagagggagaaataaagacaaggcccccgaggagctgtccaaagatcgagatgctgacaagagcgtggagaaggacaagagtagagagagagaccgggagagagaaaaggagaataagcgggagtcaaggaaagagaaaaggaaaaagggatcagaaattcagagtagttctgctttgtatcctgtgggtagggtttccaaagagaaggttgttggtgaagatgttgccacttcatcttctgccaaaaaagcaacagggcggaagaagtcttcatcacatgattctgggactgatattacttctgtgactcttggggatacaacagctgtcaaaaccaaaatacttataaagaaagggagaggaaatctggaaaaaaccaacttggacctcggcccaactgccccatccctggagaaggagaaaaccctctgcctttccactccttcatctagcactgttaaacattccacttcctccataggctccatgttggctcaggcagacaagcttccaatgactgacaagagggttgccagcctcctaaaaaaggccaaagctcagctctgcaagattgagaagagtaagagtcttaaacaaaccgaccagcccaaagcacagggtcaagaaagtgactcatcagagacctctgtgcgaggaccccggattaaacatgtctgcagaagagcagctgttgccccttggccgaaaacgagctgtgtttcctgatgacatgcccaccctgagtgccttaccatgggaagaacgagaaaagattttgtcttccatggggaatgatgacaagtcatcaattgctggctcagaagatgctgaacctcttgctccacccatcaaaccaattaaacctgtcactagaaacaaggcaccccaggaacctccagtaaagaaaggacgtcgatcgaggcggtgtgggcagtgtcccggctgccaggtgcctgaggactgtggtgtttgtactaattgcttagataagcccaagtttggtggtcgcaatataaagaagcagtgctgcaagatgagaaaatgtcagaatctacaatggatgccttccaaagcctacctgcagaagcaagctaaagctgtgaaaaagaaagagaaaaagtctaagaccagtgaaaagaaagacagcaaagagagcagtgttgtgaagaacgtggtggactctagtcagaaacctaccccatcagcaagagaggatcctgccccaaagaaaagcagtagtgagcctcctccacgaaagcccgtcgaggaaaagagtgaagaagggaatgtctcggcccctgggcctgaatccaaacaggccaccactccagcttccaggaagtcaagcaagcaggtctcccagccagcactggtcatcccgcctcagccacctactacaggaccgccaagaaaagaagttcccaaaaccactcctagtgagcccaagaaaaagcagcctccaccaccagaatcaggtccagagcagagcaaacagaaaaaagtggctccccgcccaagtatccctgtaaaacaaaaaccaaaagaaaaggaaaaaccacctccggtcaataagcaggagaatgcaggcactttgaacatcctcagcactctctccaatggcaatagttctaagcaaaaaattccagcagatggagtccacaggatcagagtggactttaaggaggattgtgaagcagaaaatgtgtgggagatgggaggcttaggaatcttgacttctgttcctataacacccagggtggtttgctttctctgtgccagtagtgggcatgtagagtttgtgtattgccaagtctgttgtgagcccttccacaagttttgtttagaggagaacgagcgccctctggaggaccagctggaaaattggtgttgtcgtcgttgcaaattctgtcacgtttgtggaaggcaacatcaggctacaaagcagctgctggagtgtaataagtgccgaaacagctatcaccctgagtgcctgggaccaaactaccccaccaaacccacaaagaagaagaaagtctggatctgtaccaagtgtgttcgctgtaagagctgtggatccacaactccaggcaaagggtgggatgcacagtggtctcatgatttctcactgtgtcatgattgcgccaagctctttgctaaaggaaacttctgccctctctgtgacaaatgttatgatgatgatgactatgagagtaagatgatgcaatgtggaaagtgtgatcgctgggtccattccaaatgtgagaatctttcaggtacagaagatgagatgtatgagattctatctaatctgccagaaagtgtggcctacacttgtgtgaactgtactgagcggcaccctgcagagtggcgactggcccttgaaaaagagctgcagatttctctgaagcaagttctgacagctttgttgaattctcggactaccagccatttgctacgctaccggcaggctgccaagcctccagacttaaatcccgagacagaggagagtataccttcccgcagctcccccgaaggacctgatccaccagttcttactgaggtcagcaaacaggatgatcagcagcctttagatctagaaggagtcaagaggaagatggaccaagggaattacacatctgtgttggagttcagtgatgatattgtgaagatcattcaagcagccattaattcagatggaggacagccagaaattaaaaaagccaacagcatggtcaagtccttcttcattcggcaaatggaacgtgtttttccatggttcagtgtcaaaaagtccaggttttgggagccaaataaagtatcaagcaacagtgggatgttaccaaacgcagtgcttccaccttcacttgaccataattatgctcagtggcaggagcgagaggaaaacagccacactgagcagcctcctttaatgaagaaaatcattccagctcccaaacccaaaggtcctggagaaccagactcaccaactcctctgcatcctcctacaccaccaattttgagtactgataggagtcgagaagacagtccagagctgaacccacccccaggcatagaagacaatagacagtgtgcgttatgtttgacttatggtgatgacagtgctaatgatgctggtcgtttactatatattggccaaaatgagtggacacatgtaaattgtgctttgtggtcagcggaagtgtttgaagatgatgacggatcactaaagaatgtgcatatggctgtgatcaggggcaagcagctgagatgtgaattctgccaaaagccaggagccaccgtgggttgctgtctcacatcctgcaccagcaactatcacttcatgtgttcccgagccaagaactgtgtctttctggatgataaaaaagtatattgccaacgacatcgggatttgatcaaaggcgaagtggttcctgagaatggatttgaagttttcagaagagtgtttgtggactttgaaggaatcagcttgagaaggaagtttctcaatggcttggaaccagaaaatatccacatgatgattgggtctatgacaatcgactgcttaggaattctaaatgatctctccgactgtgaagataagctctttcctattggatatcagtgttccagggtatactggagcaccacagatgctcgcaagcgctgtgtatatacatgcaagatagtggagtgccgtcctccagtcgtagagccggatatcaacagcactgttgaacatgatgaaaacaggaccattgcccatagtccaacatcttttacagaaagttcatcaaaagagagtcaaaacacagctgaaattataagtcctccatcaccagaccgacctcctcattcacaaacctctggctcctgttattatcatgtcatctcaaaggtccccaggattcgaacacccagttattctccaacacagagatcccctggctgtcgaccgttgccttctgcaggaagtcctaccccaaccactcatgaaatagtcacagtaggtgatcctttactctcctctggacttcgaagcattggctccaggcgtcacagtacctcttccttatcaccccagcggtccaaactccggataatgtctccaatgagaactgggaatacttactctaggaataatgtttcctcagtctccaccaccgggaccgctactgatcttgaatcaagtgccaaagtagttgatcatgtcttagggccactgaattcaagtactagtttagggcaaaacacttccacctcttcaaatttgcaaaggacagtggttactgtaggcaataaaaacagtcacttggatggatcttcatcttcagaaatgaagcagtccagtgcttcagacttggtgtccaagagctcctctttaaagggagagaagaccaaagtgctgagttccaagagctcagagggatctgcacataatgtggcttaccctggaattcctaaactggccccacaggttcataacacaacatctagagaactgaatgttagtaaaatcggctcctttgctgaaccctcttcagtgtcgttttcttctaaagaggccctctccttcccacacctccatttgagagggcaaaggaatgatcgagaccaacacacagattctacccaatcagcaaactcctctccagatgaagatactgaagtcaaaaccttgaagctatctggaatgagcaacagatcatccattatcaacgaacatatgggatctagttccagagataggagacagaaagggaaaaaatcctgtaaagaaactttcaaagaaaagcattccagtaaatcttttttggaacctggtcaggtgacaactggtgaggaaggaaacttgaagccagagtttatggatgaggttttgactcctgagtatatgggccaacgaccatgtaacaatgtttcttctgataagattggtgataaaggcctttctatgccaggagtccccaaagctccacccatgcaagtagaaggatctgccaaggaattacaggcaccacggaaacgcacagtcaaagtgacactgacacctctaaaaatggaaaatgagagtcaatccaaaaatgccctgaaagaaagtagtcctgcttcccctttgcaaatagagtcaacatctcccacagaaccaatttcagcctctgaaaatccaggagatggtccagtggcccaaccaagccccaataatacctcatgccaggattctcaaagtaacaactatcagaatcttccagtacaggacagaaacctaatgcttccagatggccccaaacctcaggaggatggctcttttaaaaggaggtatccccgtcgcagtgccccgtgcacgttctaacatgttttttgggcttaccccactctatggagtaagatcctatggtgaagaagacattccattctacagcagctcaactgggaagaagcgaggcaagagatcagctgaaggacaggtggatggggccgatgacttaagcacttcagatgaagacgacttatactattacaacttcactagaacagtgatttcttcaggtggagaggaacgactggcatcccataatttatttcgggaggaggaacagtgtgatcttccaaaaatctcacagttggatggtgttgatgatgggacagagagtgatactagtgtcacagccacaacaaggaaaagcagccagattccaaaaagaaatggtaaagaaaatggaacagagaacttaaagattgatagacctgaagatgctggggagaaagaacatgtcactaagagttctgttggccacaaaaatgagccaaagatggataactgccattctgtaagcagagttaaaacacagggacaagattccttggaagctcagctcagctcattggagtcaagccgcagagtccacacaagtaccccctccgacaaaaatttactggacacctataatactgagctcctgaaatcagattcagacaataacaacagtgatgactgtgggaatatcctgccttcagacattatggactttgtactaaagaatactccatccatgcaggctttgggtgagagcccagagtcatcttcatcagaactcctgaatcttggtgaaggattgggtcttgacagtaatcgtgaaaaagacatgggtctttttgaagtattttctcagcagctgcctacaacagaacctgtggatagtagtgtctcttcctctatctcagcagaggaacagtttgagttgcctctagagctaccatctgatctgtctgtcttgaccacccggagtcccactgtccccagccagaatcccagtagactagctgttatctcagactcaggggagaagagagtaaccatcacagaaaaatctgtagcctcctctgaaagtgacccagcactgctgagcccaggagtagatccaactcctgaaggccacatgactcctgatcattttatccaaggacacatggatgcagaccacatctctagccctccttgtggttcagtagagcaaggtcatggcaacaatcaggatttaactaggaacagtagcacccctggccttcaggtacctgtttccccaactgttcccatccagaaccagaagtatgtgcccaattctactgatagtcctggcccgtctcagatttccaatgcagctgtccagaccactccaccccacctgaagccagccactgagaaactcatagttgttaaccagaacatgcagccactttatgttctccaaactcttccaaatggagtgacccaaaaaatccaattgacctcttctgttagttctacacccagtgtgatggagacaaatacttcagtattgggacccatggggaggtggtctcacccttaccacaggactaaatccaagcttgccaacttctcaatctttgttcccttctgctagcaaaggattgctacccatgtctcatcaccagcacttacattccttccctgcagctactcaaagtagtttcccaccaaacatcagcaatcctccttcaggcctgcttattggggttcagcctcctccggatccccaacttttggtttcagaatccagccagaggacagacctcagtaccacagtagccactccatcctctggactcaagaaaagacccatatctcgtctacagacccgaaagaataaaaaacttgctccctctagtaccccttcaaacattgccccttctgatgtggtttctaatatgacattgattaacttcacaccctcccagcttcctaatcatccaagtctgttagatttggggtcacttaatacttcatctcaccgaactgtccccaacatcataaaaagatctaaatctagcatcatgtattttgaaccggcacccctgttaccacagagtgtgggaggaactgctgccacagcggcaggcacatcaacaataagccaggatactagccacctcacatcagggtctgtgtctggcttggcatccagttcctctgtcttgaatgttgtatccatgcaaactaccacaacccctacaagtagtgcgtcagttccaggacacgtcaccttaaccaacccaaggttgcttggtaccccagatattggctcaataagcaatcttttaatcaaagctagccagcagagcctggggattcaggaccagcctgtggctttaccgccaagttcaggaatgtttccacaactggggacatcacagaccccctctactgctgcaataacagcggcatctagcatctgtgtgctcccctccactcagactacgggcataacagccgcttcaccttctggggaagcagacgaacactatcagcttcagcatgtgaaccagctccttgccagcaaaactgggattcattcttcccagcgtgatcttgattctgcttcagggccccaggtatccaactttacccagacggtagacgctcctaatagcatgggactggagcagaacaaggctttatcctcagctgtgcaagccagccccacctctcctgggggttctccatcctctccatcttctggacagcggtcagcaagcccttcagtgccgggtcccactaaacccaaaccaaaaaccaaacggtttcagctgcctctagacaaagggaatggcaagaagcacaatgtttcccatttgcggaccagttcttctgaagcacacattccagaccaagaaacgacatccctgacctcaggcacagggactccaggagcagaggctgagcagcaggatacagctagcgtggagcagtcctcccagaaggagtgtgggcaacctgcagggcaagtcgctgttcttccggagagttcagttaacccaaatccaggcaaatgaacaagaaagtgcagaacctaaaacagtggaagaagaggaaagtaatttcagctccccactgatgctttggcttcagcaagaacaaaagcggaaggaaagcattactgagaaaaaacccaagaaaggacttgtttttgaaatttccagtgatgatggctttcagatctgtgcagaaagtattgaagatgcctggaagtcattgacagataaagtccaggaagctcgatcaaatgcccgcctaaagcagctctcatttgcaggtgttaacggtttgaggatgctggggattctccatgatgcagttgtgttcctcattgagcagctgtctggtgccaagcactgtcgaaattacaaattccgtttccacaagccagaggaggccaatgaaccccccttgaacccctcacggctcagccagggctgaagtccacctcaggaagtcagcatttgacatgtttaacttcctggcttctaaacatcgtcagcctcctgaatacaaccccaatgatgaagaagaggaggaggtacagctgaagtcagctcggagggcaactagcatggatctgccaatgcccatgcgcttccggcacttaaaaaagacttctaaggaggcagttggtgtctacaggtctcccatccatggccggggtcttttctgtaagagaaacattgatgcaggtgagatggtgattgagtatgccggcaacgtcatccgctccatccagactgacaagcgggaaaagtattacgacagcaagggcattggttgctatatgttccgaattgatgactcagaggtagtggatgccaccatgcatggaaatcgtgcacgcttcatcaatcactcgtgtgagcctaactgctattctcgggtcatcaatattgatgggcagaagcacattgtcatctttgccatgcgtaagatctaccgaggagaggaactcacttacgactataagttccccattgaggatgccagcaacaagctgccctgcaactgtggcgccaagaaatgccggaagttcctaaactaaagctgctcttctcccccagtgttggagtgcaaggaggcggggccatccaaagcaacgctgaaggccttttccagcagctgggagctcccggattgcgtggcacagctgaggggcctctgtgatggctgagctctcttatgtcctatactcacatcagacatgtgatcatagtcccagagacagagttgaggtctcgaagaaaagatccatgatcggctttctcctggggcccctccaattgtttactgttagaaagtgggaatggggtccctagcagacttgcctggaaggagcctattatagagggttggttatgttgggagattgggcctgaatttctccacagaaataagttgccatcctcaggttggccctttcccaagcactgtaagtgagtgggtcagggcaaagccccaaatggagggttggttagattcctgacagtttgccagccagggccccacctacagcgtctgtcgaacaaacagaggtctggtggttttccctactgtcctcccactcgagagttcacttctggttgggagacaggattcctagcacctccggtgtcaaaaggctgtcatggggttgtgccaattaattaccaaacattgagcctgcaggctttgagtgggagtgttgcccccaggagccttatctcagccaattacctttcttgacagtaggagcggcttccctctcccattccctcttcactcccttttcttcctttcccctgtcttcatgccactgctttcccatgcttctttcggttgtaggggagactgactgcctgctcaaggacactccctgctgggcataggatgtgcctgcaaaaagttccctgagcctgtaagcactccaggtggggaagtggacaggagccattggtcataaccagacagaatttggaaacattttcataaagctccatggagagttttaaagaaacatatgtagcatgattttgtaggagaggaaaaagattatttaaataggatttaaatcatgcaacaacgagagtatcacagccaggatgacccttgggtcccattcctaagacatggttactttattttccccttgttaagacataggaagacttaatttttaaacggtcagtgtccagttgaaggcagaacactaatcagatttcaaggcccacaacttggggactagaccaccttatgttgagggaactctgccacctgcgtgcaacccacagctaaagtaaattcaatgacactactgccctgattactccttaggatgtggtcaaaacagcatcaaatgtttcttctcttcctttccccaagacagagtcctgaacctgttaaattaagtcattggattttactctgttctgtttacagtttactatttaaggttttataaatgtaaatatattttgtatatttttctatgagaagcacttcatagggagaagcacttatgacaaggctattttttaaaccgcggtattatcctaatttaaaagaagatcggtttttaataattttttattttcataggatgaagttagagaaaatattcagctgtacacacaaagtctggtttttcctgcccaacttccccctggaaggtgtactttttgttgtttaatgtgtagcttgtttgtgccctgttgacataaatgtttcctgggtttgctctttgacaataaatggagaaggaaggtcacccaactccattgggccactcccctccttcccctattgaagctcctcaaaaggctacagtaatatcttgatacaacagattctcttctttcccgcctctctcctttccggcgcaacttccagagtggtgggagacggcaatctttacatttccctcatctttcttacttcagagttagcaaacaacaagttgaatggcaacttgacatttttgcatcaccatctgcctcataggccactctttcctttccctctgcccaccaagtcctcatatctgcagagaacccattgatcaccttgtgccctcttttggggcagcctgttgaaactgaagcacagtctgaccactcacgataaagcagatttttctctgcctctgccacaaggtttcagagtagtgtagtccaagtagagggtggggcacccttttctcgccgcaagaagcccattcctatggaagtctagcaaagcaatacgactcagcccagcactctctgccccaggactcatggctctgctgtgccttccatcctgggctcccttctctcctgtgaccttaagaactttgtctggtggctttgctggaacattgtcactgttttcactgtcatgcagggagcccagcactgtggccaggatggcagagacttccttgtcatcatggagaagtgccagcaggggactgggaaaagcactctacccagacctcacctcccttcctccttttgcccatgaacaagatgcagtggccctaggggttccactagtgtctgctttcctttattattgcactgtgtgaggtttttttgtaaatccttgtattcctattttttttaaagaaa

SEQ ID NO: 12867 - DNA, 1658 bp, Homo sapiens
  misc_feature (1)...(1658): n = a,t,c or g
gccacggcgcggacgccatgcacacggaccctgactactcggctgcctatgtcgtcatagaaactgatgcagaagatggaatcaaggggtgtggaattaccttcactctgggaaaaggcactgaagttgttgtctgtgctgtgaatgccctcgcccaccatgtgctcaacaaggacctcaaggacattgttggtgacttcagaggcttctataggcagctcacaagtgatgggcagctcagatggattggtccagaaaagggcgtggtgcacctggcgacagcggccgtcctaaacgcggtgtgggacttgtgggccaagcaggagggaaagcctgtctggaagttacttgtggacatggatcccaggatgctggtatcctgcatagatttcaggtacatcactgatgtcctgactgaggaggatgccctagaaatactgcagaaaggtcaaattggtaaaaaagaaagagagaagcaaatgctggcacaaggataccctgcttacacgacatcgtgcgcctggctggggtactcagatgacacgttgaagcagctctgtgcccaggcgctgaaggatggctggaccaggtttaaagtaaaggtgggtgctgatctccaggatgacatgcgaagatgccaaatcatccgagacatgattggaccggaaaagactttgatgatggatgccaaccagcgctgggatgtgcctgaggcggtggagtggatgtccaagctggccaagttcaagccattgtggattgaggagccaacctcccctgatgacattctggggcacgccaccatttccaaggcactggtcccattaggaattgggcattgccacaggagaacagttgccacaatagagtgatatttaagcaactcctacagggcgnaggccctgcagttcctccagattgacagttgcagactgggcagtgtcaatgagaacctctcagtattgctgatggccaaaaagtttgaaattcctgtttgcccccatgctggtggagttggcctctgtgaactggtgcagcacctgattatatttgactacatatcagtttctgcaagccttgaaaatagggtgtgtgagtatgttgaccacctgcatgagcatttcaagtatcccgtgatgatccagcgggcttcctacatgcctcccaaggatcccggctactcaacagaaatgaaggaggaatctgtaaagaaacaccagtatccagatggtgaagtttggaagaaactccttcctgctcaagaaaattaagtgctcagccccaacaacttttttctttctgaagtgaaagggcttaaaatttcttggaaatagttttacaaaaatggatttaaaaaatcctaccgatcaagatgagttcagctagaagtcataccaccctcaggaatcagctaagtaattattacttgattcttttagcaaatcaatgcacgttatcctacttaatccttaaataagtttagatttaactaacccaaagtccaggaggatgttcttacaaaaatagctatatcaagggctggcacctagacattaaactgtaatttgaaaataagcaacgtgttgcataacttgttggaataattccttgttctgtttaacacttgtcataaattagcagaataaaaatagtcgtgc

SEQ ID NO: 12868 - DNA, 547 bp, Homo sapiens
  misc_feature (1)...(547): n = a,t,c or g
gccattaggaaagatacttacatgttttattcaaaattcttttaagccaccaccaaagaagagaaagaaattaacataataactctccgggtggttccctgtttacaaagtaagtttaacttttactttgttttccttcagagccctaaattcaactcctactttattccatatttccattttcagtcatccttgatgcctgaaatgatttagttgatgccatattgatttcgttcttgtttgcttcctcaaaatgtttcttcatttttctggtccccttgggctcattttctaaggtgtgtttttctaatgtccatatcctggcacaattgccaggcagcaccatgacctagggaggaccctcattatgaactgcattctacaggaaaaaagacgcacgtccccttcaaatgatgtggcttggccccatggaaaacagagttggtgnctgagtcaggtttgcttcccagagcttcagggccattgctattggctctttctgacgcttcctcatttgcaaacaatgngaatctggctgccctaaaaa

SEQ ID NO: 12869 - DNA, 1639 bp, Homo sapiens
agattttgacagtgaagaactggagaaggaattggacatcctccttcaggataccaccaaagaacctttggatctgcctgacaacccccgcaataggcattttaccaacagcgtgcctaaccctaggatctcagatgctgaacttgaagctgaacttgagaaactgtccttatcagagggaggtttggtcccaagcagtaaatctccaaaaaggcaattggaaccgactctaaagccattgtaggaccctcaagtgaaggaccctcatgtaaaagagagaccaggcctgctgggtgtgtacatagttatttaaacaagaaactctcagaatgtgtttggaagaggagaaaggagaaccactgattttatctggatgctactacttactacaggacagatagaatttctggaagcgatgctccaaaggcttgctcccagctgtatcatggacctgccttctcatctttatagtgccacgatttatacagtcctgtgtctgacctgtcatttcatagcctgcagttcttgccattggcacacttagatttgtcttcacccaccagcttcgttccagcccatgaaggggaaagatttgcagctttgccaaatctgaatcagttcccactccccccctgcggttttttagaggggtttatcctgtcgctaatgtcagttaaatagcttattcctgtcccacttgatttcactggtaagaatgagaatgaaatacttaaaggttttatttgaggggacttagctgccattttatggaaaaacatgtagtataaaaggtttttctccagggtcatttgacagaattctccaggtgttcagagaaagaggtcgccccaagtgggcccagagttcgtgacagtccggaggggctggtgtggccggtgggcgctgcctcttcatctgatggagccaggaggtccgccggtgggggaaaggcttcttccgaggcttctgcactcgcctgggaagaggcccagtcactacaggaccctgagatgtccagaccccttatgcaaagaggcaaaattgttgccttggccccatcatggagtaacttaaaaatacatatctatcttccagaacaagccacacaacaacacacctcccctccttgagcctggcacacagcaccgggctctctgaatttggaaagtgtttcattttgtggcctactgctcggggcaggggggctgagccaggatgtgcaatagaagcaggggttgtcccctctgccagatctgtggggagctgcccaggccacccgtgcacctgtcctgcttcctgcagtccccactccctgcctcctttgagggactgggggacttggggtagggggacagacgggaaagggtctgaatgctctggcaatggcgagaagaagcgatcgccacactgccactctgctgcccagccaccaggatttctgcctggagccctttgccctgtccctgctgcctgaggtggcgtagagcagaggagaagaatttgctccaggccaggagcacaaatcgttgttcaatgaatttctctccaactcgaccttggtaaacggaaatgttgggggtgaagagaaacaatcactattttttttcttttttatctggtaaataattaaaagaaaaac

SEQ ID NO: 12870 - DNA, 849 bp, Homo sapiens
cgactgcgcacgcgcggctggttataaacaacttgtgaaatgagtgatttggaagatgatgagacaccccagctttctgcccatggccttagcagctctccaggaattttatgctgagcaaaagcaacaaattgagccaggcgaggatgataaatataacattggaataatagaagagaattggcaactgagccagttttggtatagtcaggaaactgctctgcagctggcacaggaggcaattgcagctgtaggagaaggtggcagaatcgcatgtgtgagtgcccctagtgtttaccagaaactcagagagctgtgcagagaaaacttttcgatatacatctttgaatatgacaaaagatttgccatgtatggagaggagtttattttctatgattacaataatccattggacttacccgaaagaattgctgcacatagttttgacatcgtaatagcagatcctccctatctttcggaggaatgtctcagaaaaacatcggaaaccgtcaagtacctgacgcggggcaagattctgctgtgcacaggtgccatcatggaagaacaggcagcagaactccttggagtgaagatgtgcacgtttgttccaagacacacccggaacttggcaaatgagtttcgctgttatgtgaattatgattctgggctggactgtgggatctgattacagacggtgacataacacaggaaggaaccctgtcacattcctctttttgtattttcgtagtagatttaaaagttataatctcttcccctccccccaaactggagctgtccctggcctggttttcaaaataaagtgtgcgatcttcaaaaaaaaaaaaaaaa

SEQ ID NO: 12871 - DNA, 1230 bp, Homo sapiens
gataattaaggggaagtggatggaggacacagaatagtaggaaatggttttgtaatgctccattgcgcacatagcaaacctcattcaacatacagacctgctcccttttccctaggtccaaagaccttaaaaaacctggagctagaaagcagtagactggaggcttctacagactgtaggattcaaggtgatatttgcagactggctttatgagagacaacactgatctactaggggctggaccctagattggttgccagggcttgtgtgtgaatcaaccctacgaggaaaaacctactaccaaaccagaagagcaggcctaagagtactttgagcttctagaagaagtaagcgggaaaggaagagaaagagtagaaagttggtgcatcttctcctccccaagagcctgagtataagaagttggattttaagggtgggggagctgggttggagaaaggtaatataattaaagccaccacaaaacaacctaaacaagccatgttcatgagtaattgtaagtggcttctggatgagacctggcagtgtctctacatacttcctcagggagatagcaattgaaaatgtaattgaataaataaggaaaggaactgctatttggtgtgttcctctgtggacccagtttatttaatccttaaaataatatttttgggaagacattgattttgtccatttatgtggatgggaaaactgagactcattaatttgtccaatgtcgaacagctggtgttagtagagcctagactcaaacccagcttttaaagcccttgttctttactccactaaactgtaacctgtaatcctgtatgcactaacaggagttttcggtgaccttgaaaacacagattactataattactataataaatcccttacattcctgtctctagcatggtttagggagtgccaaggctcaatgtagatggggtcaccttgtcagagcatctgttcatacagaaactgggtttcctgcagaccccaggtgctgcataggattcctcaaaccctacaggatatatctccccactggctgctgtccattttgcttgttaccctgactccccctcttcagccagagcagtctttgtaactaaagctgccagcctggctcatctttcctgacaacgtgcatctcctgccctgtgatcacctttgtgcttggctcctgcccttcagcctgaatgtgttctaggaggctgaattcctgcttcg

SEQ ID NO: 12872 - DNA, 166 bp, Homo sapiens
gacctgcttaatatattcaggtcctttgccaatttttgagttgggtttactttttgctgttgagttttaggagttttctctgtattctggatattactcccttatcagatacatgatttgcaaatattttctccatgctgtggggtttttctttttttcacttttt

SEQ ID NO: 12873 - DNA, 434 bp, Homo sapiens
ggacaagtcaggattgtgcctccagtcagaaggaccatgaagagagagaagagggcagagccgtgcatggggctgctccccaggacctgagcaggaacctggagttttcagagctgcctgatcattgctacagaatgaactctagcccagctgggaccccaagtccacagccctccagggccaatgggaacatcaacctggggccttcagccaacccaaatgcccagcccacggacttcgacttcctcaaagtcatcggcaaagggaactacgggaaggtcctactggccaagcgcaagtctgatggggcgttctatgcagtgaaggtactacagaaaaagtccatctttaaagaagaaagagcagagccacatcatggcagagcgcagtgtgcttctgaagaacgtgcggcaccccttcctcgtgggcctgcc

SEQ ID NO: 12874 - DNA, 1305 bp, Homo sapiens
gccgcttcttccgccggagcgtcatctgcgactccaatggcactgcactggagcttcccggccttcctctttccctgccccagcccagcatccccgcggctgtcccgcagagtgctccaccggacgcccaccgggaagagaccgtgaccgccaccgccacttcccaggtagcccagcagcctccagccgctgccgcccctggggaacaggccgtcgcgggccctgccccctcgactgtccccagcagtaccagcaaagaccgcccagtgtcccagcctagccttgtggggagcaaagaggagccgccgccggcgagaagtggcagcggcggcggcagcgccaaggagccacaggaggaacggagccagcagcaggatgatatcgaagagctggagaccaaggccgtgggaatgtctaacgatggccgctttctcaagtttgacatcgaaatcggcagaggctcctttaagacggtctacaaaggtctggacactgaaaccaccgtggaagtcgcctggtgtgaactgcaggatcgaaaattaacaaagtctgagaggcagagatttaaagaagaagctgaaatgttaaaaggtcttcagcatcccaatattgttagattttatgattcctgggaatccacagtaaaaggaaagaagtgcattgttttggtgactgaacttatgacgtctggaacacttaaaacgtatctgaaaaggtttaaagtgatgaagatcaaagttctaagaagctggtgccgtcagatccttaaaggtcttcagtttcttcatactcgaactccacctatcattcaccgcgatcttaaatgtgacaacatctttatcaccggccctactggctcagtcaagattggagacctcggtctggcaaccctgaagcgggcttcttttgccaagagtgtgataggtaccccagagttcatggcccctgagatgtatgaggagaaatatgatgaatcccgttgacgtttatgcttttgggatgtgcatgcttgagatggctacatctgaatatccttactcggagtgcccaaaaatgctgcgcagatctaccgtcgcgtgaccagtggggtgaagccagccagttttgacaaagtagcaattcctgaagtgaaggaaattattgaaggatgcatacgacaaaacaaagatgaaagatattccatcaaagaccttttgaaccatgccttcttccaagaggaaacaggagtacgggtagaattagcagaagaagatgatggagaaaaaatagccataaaattatggctacgtattgaagatattaaga

SEQ ID NO: 12875 - DNA, 1307 bp, Homo sapiens
ggctaaacatcatgatgaagtttcttaaacagactttcttagtggaaatccatttagatctgggagtgctctatggggagtgctgacgtcaaagagcaaatgtctataaggggcccttttaaaatgaacattttcctcattgagcaagctgggattctctaatgtagaaatcaagccatctttataatttcacttcagatgtttatgtttttgttttttttggctccaatgatggtaaaaataaaacactacgcattacttaaaggagtttccctcacatgtaaacactgttaggaagtctggattaagttgaaagtcctgttttaactttttttctctcatataccaaacactctgtatttctcttaaagaagccctttaagagaaagccctaattttattatctgacagtaaagtttgctgcaagtgtatgagttcaaacacatcccttgttttctgtccctaggggaaaagtcatgtagttttagcttggctccagtgttaatattatattcagtagcagccttagaagagtggtctaagacttgaacctggagcaattttatagcacagaatcctacgaagataggactgtgaacatttgttttctttttcgtgtgtgtcaaactaactggtttttgctttaccaataaaatgtcctcggcagagtaaaattttaaacgtgaaaattatagatcttgatattgaatccatcagtgattcaagagatacacctatttgcctaaaacaacctaagatgtattggttatggaatcatgtgttggataggttcttaagacctgtttcctcaaatcttgacacagttttcaagggtggcttattgacttgcacggttgggcagataatccagatttacctaagattgggtaaaaaagtcatctgtgactttgctggcagggcatttgctaagtggagtacaggatctaaaagggttttcttagaaagggcaatattgtccaatgaagtaagcagaaggactctgggttagaagcatctgcacaaaaactggtgagacctactctccactgctctgcagctggatggctgatggcaggctgagcagtggggaagcaggttttaacaacagggagtccttccaggtcactgtatattgagaagaaacataaaactattgtctgttacattccgaggtcagccttcttcttaacgttttataatatgcaaatgccagcttctggaaagcaagtatcatcatgtaccaaatgctttatacaccatcacattcatgaattttttagcatggtcagaacttgtgtaaatatgtc

SEQ ID NO: 12876 - DNA, 611 bp, Homo sapiens
ggaaaagtattttctagataaagcagttggatttgatgggtgagccaggagaccagcagcagggagggtgggtggtccaatgggcagagttatggctaggaagtgaagagtcaagagcccctgttttacccacagtccatgactgtaggatccaaggcatgaccccttcccaacagcaatgcccctttaagagagggaaatgtgaatcaaaaaggtaaacaagggtcccttgctccctggagggaaactgctggcccgtctgcctgaatagccactggaaggcaggccttggttaggccttcccactgacacccagtgggacgtgatggcagagcagttggtgcttttgtcaacatgctgcttccagatcttcaggtaaggaaatagcccccgttttcagtgcccagagcaaggcttcaggccagatcagcagcccccatcctgtctctgtgtatgggaacagagccaggcttggacttgggtgcagttggctgtgagtagctcgatggcccatgactggcccttctacagacccacacagcacaggacagtcacagagctgtgtccactgacctcggagcgaaatggactttggggatctttgtttttcc

SEQ ID NO: 12877 - DNA, 403 bp, Homo sapiens
  misc_feature (1)...(403): n = a,t,c or g
caggcaaccaaaaccacttggccctggctttaaagggaatttnggatgatcagntcgtgtcccaagggcagagttgantaggctgcaccccagaaggttaacctcaatttaccatttcaaatcaaccaattcaaagtatacatttactgctttttagtatattgacactgttgtacaaccattccattaccaccatctaattccagaatattcttaccacaccaaaaagaaacacttnnnnnnnnnnnnnnnnnnnnnnnnnnnnnnnnnnnnnnnnnnnnnnnnnnnnnnnnnnnnnnnnnnnnnnnnnnnnnnnnnnnnnnnnnnnnnnnnnnnnnnnnnnnnnnnnnnnnnnnnnnnnnnnnnnnnnnttagccaggtatgatgatgtacacctatatcg

SEQ ID NO: 12878 - DNA, 595 bp, Homo sapiens
aatatattagggaaagaaagtagccttctttttatagcaagagtaaaaaagtctcaaagtcatcaaataagagcaagagttgatagagcttttacaatcaatactcacctaattctgataaaaggaatactgcaatgttagcaataagtttttttcttctgtaatgactctacgttatcctgtttccctgtgcctaccaaacactgtcaatgtttattacaaaattttaaagaagaatatgtaacatgcagtactgatattataattctcattttactttcattatttctaataagagattatgtgacttctttttcttttagttctattctacattcttaatattgtatattacctgaataattcaatttttttctaattgaatttcctattagttgactaaaagaagtgtcatgtttactcatatatgtagaacatgactgcctatcagtagattgatctgtatttaatattcgttaattaaatctgcagttttatttttgaaggaagccataactatttaatttccaaataattgcttcataaagaatcccatactctcagtttgcacaaaaaaaaaaaaaaaagtcgacgc

SEQ ID NO: 12879 - DNA, 554 bp, Homo sapiens
  misc_feature (1)...(554): n = a,t,c or g
ggtgtntnccnctgaaaccnnnnnnnnnnnnnnnnnnnnnnnnnnnnnnnnnnnnnnnnnnnnnnnnnnnnnnnnnnnnnnnnnnggcacgagctggagagtccaaggccatcaagatgctggcagttgtgtgtcttgtgaggcctctgctcactggttcatagccagccagcttcttgctgggcctcacattgtagaaggnnnnnnnnnnnnnnnnnnnnnnnnnnnnnnnnnnnnnnnnnnncatgaaggctgcaccttcatgaccaagtcacctgccaaagaccctaacagcactgcatgggagattaggaattcaacatattaatttggggggagaatacaaacattcagttcnnnnnnnnnnnnnnnnnnnnnnnnnnnnnnnnnnnnnnnnnnnnnnnnnnnnnnnnnnnnnnnnnnnnnnnnnnnnnnnnnnnnnnnnnnnnnnnnnnnnnnnnnnnnnnnnnagccaccatccctggccaaaaccacatagtttatgaattgagtttgtaagttgntgtgttgagaataaaacttcagggccagtt

SEQ ID NO: 12880 - DNA, 496 bp, Homo sapiens
ggcaggagctgtggcggttttcctaatcctgcgaatatgggtagtgcttcgttccatggacgttacgccccgggagtctctcagtatcttggtagtggctgggtccggtgggcataccactgagatcctgaggctgcttgggagcttgtccaatgcctactcacctagacattatgtcattgctgacactgatgaaatgagtgccaataaaataaattcttttgaactagatcgagctgatagagaccctagtaacatgtataccaaatactacattcaccgaattccaagaagccgggaggttcagcagtcctggccctccaccgttttcaccaccttgcactccatgtggctctcctttcccctaattcacagggtgaagccagatttggtgttgtgtaacggaccaggaacatgtgttcctatctgtgtatctgcccttctccttgggatactaggaataaagaaagtgatcattgtctacgttgaaagcatc

SEQ ID NO: 12881 - DNA, 994 bp, Homo sapiens
gctgcccgcttctcaccctatgtgggtggggccacagactcacatcctgaccttgcacaaacagcccctctggacacagccccatgtacacggcctcaagggatgtctcacatcctctgtctatttgagacttagaaaaatcctacaaggctggcagtgacagaactaagatgatcatctccagtttatagaccagaaccagagctcagagaggctagatgattgattaccaagtgccggactagcaagtgctggagtcgggactaacccaggtcccttgtcccaagttccactgctgcctcttgaatgcagggacaaatgccacacggctctcaccagtggctagtggtgggtactcaatgtgtacttttgggttcacagaagcacagcacccatggggaagggtccatctcagagaatttacgagcagggatgaaggcctccctgtctaaaatccctccttcatcccccgctggtggcagaatctgttaccagaggacaaagcctttggctcttctaatcagagtgcaagctgggagcacaggcactgcaggagagaatgcccagtgaccagtcactgaccctgtgcagaacctcctggaagcgagctttgctgggagagggggtagctagcctgagagggaaccctccaagggacctcaaaggtgattgtgccaggctctgcgcctgccccacaccctcccttaccctcctccagaccattcaggacacagggaaatcagggttacaaatcttcttgatccacttctctcaggatcccctctcttcctacccttcctcaccacttccctcagtcccaactccttttccctatttccttctcctcctgtctttaaagcctgcctcttccaggaagacccccctattgctgctggggctccccatttgcttactttgcatttgtgcccactctccacccctgctcccctgagctgaaataaaaatacaataaacttactataaaaaaaaaaaa

SEQ ID NO: 12882 - DNA, 1631 bp, Homo sapiens
  misc_feature (1)...(1631): n = a,t,c or g
cacaagcaccagctgcggggactccaacagcatctgcccggccccctccacgatgtccaaggccgaggaggccaagaagctggcgggccgcgcggctgtggagaaccacgtgaggaataaccaagtgctgggaattggaagtggttctacaattgtccatgctgtgcagcgaatagctgaaagggtgaagcaagagaatctgaacctcgtctgtattcccacttccttccaggcccgccagctcatcctgcagtatggcttgaccctcagtgatctggatcgacacccanagatcgaccttgccatcgatggtgctgatgaagtagatgctgatctcaatctcatcaagggtggcggaggctgcctgacccaggagaagattgtggctggctatgctagtcgcttcatcgtgatcgctgatttcaggaaagattcgaagaatctcggggatcagtggcacaagggaatccccatcgaggtcatcccaatggcctatgtcccagtgagccgagctgtgagccagaagtttgggggcgtggttgaacttcgaatggctgtcaacaaggctggtcctgtggtgacagataatgggaattttatcttggactggaagtttgaccgggtacacaaatggagtgaagtgaatacagctatcaaaatgatcccaggtgtggtggacacaggcctattcatcaacatggctgagagagtctactttgggatgcaggatggctcagtgaacatgagggagaagcctttctgttgaccctgcaaggagcagagtgtgttcaccttgagtctccagcccacagccaaggtggacgtacctctccaggagcctttgccttaatgtatctctgcctggacaacttgtggtggggggtggggggaagagtgggagggggagttaaatccagtcttatgaagtattgttattaaatgtctttttaaaaagagaaatataaacatatatttttactattaaaatattcagttttttaaatgaagtagaacttgagttcatgttttatatgaaatatttaccaaaaaaaaaaaatgaggtaaactgtatttaaaacctttgacttgagtctgctggtaaagcttctgaatattgagtttgctgagaaataaaaatcaaaacttctttaagctggtaaagtgaggggcccaccagcagtgatctcctgatgccttactggaaactttgtttacttgtctgctaccctctgatttgtttttagttagtttttattgtgagcacacatagtacctagttacatcttaagatcaggtttataaaactgtggagtggagcggtatggtatggaatgacttggaatgtaagctgtcagggagaaaatgttgttacacttttgctaagatctgggggtttcttcatattcctgctgttggaagcagttgaccagaaatgcttgccagtactgccaaagcactgctgtgaaatgtgaagtactttgtttttttatttttaatgattttctttttgttattaatatttttctctgttcctttgttattacttgcatggtttggcgtcagaagtccttacctctttatattgtttgcaggtttaaataaaacagtgtggtgccaaaaaaaaaaaaaaa

SEQ ID NO: 12883 - DNA, 1627 bp, Homo sapiens
gagcctaggactgagggcgatggctgctgtggccgtggctgttcgcgaggactcgggatccgggatgaaggcggcttccccctgggcctgggtggggagggaaatgaccaaagaagaaaagctgcagcttcggaaggaaaagaaacagcagaagaagaaacggaaggaagaaaagggggcagaaccagagactggctctgctgtatctgcagcccaatgtcaagtaggcccaaccagagaactgccagaatcgggcattcagttgggcactcctcgggagaaagttccagctggtcggagtaaggccgaacttcgggctgagcgtcgagccaagcaggaggccgagccgggccctgaaacaggcaagaaaaggggaacaaggaggaccacctcctaaggccagccccagcacagctgtaggaaaccccctcaggagtgaagcgtctccctgagtaccctcaggttgatgacctacttctgagaaggcttgttaaaaaaccagagcgtcaacaggttcctacacgaaaggattatggatccaaagtcagtctcttctctcacctaccccagtacagcagacaaaactctctgacccagtttatgagcatcccatcctctgtgatccacccagccatggtgcgactcggcctgcagtactcccagggcctggtcagtggctccaatgcccggtgtattgccctgcttcgtgccttgcagcaggtgattcaggattacacaacaccgcctaatgaagaactctccagggatctagtgaataaactaaaaccctacatgagcttcctgactcagtgccgtcccctgtcagcgaagcatgcacaacgccatcaagttccttaacaaggaaatcaccagtgtgggcagttccaagcgggaagaggaggccaagtcagaacttcgagcagccattgatcggtatgtgcaagagaagattgtgctagcagctcaggcaatttcacgctttgcttaccagaagatcagtaatggagatgtgatcctggtatatggatgctcatctctggtatcacgaattcttcaggaggcttggacagagggccggcggtttcgggtggtagtggtggacagccggccatggctggaaggaaggcacacactacgttctctagtccatgctggtgtcccagcctcctacctgctgattcctgcagcctcctatgtgctcccagaggtttccaaggtgctattgggagctcatgcactcttggccaacgggtctgtgatgtcacgggtagggacagcacagttagccctggtggctcgagcccataatgtaccagtgctggtttgctgtgaaacatacaagttctgtgagcgtgtgcagactgatgcctttgtctctaatgagctagatgaccctgatgatctgcaatgtaagcggggagaacatgttgcgctggctaactggcagaaccacgcatccctacggttgttgaatctagtctatgatgtgactcccccagagcttgtggatctggtgatcacggagctggggatgatcccttgcagttctgtacctgttgttctacgagtcaagagcagtgaccagtgacgggggaaacacagggttaataaatgccatactccctac

SEQ ID NO: 12884 - DNA, 276 bp, Homo sapiens
tctcgaggatccgaattgcggccgcgtcgacgattgttgtttcctttttctcctcccgaaggaacagctgattcatgctcctcccgcaattgtcacgtctgtgatttatttggtgtttcgggcgtggtctctggagccccggcacgtggtgggccacgctgctggcgctcatgggccctggtgtttgcaccgcactttgtaatcagtcccgtggttgtctgtacagaattaaactattttccgatgaaaaaaaaagtcgacgcggccgcgaattcc

SEQ ID NO: 12885 - DNA, 2000 bp, Homo sapiens
  misc_feature (1)...(2000): n = a,t,c or g
tggcaacccccttggtggctgggtgggcagagggtgcttcccaaggaagggggcgccttgagcttcacagatgcatctttgtgtggggcccggaggccgtccctgtctcacccaacctccctccacacacaccttgcctctgccaagcaccaatgggtggcttctgtcttctttgccactgcaaacaaccacgtgcctctgtcccctcgggggcctcgtttgggtctcattcacgcaggcttcacttgcccttaggcagcaggcgaggaagggcccctccagcccctttaccgggagcctcaggatgcccaggcgccaggtgggtgaggccaggcaggtagggccagacaggtgaggacggtgccctcctctgccttataaccttacccccgcttgcctgacagaaacatggcatcaggtgggtggtgatcggagacgagaactacggcgagggctcgagccgggagcatgcagctctggagcctcgccaccttgggggccgggccatcatcaccaagagctttgcccaggatccacgagaccaacctgaagaaacagggccctgctgcctctgaccttcgctgacccggctgactacaacaagattcaccctgtggacaagctgaccattcagggcctgaaggacttcacccctgcaagcccctgaagtgcatcatcaagcaccccaaacgggacccaggagaccatcctcctgaaccacaccttcaacgagacgcagattgagtggttccgcgctgccagtgcccctcaacagaatgaaggaactgcaacagtgagggcagtgccctcncccgccgcgctggcgtcaagttcagctccacgtgtgccatcagtggatccgatccgtccagccatggccttcctattccaagatggtgtgaccagacatgcttcctgctccccgcttaggccccacggagtgactgtggttgtggtgggggggttcttaaaataactttttagcccccgtcttcctattttgagtttggttcagatcttaagcagctccatgcaactgtatttatttttgatgacaagactcccatctaaagtttttctcctgcctgatcatttcattggtggctgaaggattctagagaaccttttgttcttgcaaggaaaacaagaatccaaaaccagtgactgttctgtgagtgattggtgtctgtgccgtttgttgtcaagtccagggtccaggaagggtcttttcagtcaaggtcagtggaggcccaacagccacagccacagatggatccatcactgcagtgaaggaggagcagggccctaaatggtggaggagcgggggcaagctgggtgggcactcctgggccttgcctcactgtccagctccgagacactatctccttagcatcggccttaagctgctgttgtcttcacagccggccataccaccttcccgcaggctggtagggtccactgtccagcccagggctagttgctggtccaccaggagatgagagcccaggcctggctcactgatggatcccacaagcgtgtaacggagcctccttctttggcagctcctcactggaagtggtggcatctgctgagctgggccctgtgggggacgtgtcaacaaagctctcgtccaccacccggaagcggatctcctcgccggtgtccatgtagaggtcgtgtgctccttcctccgtctcgtactcccacacccacacctgctccgcttcgtcgaacttggctggctgctgcagtgactctggggggatgagaatgtcatcgaagaagcctagagagacgtgcactccttctgggctgcagcctttgatcttcccaatgagaatctcatctaggaatggatgaaacaccacgcagcgaaaatggactttggtgtgtgatgcgccatccccagggaatacataggcatcctccagtttggtgatatcaaacagacaaatgcagagtcccacgttgttacacgaccttgttggccaacttcttgc

SEQ ID NO: 12886 - DNA, 839 bp, Homo sapiens
ggcacgagaactggaagaaaaagatcaagctgatgaggttaggatacccaggccctttggacttaaagatcactagtgtctaaattccatcgatggcatttcagtctataggtaaacttcctggaagctggatttggagacagtttatcatctgattattgggctttcgtataggtccttagggagcagcttacctgaaatgcatttagtgtacaccagtctgtaaacttcaacctgtaatgaaagtgtaataaatgtacattgagttgatgtgataatgtgatataataagaaatatatatttgatcttcctatctagttccttgttcagagctcctaaaacccttgtaatttccaaagtgatggagtacatcttttgttctagtatttggtctttgacccagttcctgacacaaagctcctaaattcctttaaatttcccagtgataggagaattttttgttctaatgaggtcactcttgatgggcacctggataactcaggatgggggctgctcacaaagaccacatcatgattggaagtttcaaactttcagtctcccacctccagagaggggagaggggctggagatttgtgtcaataatccatcaggcctatgtcaacaagacataatccgttaactatggagttcagggagcttcagggttggcaaacattttgatgtgccaggaaggtgacgcactccagctttatgaagtcagcaagtcctgtgctcaggatgcttctggaccttgccccaggtaccccttcatgtggctgttgttcatctgtatcctttgtagtagccttaaaataaactgttaaacacaaaaaaaaaa

SEQ ID NO: 12887 - DNA, 797 bp, Homo sapiens
  misc_feature (1)...(797): n = a,t,c or g
agactgcatcacaagaaaaaaaatttgcaagggatggttcacgagacacatttgggacgaaggtgaaagagaaattccccattctgagtgtcctagttgggttcctccgactctaaacaagggacttgggttcagttagtgtacagcgggggctcacgtccactaaggaacatgtagaatgtaaccaccgggtgacagggaagctgcggtatttactacctagcccccatcttcactggttattccacttatttaaaatgtccagaataagcaaatctccatatagaggaagtagattagtggttgcttcgggatgggaggaatgggaagattgaggtctttcttttgcagtgataaaaatgtcctaaaattgactgtagcgatggtcacacaactctgaatatgcttaagaccattgaattacacactttacgttggtgaattgtatggtatgtaaattatagttcaataacatagttacaaaagataatcaaaagcatgaaagcactattgatgtggtttggatctgtgtcctcaccgagtctcatgttgaaatgtaagccctctggtgggaggcgatgggattatggggcagagtcctcacaaacggtttagcaccacccgctcagtgctgttctcctgatattgagtcctcatcacatctggttgcttcaaagtgtgtggtgcctcccctctgtctccctcctgctctggccatataagatnnnnnnnnnnnnnnnnnnnnnnnnnnnnnnnnnnnnnnnnnnnnnnnnnnnnnnnnnnnnnaaaagctgctg

SEQ ID NO: 12888 - DNA, 1366 bp, Homo sapiens
tttttttttttttttttttgatttggtaattaaagtttatttgaacacaaaatactttctctgtctataaaattggctgttagcagtagcagcagcatgtcctggccaaggggagtagatttctccagactactaaagccatgtatatagccattcccacttcccatattctgtggatatgtacatgtgcatggtagctagagtccctccaccagagtatctctctcatgatggtttcttcagggagaggaagaggagacctgggtgaagagctgggatggttttgagtggggcaagccattaggctgtaccttgaagcccagtctctctggatagctgtactgcaggtgtcctctgaggcccttctctgtactctgtctgctgagggaatggggtattttgactcccatagaaagcactagcctaagtcaccaaatgactgcttggtccccactgaagcagtgtagctctccatagtatttttggtggttatggattacatgtgtggccagctcatgctttttcttgagcaggggctgtccatgacctgtgctcataccatgctttctaagttctctttggacagggcccaagcggctggcctcagcctgagtttcagagagtgtgtaggagtcctggtaatcttgaagcagtttgaccacctccagatggttgaactgcacagcatcatccaggggaatgttgccccacctgtccttggcaaaaggattcactttgcaagcctcgatcaggaatttaacaacttcgatgtgtccttcagctgcagcaacatgcagagctgtgcgcgagtcatagtctttctgttccatatccatggctgacaaggcaaaccttcgaaaaacctgaaaacatcgccactaataggcagcaaaataaacaggttgacccaaagtcttgtttcccgaaattcctgcccccctttcaacgcccgtgggtcctaaacttcccgagcaacagtgcctcaggttgtcatagttgtggaaattgaagagagacaccaacttctggcagaagctggtccccctatggctgttccccagcttgtccaatgggggtgacaggcacatcattcccatgacattgggtaccacccaggaggatggctcctgatacagctgacttggctggcaggcccacgtggaaggcaaactggccagagaagtcatacatgccgcaggaatgcatgaggctgagggtgttgcgcactgcttcagcactcagcacactctcgcctgtgatggggcagatcccaccgttggcgagggtggctgccatgacactgcctgattcacaagtgacctccacagaacacagctggaagtagagatcaagggcagccatcatc

SEQ ID NO: 12889 - DNA, 1458 bp, Homo sapiens
ttcccacagctggaggggaaggtggagagtgtgactgcaggatccccactcaccaaccagttctatctggctgctccccgaggtgcctgctacggggctgaccatgacctgggccgcctgcacccttgtgtgatggcctccttgagggcccagagcccatccccaacctctatctgacaggccaggatatcttcacctgtggactggtcggggccctgcaaggtgcctgctgtgcagcagcgccatcctgaagcggaacttgtactcagaccttaagaatcttgattctaggatccgggcacagaagaaaaagaattagttccatcagggaggagtcagaggaatttgcccaatggctggggcatctcccttgacttacccataatgtctttctgcattagttccttgcacgtataaagcactctaatttggttctgatgcctgaagagaggcctagtttaaatcacaattccgaatctggggcaatggaatcactgcttccagctggggcaggtgagatctttacgccttttataacatgccatccctactaataggatattgacttggatagcttgatgtctcatgacgagcggcgctctgcatccctcacccatgcctcctaactcagtgatcaaagcgaatattccatctgtggatagaacccctggcagtgttgtcagctcaacctggtgggttcagttctgtcctgaggcttctgctctcattcatttagtgctacgctgcacagttctacactgtcaagggaaaagggagacctaatgaggcttaactcaaaacctgggcatggttttggttgccattccataggtttggagagctctagatctcttttgtgctgggttcagtggctcttcaggggacaggaaatgcctgtgtctggccagtgtggttctggagctttggggtaacagcaggatccatcagttagtagggtgcatgtcagatgatcatatccaattcatatggaagtcccgggtctgtcttccttatcatcggggtggcagctggttctcaatgtgccagcagggactcagtacctgagcctcaatcaagccttatccaccaaatacacagggaagggtgatgcagggaagggtgacatcaggagtcagggcatggactggtaagatgaatactttgctgggctgaagcaggctgcagggcattccagccaagggcacagcaggggacagtgcagggaggtgtggggtaagggagggaagtcacatcagaaaagggaaagccacggaatgtgtgtgaagcccagaaatggcatttgcagttaattagcacatgtgagggttagacaggtaggtgaatgcaagctcaaggtttggaaaaatgacttttcagttatgtctttggtatcagacatacgaaaggtctctttgtagttcgtgttaatgtaacattaataaatttattgattccatt

SEQ ID NO: 12890 - DNA, 2374 bp, Homo sapiens
gctgcctgggtttctgcaaaagatgctggtttcagcagccctgatgggtcagatccaaaattgaatttaggaggacttttactccaagcactcctggaatattggcctagaacacatgtgaatccaatggatgaagaggaaaatgaagtaaaccatgtaaatggggagcaggagaaccgagtgcagaagggaaatggatattttcaagtgcccccacatacacccgtgatctttggtgaagctggaggtcgcacactgttcaggctgctctgccgagattccgggggtgagactgagtctatgcttcttaatgaaacagtgccacaatgggtaattgacatcactgtggataaaaatatgcccaaattcaacaaaattcctttctacctccaacctcatgcatcttcaggagcaaaaaccttaaaaaaagatagactctctgctagtgacatgctccaagtccgaaaagttatggaacatgtttatgaaaaaattatcaacttggataatgagtctcaaaccactagctcttctaataatgaaaaaccaggagaacaggaaaaagaagaagatattgctgtgttggcagaggagaaaattgaacttttgtgccaggaccaggttttggatccaaatatggaccttcgaacagtgaaacacttcatatggaagagcggtggagacctcaccctccattaccgtcagaagtccacgtgaaggctgggctaatgctcctggatattcatttacgaccttcctctatggccccaagagtagtcctaggaagcccactgatccccaacgggagcaagacttctaacggctgattggtatggaccgagattatctttcaactgaagtgactaatcgagatgtaatatagaaaccagtctccatgtgtagattaagctgtccccagggaagcagagtgcaagagcagaagagccccaagcagactatgtctttcaagatgtacagaagactgacaacaggccagtgcagactttgcttcctccttttgtttcaaaggaccttatctacccattaacacttgttagagacacctcagtcgggccacaactgtctctgtttcaactttaagcccacacactctgtagcttttctaaaacagtacattccattcatgcagtagatatgaaggctttttccaagtttgtcatataaagtaatcaaattgttttcaccgtttaagacagttatttttaatgggaatttgctgttgcacaatttgagaaccagcccatttcataataaaagattaatgttgggcttgttgttaatattgcatctcagatgtgttcttgtaggaagatctgttgaaattccaggtgctggatcatagcacttggactgttgggccggagtttgtgcagcccatgcctagcgatgctgcacctcccatgatgtcctggctttgtggcaaccccagggaggtgcagcagtttcactccttcctccactgtgtccagttttatttacacaaagcgagctgagaccacaggttcttgctctggatgagcagcatgacaccatcaaaatttaagaccatgatgaaatttcagtttcattcaaatgttacctaaaatttatggtgtcagaataaagggagatcatagtgagttaatttgatattcatatcctggaagtatacatatttgtttttccaaagttttatatgcaggtttttgttgtacctgtatccagatcttcttttcactgttctaacaatctaacactttcatagaatcatttggatcttgtatagagtgtaacttattggggataaacacttcaacttttggcagaaaatactttggattctccccaaggtcatttgtattcagagtaaatcagtggtccacccccataaaactgtaagacaagcctcctgtatgaagccagaagcacaagtgccttcagagggcagttgattccagtccagttgcctccctagcttgtgtgtggcctgcctccaccatagcagggactagggagggaggcagggaacgttttttcttttctacatcttcacaggttcggctgggggcagctgataggcctaaggccataccttactatttaagatactctgatcgcacaactgcagagacagggttccctcactgctagtcagcttcttttggaaactggacaggccattgccacctgcactttgaagaagtgagcaaagacgtggccacatttctaataagttgaaatggtctttctcccttcctcagagagcaaccagcttcttttttttaaaagtcctttctatctgttggatacaacagtgtgcttttggtgcacattttttagcaatagttgtgaattaatggcaaaaaaaaaaaaa

SEQ ID NO: 12891 - DNA, 1657 bp, Homo sapiens
gtccaaatgaaaatcaggtgattgtggaaccatggggacttgggggtggggcagaggtgggaacatttgtatcagttgagtcagcttggtggctccctgtggagccagggctgagccttgtcacgcgcactcgccaattaagagatggaccagccagcagtcaagtgcattctccagtccttgcaagaaggatcagccctttctgtgccagcctcgatcgccttgtgctttggtctctttttctcccccccgcctgggatcctgcctcgcgcgggccgtcctgttgctgagactcggggtaccgttctgctgacccagctccctttagtcacgtttgcttggctctggtaccaaatagttggggattaccgaagagtccccttccttgcgtgtcagcacgggatgctgtgactgccacctgcgtcctccgtcaagtggcccgagctcgccgccgtgtgctgctgcgcctgagtgagttatgaggtgcctttcccggaaccctcctctcgcctggacccaagagaggcgacagctgtcggctgggggctcttggtttccagagggtctgggactggtttgggtgctttaaaatagatatttagttcagtggtgcttatgggggagatgggactagaacttaagtgtgagacttgggtggatgggaaagttaaatattggtctcttcaagttttttttttcttttgctttgttaccacttgtcactgtctccatgttaaaatgccaaaaatgatgtagttgttgttgcttttttccctattttccaccccagtcgctccttaccgtgactcctggcccttggagggcatgtagcagtgtctgtcctgccagtcccaaggccctgtgggaggagactggcctgcatctctctaagacttagtctgacgccacgcgcatctcttgttctgtgttcaatcagtagtccaggggagaagcttctgctacttcagagctttgctaaactaacctaatttgtccaaatcaccccaaaaccaccatctctgacgtaagcttccatgcgacagcctgatccgtttccctggacaggtctctttcctggaatgcagcccaggcacctgtgctcctggcacccttgaggtctctcctttgagccgtggtcaccgagagggttgaggacgcagcacccgaggtcccagcctttgcaggagcctccctgggcttagctggacttagatcttcggtggcctcatgtaaacgtggcagccagcctcttctagaaccctagcccagggactggagcaggaaagggaccttcaaagtgaagactgccttgtcccgcagctccttctggcttagattgaaacatgggcttcctaatgggttaaatcctttaaaacaaggagttgtgggggaagggtgtcgtgcactcctagagaaaggtacacagttgcccggttgggaatgtgcttggcgctgaccctgcgggcatctgactggtcttccagctcaggaaaaagaatttgaaagaggcttagcgtgaaggggaatcaaagaggaggttgtgatttggtcgaaggtgcctggtttagtgctgtaattgtcttattattttttttatatatatatttcttggagtaaacattttaaataaacaacaacattgtctactgtcaaaaaa

SEQ ID NO: 12892 - DNA, 302 bp, Homo sapiens
  misc_feature (1)...(302): n = a,t,c or g
tgtttgctttggttgcctgtgcttttgaggttttgctcaagaagtctttacccagactaatgtcctggaaattttctccaatgttttcttgtagtagtttcatagtttgaggctttagannnnnnnnnnnnnnnnnnnnnnnnnnnnnnnnnnnnnnnnnnnagagataggggtctagtttcattctttcccatatggatttccagttttccaagcagcatttatttatctannnnnnnnnnnnnnnnnnnnnnnnnnnnnnnnnnnnnnnnnngatcttgactcactgcaacctctgtctt

SEQ ID NO: 12893 - DNA, 2172 bp, Homo sapiens
cggcacgagggtttgatctaatcctaatcacagtgagctcttcattagctcaatatgtggtttgcctcaagtgtgcactgtttattactttgtaatatgccaccaagagtactgacatttagagttgtttaaaggccgagaactggaaacagcctttccctcattttctgtgtattggtgatgggagtaataacattttcggggagctttttaaatttcacagaagaggaaagtggcctgctctggcaggtatgtgcaggatacagtgtgtttcatctgttccggtgccaagaatgagcactgtactgtggcagttccctttggatttgtatgtgctctgggctcatgaagatattgcatcgtgagctgcagcagttgcactcttttttgatgacctaaaaagggcttatttccgaggaatgaaaggctcccatcatgactgtggatgtggaaaaccttttctagctgagagcatttatatctacaatacattttaaagtcagagttcgtgttccctgttttaatcacatgactacctgtcccagtacacgaaagggcgctggttggcattcttcttaatgtatttagtgaagatcataagaaatcctttaagagtttaaatgtctctgaaacaggcatacaggctctagtcaagaatgaattagagtgaaggaaagctgtgtgacacctggcattcctctctgttcatggagcttctttgaggcttgaagtttgattttactatctagacctctctggctaatacctattcttcaaccacctcggttactctgacataggaatttacttcttttccttgagtggaaaacactttagaaaataataacaaacattattataaactaatatatgtgagagtacttagttgaaacaaaaaggaattttagtagacagtattatattatctttgaaaatcaaggagaagtttatgcaactgaaaatgtttacacactgtgctgcaatctactgtttgtgaatgtcaatgtattatcaggaaacatgtctatacgatcgcagagttgtatttcctcacaaacttctttacgaagagtgaaatatgtttttgtacctctcagtttcagtcagggacatattttgtgcaatatttctgtgattgtgcctatgcgtgatgagtgaatgcatttcaatcatacattgcctaaatcataacttgatgatgcttgggaaagaatcaacagttaaaacttcatgaagttctaatgtctgtgttccaaaacacatcacattattaggttgtagggagatatgtatgtgtgctccctggggtggggagttttctagttactagaccatctccatttttagcacttggcagcctcatgatccttttataaataggagattaacaggagagcagcaatacgattttgccaatggaataacagatttgccggcattcactgaaagagggcagatattgggtccttgtgacttcaactgactcttccgaattgtatgaatttatcaatgtattagataaacccagtttcagaatgataaaaaatgttagaccaaataatgcggctaattaacagtcgtatgatttctagcccatgggtttaaaactgtatcttaaagagtcattttaaaataatataaatattaaaaaatgtaactgctatcttaatgttttgaaataagttaaaacactttaaaatatgaatactgtagtttaaaagaaagaaatggtgggaaggaaaagtagagaaagaaatgccaattccagtccaaacctttatttgccaagttttcttagaatgacttttaccagtttatgaattcttgtaaacagaatgtgtaacagaaatactgaaagacttttgcctaaagtggcattattgactgctactgtgatgctactgtaatgtaataaattattaaattgttgcaaagtgctgtttttgccttaaaattttattttgcgcatcttgaaaattatagtattaaaggtattgatactgtgcaaatgctgggcacgcttggcatgagataatcagtttttatttttatgaaattgtaatgtaactatgcaagtgtgtttatttgaagaacacaaaccaaagttatgggataaaaaaggttgtgggatgaaaaagttacaggataaaaaatgttgtggaaaggttgtgg

SEQ ID NO: 12894 - DNA, 1191 bp, Homo sapiens
cgccgcctaggtgtctgggcgatctatgggcaagagcaagggccacgatgacagattacggcgaggagcagcgcaacgagctggaggccctggagtccatctaccctgactccttcacaggcagatgtctctcagctatccctgtatagctccagtcctgttcatgttctctctcaccagcagtacatctgtgctgtgaggatgttaaggggatgagtgaagaggggtttgagagtgtcattaactggcttgattgcacattgatccaaccctcctaacaactagtcttccaaaatataaatggactctcctgataccacattctccttcagtagtgcttcacttgacaaggtcctgctaagtattatcagaaaatccacccagcttcaccattactgtgacgtctgaggctggagaaaatgatgaaactgtccagactaccctcaagtttacatacagtgaaaaatacccagatgaagctcccctttatgaaatattctcccaggaaaatctagaagataatgatgtctcagacattttaaaattactagcattacaggctgaagaaaatcttggtatggtgatgatttttactctagtgacagctgtgcaagaaaaattaaatgaaatagtagatcagataaaaactagaagagaagaagaaaagaaacaaaaagaaaaagaagcagaagaagctgaaaagcaattattccatggtactccagttacaattgagaatttcttaaattggaaagccaagtttgatgcagaactcttggaaattaaaaagaaaaggatgaaagaagaagaacaagcaggaaaaaataaattaagtgggaaacaactatttgaaacagatcataatcttgacacatctgatatccagttcttggaggatgctggaaacaacgtggaggtagatgagtctttgttccaagaaatggatgacttggagctggaggatgatgaagatgatccagactataatcctgctgacccagagagtgactcagctgactaatggactgtccccatctgcagagaggcttgactgccacagcatctgtggctatgctcagagggttatgattttcctttctttttttctaagaaaaaattattttcaggagaatattcttctgatagctttcatcattgaacttaataaactgaccttaaaatttcaaatat

SEQ ID NO: 12895 - DNA, 1195 bp, Homo sapiens
gggctgctgggcgaccacttcctgacagctccagttaatgggactgccagcaggctagacatccttcgccggaatgtgcagcgcttagttctgtgcccgggaggggcttctctctcttttgggattggagtgtggcattgccgccagaaagcctgcagaattccgggttgtgcagccaagcaggaacggtgtacctttctagacccatcctcttgcaatcttggaccctaagaaaagatgtggagtgggctgctacctcctggcctaaatgaaagtgacgctgagtcaaactcggaagatgaagctacgttggagaactctggacttaacttacaggaagataaagaggatgagagcatcagaaaaacagaaatcatagatttctcaacagatgaaccaaaaactgaaacagagtcaaatgtaaatgcctatgaagagtgtccttctggaattcccatagatatgtggaataaatttcaagaattgcataaaaaacattctgaacagaaaagcacaacctcaagattcagagggaaaagaagaaaacgctccagaaaagataaattgaagaatgaaaaagaattacatagtgaaccgtcctcaaatgaaacccagtggaaagagcttactcagtattttggagtcaatgatagatttgacccgcctgttaaaaggaaaaaagttgagaagtcaggccttgaaaagaggatagaccaggctgtggaggagtggaatattgagaaggctgaggaactcagcaaccagctagctactcgagagcttggtgtaaaaattgccaaagcagttgcctgccacaactttgtaaaagccaaaaaggaggttgaaaattcacaggctgcccgaaaaaagaagaaacttgcatgggggtttgaagcaaagaagagatgggaaaccaaaagcaacatgggatacatgtaacttgccagagtgcttcaagacatttgtagactcaaatgctcaatttactgagaatgttttcctgcctatgttaatatgtcagaaaattgatagcactaaaacaaaaataagcataaaatttgggattttgattatcagctcttttcagtctttctttaaggactttgtcctattgaagtgaataaaatgaagcattctgttatttgtataagaaatgtaagaaaaaaaatatagaaagaagaggataggattttgt

SEQ ID NO: 12896 - DNA, 447 bp, Homo sapiens
gaaattaagaggaaaagtggtcaaagaaaaactcttcatttctccctgattcttaaacgaaggtggttaatagaaactcaggctcccgtgacaaggcaggacaagagcctgtttcgctttcctcccttgaccctgccaggttcccaactcaaacactacctttctcattggtttctaagtcagtagagacaagatctgttttaatcagttgggggttcgagtagatctcatgggtacaggaggccagcagggaccaggccagtcagccatgctcaggacccctcggctcctcccccagcctctagctaccctgtatcgaggcaaggggaggccagtaaagtttgccaagcctgatcctgcagcctggtggggctggctggggtattcttttaccaaactctgttttaccgccagccccttgtacaccccaatcccatgtctccctcc

SEQ ID NO: 12897 - DNA, 811 bp, Homo sapiens
cgaagcggagatcccggggtcgcgcgagagccgcaagcggagttggtgggcgctatgctatcacccgaggcagagcgagtgctgcggtaccttgtagaagtggaggagctcgccgaggaggtgctggcggacaagcggcagattgtggacctggacactaaaaggaatcagaatcgagagggcctgagggccctgcagaaggatctcagcctctctgaagatgtgatggtttgcttcgggaacatgtttatcaagatgcctcaccctgagacaaaggaaatgattgaaaaagatcaagatcatctggataaagaaatagaaaaactgcggaacgaacttaaagtgaaggtcaaccgcctttttgaggcccaaggcaaaccggagctgaagggttttaacttgaaccccctcaaccaggatgagcttaaagctctcaaggtcatcttgaaaggatgagactcaagaaccaagatgggggaccagcaaccccccagggtcatggaggacccagggaccctccaaccttgacacctgtaagggacaggatctgccctgtaaggggccagcccgtcaggaatctggccatgaaaacctctttgtagtgcttggctactctgtgatggcaggagggaaccttcagcctgtctggctgctggacctggacaccagggctcggtggacacaagatctattgacgggccttggtagccaccagtgggtgtgtggggcagtggctgtgggggtgtaagaatgactgcaacaggcacttcccaacaatggcctgctgttcacatggaccctgagcaaggaa

SEQ ID NO: 12898 - DNA, 1546 bp, Homo sapiens
aaggcatatatctgcgtatgtgtggtacttagtcacatctttgtcaacaaactgttcgtttttaagttacaaatttgaatttaatgttgtcatcatcgtcatgtgtttccccaaagggaagccagtcattgaccatttaaaaagtctcctgctaagtatggaaatcagacagtaagagaaagccaaaaagcaatgcagagaaaggtgtccaagctgtcttcagccttccccagctaaagagcagaggagggcctgggctacttgggttccccatcggcctccagcattgcctccctcctcccactgcgactctgggatctccaggtgctgcccaaggagttgccttgattacagagaggggagcctccaattcggccaacttggagtcctttctgttttgaaggcatgggccagacccggcactgcgctcggagagccggtgggcctggcctccccgtcgacctcagtgcctttttgttttcagagagaaataggagtagggcgagtttgcctgaagctctgctgctggcttctcctgccaggaagtgaacaatggcggcggtgtgggagacaaggccaggagagccccgcgttcagtatgggttgagggtcacagacctccctcccatctgggtgcctgagttttgactccaatcagtgataccagaccacattgacagggaggatcaaattcctgacttacatttgcactggcttcttgtttaggctgaatcctaaaataaattagtcaaaaaattccaacaagtagccaggactgcagagacactccagtgcagagggagaaggacttgtaattttcaaaggcagggctggttttccaacccagcctctgagaaaccatttctttgctatcctctgccttcccaagtccctcttgggtcggttcaagcccaagcttgttcgtgtagcttcagaagttccctctccgacccaggctgagtccatactgcccctgatcccagaaggaatgctgacccctcgtcgtatgaactgtgcatagtctccagagcttcaaaggcaacacaagctcgcaactctaagatttttttaaaccacaaaaaccctggttagccatctcatgctcagccttatcacttccctccctttagaaactctctccctgctgtatattaaagggagcaggtggagagtcattttccttcgtcctgcatgtctctaacattaatagaaggcatggctcctgctgcaaccgctgtgaatgctgctgagaacctccctctatggggatggctattttatttttgagaaagaaaaaaaaaagtcatgtatatatacacataaaggcatatagctatatataaagagataagggtgtttatgaaatgagaaaattattggacaattcagactttactaaagcacagttagacccaaggcctatgctgaggtctaaacctctgaaaaaagtatagtatcgagtacccgttccctcccagaggtgggagttaactgctggtagtgccttctttggttgtgttgctcagtgtgttaagtgtttgtttcc

SEQ ID NO: 12899 - DNA, 1187 bp, Homo sapiens
tttttttttagcaaaaagtagacttttattacagcagcaactgaggcgaatcgaatggccccccagggccaccagctgcagcaccacctttctctcccgccccggccgccccagcgggattgtagaattcggctcccctagtgcccgtgggcctcctttccacacaggctgggcgggagccggcagatcagcgactagcccccaactagaaggcggctgctgagaaggcccaggcccacgtctgtgcaaaacaagtaaacaaagtgcagaggggaggaagagaggggaggggaaaggatgatgctcagaaccagggagcccccccagccctcctgaataataaaggagggaaggggctttcacagggtaatactgactggggggaagggacaggagggctgcagcacgtccagggacagccacagcgcagatcagggcctggcccgagtgagctctaagaggagacggtgacagcggctgagttgagggtactgttcctggcaaaattgaacttgttcaaggtctcttctagcagagaagtcaaccggctctggtcagcctcactaatgaagcccagctgcaccagctcagccgccaactcggggatattctcatttggcatcaggtcacagctcaggtgccggttcagtttgtcctccaacttcagcagaagtgtcaggtggtgtttgactccctcctccaccgactcaatgttgcactgcatcagcaccaccttgcgagtctccacctcagctggttcaggtgtcggagtcttgacagaggggggcacgacaggtgatgtcacctcctcctgctgtggctgctggggccgaggcagcccaaaggctgtcagaggatagatcccattcctgacatcttcaaggaatttatctaattccagagctggtgactgagagtacaaagtctgaactggttctcttcctggtcctgcagggatttcagccagtacggcactagtatccatgtttttggtgatctcctctagagcgttctctgggatcatgtgttggtgtcccacaatgcagtgggccgcaaggagtttgagcgagggcaattcaaaccaatgctgggtgggacaaaaagttctctggctgttggagtcttgacagaggggggcacgacaggtgatgtcacctcctcctgctgtggctgctggggccgaggca

SEQ ID NO: 12900 - DNA, 2661 bp, Homo sapiens
  misc_feature (1)...(2661): n = a,t,c or g
cctctcttcgcggacgcgccgcgtagttgccatccgccagctgccatgagcgagcgcctccgtcccaggaaaaggagaaggaatggcaacgaagaagacaaccatcttcccccccagaccaaaagaagtagcagaaaccctgtctttcaggattcctggggacacagagacagtacctgtaatgagaaacagtaaagaaaacagactaagaggaaacaaagcgttctgcgcgtcttcaggcagtgacagtggtgggagcagcagcagcagcaggcagcagcatcaacagcccggactaggcgccagcgggctggaagcgagcttgagccagaccatggccggatccagccctaacacgcctcagcccgtgcccgagcagtccgcgctgtgccaaggcctctacttccacatcaaccagaccctgagggaggcccacttccacagcctacagcaccgagggcggcctctgacatgatgtgccgggcagtttcttgcccttctgtgaagggacagcgctgtgccagatttgatatttcaacttacaacttgttttaaaagaaaaattgcacacgcanaaatgcctgttggcttttcagtctatatttgaaataacaggttaacaggcagttgtttacttgtggttttgctgcactattgcaatttcaaaggggctttgaagcaattttttataggattcttttgagggagggtatcaaatctatgtcaaggtagtggtttgaggaaaactcattctgtgtgttgaatccatagtatgtcccattcagactgatttccaaatctgtcaactagaaactctactttatgtaaagggccttttaaaaatgcgggatcttcaattttttttattcaataaactagtaaagagtatctagtttccatgaaaaaacataagtttttttccaaaatataggaagcttgattcagtcttgcactgaaattaactgccatactacctctcagtatgtagatgttctattgaaagtactctctcctgtgtaacaggagnaacaatcagatccaattcagactgtcagtgaagcacactccctaataatagtctctactctttgttatatatttgtatttccagagagaatgtcttttagattcttgtatacccagataacttctgtgtcactattccaccagagtctggcacctcagactttagtaggaaacagggccacagttctgccaagtaaagtaatatgtaatgactttttgtccctacaaacttggtcagtcagcagcttacatgatctcattgacaattcccaccttgtagtgtcaacaattaaggtgttgttgaacgctgataaaatgtaagctacctgaactgatgtctaaagcaacaagtattgtgaaattttgggacaaggattaacttgatgcttaaagtaacccccaacagtaactagggggccacattccatcagtgaaactggaaagattggtgtggctgagaatcagatgagcagaggcacctttagaagaaataatgtggtagtatttatttagggagagacagatgtgttgccatgttacttagtcatactagagagccagccaagtttgaataatgaaggtgcagacgtgttgtcttcttcactgacaagctgtctgaacaaggagccaggaactgtcgggtcaccagctgtggagcgtgccggggggacaacctgccattggatgtagagaaaagtgccttagagttggcctgagccctcctgcccactcgccctccgcgcgacgccactcggagtccacacggcacacacaagcggagctgagaagcacgatggctctagtcagaggactttgctgtcggtccagatttgaagaggacacggaacagcatgagcctttgtgacaaaactagaatttggaaatgaggactgtcttgggaaaagggtagacacaggcacttctctccacagcctgctaacctaatgtgggcagaactgaaagatcactgcagtggaaactgttctggaagaggctgcaacatagcccatgcttagggactggatggtttttgcaagagctttttttttttttaaactaccatctcccaacttttaaagccagatacttgacaaggattttagatcttaatgggttcgatggtagggaatacggaaaggatacactgctaatattgtgtctaacaataaagcaaacaactcgatgctgtaagaagacaagctgtttgagctttcaaacacacatgcacacagcacaattcagaaatacccaggaggattcctgcaggcttaacagttggcatcgtactgaaatgaaacgtgtattaacaagaaaatgtcaaacttttggggaaacaaattttctgttacttcccacccaactaaaagggaagataaaaccatcatcaccagaacaaaacagattttctccaaacaagtacaatgatagtgccgggttggcagttaactctttcaccctactaaattcaagagctcatctccaccctgtcctgtatattttctacatttctattaagaggctacttggtagtgtcagcgggcatcttttacaccttctagtagctcaagctagtaaaaccttgtacttctctattgcgccgccattaaaagcagcattagtgcattttttcattca

SEQ ID NO: 12901 - DNA, 795 bp, Homo sapiens
gacctgccgggcctcgtgcgcctctccatcgcgctgcgcatccagcctaatgacggcccggtcttttacaaggtggacgggcagcgcttcggccagaaccgcaccatcaagctgctcaccggctcctcctacaaggttgaggtgaagattaaacccagcacgctgcaggtcgagaatatttccattggtggtgtgcttgtcccactggaactgaagtctaaagagcctgatggggacagagttgtttatacgggtacatatgacacagaaggtgtgaccccaacgaagagtggagaacggcaacccatccagatcaccatgccgttcacagacattgggaccttcgagacagtgtggcaagtcaagttctacaattaccacaagcgggatcactgccagtggggaagccccttctctgtcattgagtatgaatgcaagcccaacgagacacgcagtctgatgtgggtgaacaaggagtccttcctctgaaagtggctctttctgatgctactggacaatcttttcagaaatctacttttagataaaccagcgcaggccttaaacaaggcatgccacaccattgctgttccccatctggtactaatgacctactagccctggttattttgaaagtgtaattcccctctgacacaatatccctcacatacaagatggtgatgtaccactcccgagaatattcccatctgtattttgtgctgatgttcctgcatccagttgttctcggtcatacttttgaccacttgtgactgggagttcagtggcccggggaggctt

SEQ ID NO: 12902 - DNA, 993 bp, Homo sapiens
ggggctgggcctctgcgggcgatggggcggcagcatgcatgcttctcgcgctgtgcgccacaggcgcccaggggctctacttccacatcggcgagaccgagaagcgctgtttcatcgaggaaatccccgacgagaccatggtcatcggcaactatcgtacccagatgtgggataagcagaaggaggtcttcctgccctcgacccctggcctgggcatgcacgtggaagtgaaggaccccgacggcaaggtggtgctgtcccggcagtacggctcggagggccgcttcacgttcacctcccacacgcccggtgaccatcaaatctgtctgcactccaattctaccaggatggctctcttcgctggtggcaaactgcgtgtgcatctcgacatccaggttggggagcatgccaacaactaccctgagattgctgcaaaagataagctgacggagctacagctccgcgcccgcccagttgcttgatcaggtggaacagattcagaaggagcaggattaccaaaggtatcgtgaagagcgcttccgactgacgagcgagagcaccaaccagagggtcctatggtggtccattgctcagactgtcatcctcatcctcactggcatctggcagatgcgtcacctcaagagcttctttgaggccaagaagctggtgtagtgccctctttgtatgacccttcctttttacctcatttatttggtactttccccacacagtcctttatccacctggatttttagggaaaaaaatgaaaaagaataagtcacattggttccatggccacaaaccattcagatcagccacttgctgaccctggttcttaaggacacatgacattagtccaatctttcaaaatcttgtcttagggcttgtgaggaatcagaactaacccaggactcagtcctgcttcttttgcctcgagtgattttcctctgtttttcactaaataagcaaatgaaaactctctccattaaaaaa

SEQ ID NO: 12903 - DNA, 2869 bp, Homo sapiens
gatttttttagacgtattattttgggctgggctgtggctaatcttgaagcagtgacttcctattttttggctcagacccatttgggaagctgtgaacctgagataaggaagtctgaaagtactagccggcagccgaccgtttctattcctttcgaagttaaggagacagcaaaggagctcccaggaattagggatccagttataaattgcacttaactcaaaatagtgccaatgagaatgtgaaggaatcttctggaaatgaaaccccacagctcaacaaaagcaagtttggtttatttgaatggtttcattaaataagtctacaaaggtaacaaactgaagcacaaagcgcaatcttacaagaagcgcaacacccagagttagtgcaaaatgtacaattaacggctgctgagaaacccccaaagtttgaatttttatttttatttttaacagtgtacattgttaaataatgtaaggaaaacatttataattcagaaagtttttaatgtggaaaaagatactcaaagtgtactattaacacaaaaataatttaaacagttcagtagcactagttcattcctctaggcttgttatttcatacacaggaggatgaaatcaacagtaaataacaccagttctgactttttttgtgtatgagtgaaaagatgtcaaaattattattaaacccaaataacaaatgataatgtgctgcatgaggctccactgctcctctggtataaagtatgtttcactcttgggtggcccctttctcagctactcagccccttgttggttctatccttactctctccacaagaaatacaagcagagaataaataaatcattttaaagcaggggtggaagcccttgcccttttcctttctaccttttaaaaaccttcagctctcatttgcatatttagggccgtagaccaacttacttacttattaagggaagcagggcccttaaggaatgaacagggtacaggagcctccagcctctttctgtggtagtggtggtggtggtggtgattcccagaatatgccattgacgtgggtaaaaggttggaaatattttcagtttcccaactaagagtcaagaagcaccccaaaattaagagtcctagcttctttctttgtcttcagagataacaaagatcctaaacatagccagttaggacagtatttccggaaagctctgaaaataattaataactacccattacaaggaggcatagcactgaataacactgattggttgcagttattacttacggggagtattatttatttgaaaatgtgaacatattagttgtacttctagaaataaaggtggcacaatagattatgatcctgcaaccatttggacatcataaaggaaatgagtaggaataagtattctttcctagaatgattaattcagatgtggaaagatagatagattaactttccacaaaatgtagtaccccaagctgagaaatgcatggtacatgtgcaacaagaggaaagcaatccaaacagtttttctgagagcaattttctccatctgtgacttttcactatcaggttccccaacttgaaaactagccccccacccccttctctttatgttcagtttcttctaggtcacgtctgttcaagcctagctcaaataagaaaggtttatatgacagtcactggccaggcatcacgtttgtttcctcattctttagtctttgtctttcacccagcacacaccattcttttaagttgtccaattttgttacaacaccccctcctcactattcccgaaacagaactttctgtttttaaccactgatgccaacctaacttcccaccctactcatcttacacctgctctagacaaagttgttgaatgacttaaaaaaatactttttcaatttccctttggcataaccactgctggactgctggggtcacatggacctacgatttccttccacatgccctttattgatctggggtctggtaagttgatgctaatggcagaagcaatagaagtccaaggcactaaaatgtccagcaagcaacactgggaaacagaagtattcaagtacagtaatttatacaattttacattcacatttatttatctaatacaatggaaatacaaaggaaaaagttaaagtgtctcaataagtaaaggacagagctagctttttttggaactttttaaacgtttcatattttactcttaaaactactgttgtccaacaacattttatatatcacagtgtttccacatcaaaactgatggcaaagttacatgtccgcagggaacttaattttttttttttcctaattgctaatgctgcagtcaaagctgctaatatcttttgcttaaagcactaatgacctatcataagaaagagttgcaccccagtaccctggtatttttcactgggttctaaagagcaaagaaaaaataaaaaagagaggggtaaaaaaaagggaggagggcagggtaggagagagcccagtaggtggtttttgtcctgtggttcggattcttgagggagtgagggattcagggcatgtaccaaaagcaagagctccacccactcgaaattacagatgggtttgattttacattgagttctccagcttccttatgaacaagactttcctagccctcatcctcattactgagtatagataaacaggaaagcatggtctgaagctgccccttgacaaaaaagctgttctttccttcctctcccattccaataactggagcgggggagactctccattctgagggctcaatgcagtattaaaaacattcccctctggcaagaaataaccagttaaatgcagcactagtagttagtatataggctacttcccac

SEQ ID NO: 12904 - DNA, 228 bp, Homo sapiens
ggagagctagcaccatgagcttcaataccctgtttgcatcaacagcaacgtgatgtgacgcccatgtgggaatgtaatggccgcctcaggacacagactcaaagggtaaaagcgtgctgcccgctctgcacacggcagaagctggaaaatgccttgtttacatgcatgaatgtgtcacaagtatcaccatattccaattctccagtgcttacagaaaaaaaaaaaaaa

SEQ ID NO: 12905 - DNA, 778 bp, Homo sapiens
  misc_feature (1)...(778): n = a,t,c or g
ggtaatgaaatgggaggacttggagggggcctgaacaatccctgaggaggagtagaatagcagacggaacactgagcagtgatctccttgaggatagatttctatgatggaaaggaaatgagaggttctaagagacgggctagcggcttgtaacctacatggaagaggttatgaaatgacgacagaatagaatgggcctgtgaggctggaaggatatgttttccttggtctaagaaccatttgccttgtgtgagaagagactgataggtggaagtttcagtgggggagtaggtgggagtgaccgatgagaaggagaaaaactggccatgagggacagaagttggaatgctagctgcttttttagctaccttatcagcataagcgttgcctagagcaatgggatctgatgccttttgatgccccttacagtgaatgactccagcttcctttggaagtaaagtggccttgagaagagtttttattaaagaggcattaatgatggaggacccttgcgtagtgaggaaacctctttcagcccatatgaccgcatggtggtgcaggatatggaaggcatatttagagtcagtataaatattgacacgtagtccctttgcaagggtgagggcttgagttaaggcaatgagtttgacttgctgagaggtagtggagaggggcagaaagtatatgcatcagctcgtgccnnnnnnnnnnnnnnnnnnnnnnnnnnnnnnnnnnnnnnnnnnnnnnnnnnnnnnnnnnnnnnnnnaaggtnttccaa

SEQ ID NO: 12906 - DNA, 382 bp, Homo sapiens
gccaggatattgacgctgatacaatccaacaaccttattcagatttcctgttttatttgtacctgtatgtgtgtgtgtgttgagttttatacaatttcatcacccacatgtgagtatccaccacctcaatccagattctgaacagttataacatgaagaggtcccttatgttgccgtcttaaaaccacacttcctcccttcccattcccctttctgtacctgattcctggcaactactattctgccctccaattctaaattttctttcaaaaaccttatataaagggaatcatatggcatgtgacttttagggattggcttttctcttggcataattccctacagattcatccaagtcatggcataaatcaatagttcattt

SEQ ID NO: 12907 - DNA, 697 bp, Homo sapiens
ttttttttttttttgacatttaaatggtttatctgcatgattaaattaatcacatttccaacagtgcatcaagcatctgagaataacattattttgagtaaaaacagaaactcttcgggagagaccccctccccacaggtcaggctgctcaaatgtccaccatgtctagcagcgcagagagatggagctcagaggcaacttcctcttcccttgaactccggatcagcctttccaggtgctttagtcgttcgcctagacacgttcctgtcgcctctgacagctgcagttgctccctcatcatgtcactctgtgggctagtagttacagatgttttcatcacaggttcaatagtgtgagaaagagacactagagtctgaggaagatagaggggaagggaagttaaatccgtaaatgctcctgagtcttcagacaaccattgctgaagctgatcttcaaacctcttgttctcttctttctccagcagcagactgctcgacaaacactgcgccaagagctcctcagcagaagctcctcgcatcagatcctctgtgctgggaatcctcccctcttgagcacactctgtgctcctcttccagttacggtgcatgtgaagcaatggtatgggaaaattgtttgcagaaggatgaaaaggctttattgccaaacgtccctctctcagctgtagctccttctgcgc

SEQ ID NO: 12908 - DNA, 905 bp, Homo sapiens
taactggtgtcttgtaaatgttctgtttttttaaataaaatttctctactttagtctttactttaaaaatatgtactgtttccttttttgttgtttttttgtttgtttttttttcttttgtactgagctcagcatagactaatactaccttaatgttaaaatctgaatttcttttagcattttgcttaaaagcaatatgctatttgcttattccgtgccctgacatagataatttttgaattctgatagaatacaagtgtggtaaatgccatgtttgtactttatctaacatcttctctttcagtagtcttgttttttttatatcatgtgattgtttgtgtgtcccctttcctcttctttgcttaacacaattatcttgtgttaaggatctcaaagatttcatgagacaagctggggaagtaacgtttgcggatgcacaccgacctaaattaaatgaaggggtggttgagtttgcctcttatggtgacttaaagaatgctattgaaaaactttctggaaaggaaataaatgggagaaaaataaaattaattgaaggcagcaaaaggcacagtaggtcaagaagcaggtctcgatcccggaccagaagttcctctaggtctcgtagccgatcccgttcccgtagtcgcaaatcttacagccggtcaagaagcaggagcaggagccggagccggagcaagtcccgttctgttagtaggtctcccgtgcctgagaagagccagaaacgtggttcttcaagtagatctaagtctccagcatctgtggatcgccagaggtcccggtcccgatcaaggtccagatcagttgacagtggcaattaaaactgtaaataacttgcccctgggggcccttttttttaaaaaacaaaaaccacaaaaattcccaac

SEQ ID NO: 12909 - DNA, 675 bp, Homo sapiens
ttttttttaaaatcaatttttaaccaaatattaaaccctttatttgccagcctgtctgtgtcgttggccttatgacgaggagtgcctgtgggttatcctaatcgttgtcttggtcactcttggttgggcctggttgactttgccagtcagctcctacagtgatcagttggccacctctagatctgtgtttgccggtctagacgttatcggtgcacttccttgaagtgccaggttgcagcgatcccagagcgttgataacgtgatctgatccctaagttgagacctgtcttcctgtaacgcttccgaataagaggtccggtcgaaaagagttgaaagatacgaaattaggtggtcgttggaatcctgatcgcagtaaagtggtccttggtaactgctcgagtagaacatgtcctgcatcccgcccaatagtccgctaatagggagggctgtgcgattaaaggcttcccatcgattgggtagtgtccttcaagtgggtggcgaagagccagtcgggcatatgtcatgaaggtttctccgaccgattaatggtttgctgcttgactagcctagggaaataataataaaggtaaagtaaacttttttaatgacatatggggcacaaaataactggtgtcttgtaaatgttctgtttttttaaataaaacttctctactt

SEQ ID NO: 12910 - DNA, 654 bp, Homo sapiens
gtgcaaattccgatggcttgattgcttctttatggaaagaatatggcaaagctgatgcaagatgggtttattttgatccaaccattgtgtctgtggaaattctgaccgtcgccctggatgggtctctggcattgttcctcatttatgccatagtcaaagaaaaatattaccggcatttcctgcagatcaccctgtgcgtgtgcgagctgtatggctgctggatgaccttcctcccagagtggctcaccagaagccccaacctcaacaccagcaactggctgtactgttggctttacctgtttttttttaacggtgtgtgggttctgatcccaggactgctactgtggcagtcatggctagaactcaagaaaatgcatcagaaagaaaccagttcagtgaagaagtttcagtgaactttcaaaaccataaacaccattatctaacttcatgaaccagaatgaatcaaatctttttgtttggccaaaatgtaatacattccagtctacactttgtttttgtattgttgctcctgaacaacctgtttcaaattggttttaaggcgaccagttttcgttgtattgttgttcaattaaatggtgatatagggaaaagagaacaaatttgaatttgtaataataaaatgtttaattatac

SEQ ID NO: 12911 - DNA, 1478 bp, Homo sapiens
ggcttggggtctgggtggggggttctcactccccactctcagcacagtacatgacttctggatatctctcaggtcttgcccagggcggtcacaatgtgaagaaactgcgggcaagtgggaagactatgagatttctgggttcccttctcagacttggagttagtagatgattcctgcattgcccctgcttgccctctgagaccagctgggccccaccttgctctttccccctgctaccaagtgcctttggggcctctggggtctgaccaggggtactgagcaccggccctaacacttccatctccacccaccccatctccctggcgatgtgctccagcccaagcagcctccgtaggctttagatcctgtggttgccagatccagtcctttctaataccctgagtcaacacattactcctgcaggtcttaggctacaatgcaggtcccttgagggccaccaacatggaggtaggcagtttctaggactgtccccagtacatctcaccacccacagccctttttttgccttgattcgagcctcaccctggccttttggcttcccctgcctgagagagacctgaggaggggacagagcccagcccctctcctgtggctgagcaggcctctgtgtccatgacacctgtcttccgggcctgggggctgtgggtgtatgtcctccctactggcttccccggcccctgctgcatgatgctcttggaactcttccccaaggagtcagtcccccaggcctatcaggggatccttttgtatctgcactttgggttttagtttcaaagctccatcaggtacagcttgcatttcaggatgtgtggaaagctcgggtgagggctgccctggttcatcatagctccaccttcctcggaaggagtgggctgttggagaccccccatccatggcacactagctcagcactgcatttcccgagatgattcccaagacagctggtgcctcctggctttcctgtgccaggccaaggggcaccacagaggaccctggatcctttgcctcttcttggttgaaggatctctatgtatgtgtgtatataaatatagttttttatctatatatataaaatagagatctattttttttctggaattctgttagaaaagtaaagaaaaagcaaatgctgttggtttatctcagggtgcccaaagtggttatagtcaatttttggtactaggaaaggcacccaatgcatttcctgacttttaagcatttccttgttggaagcagcagagggccaggccaagttgctgacagtgactttgcaggttgaataaagaaacccttggaggggaagcaggcttgtctgaagcagcatgtatattcactgggcatgtagctcccacaccagccttgagccaggccctggacaggaggggctgttgcaggatgagggaggccagagaaggcatcgaagccaagacctgggcccagctggggagggatgtggg

SEQ ID NO: 12912 - DNA, 2655 bp, Homo sapiens
ctgagacagactaacctgaaagctttgcctaacagtagcttgtagagatccagtgcacgccgatgctgctaaactcagtgcctgagcccggccctgcagccccagccgcagtgtctgaaggccacctcccaaagggagcacgttgccttttcaaactcccgtgccgatttcctaagagcccctagtccaagcctctcagatgaagctgaggagccgtgcctaggatcccttcccagctctgaggacgggctgcagagctctgcaggtgtggattcaccttacgcccctacagcaggctcagcccttcccaccctgcccgatgcccagcagcacaacacggagtgagacaggatgcccacggtgactgccgctccgtccgtgcacacacagcggtgctcttcttcccctttagccacccactgcccaacccaacggcaaagacacagaaaccaggtccccttgcagacggctctcccatcttcctgcaagtcatctgctcacacacagttggcagcacatagcgtttccttctttcagaaacattcctcttctggggcttcagaaagctggcaaggccactagcagagcttttgttaatgccccagctgcttggcgagctaacagctgacctttcgggaagcccacagacgctggaggaatcttgagtttctccaaactgccgctccaccagtgcctttggacagccgtgcctgttcgccgctctccctaagtctgattctcatcgaggcccctcgcttctatgactgtgcttgcagaagagtaaacactctcggatgccgctgtcctgggggagcccgcgggagcctgtgaatgttgatacgagctggccagtcctgggcccagctcacttgtccagctacctgccaggtggctttcactgtgtttaaaatacattgcattccaagctggtcccctctgtgtatcactctactgagaaatcctgcctagtgtgttttgggatgtgtcctagcatttacaagaaaatgaaaagcgtcctcttaattgggcacccgaatgttggctgtggctcagtcacatatcccaggggccctcgtcccgaggccgtggttgccccgagccccgagcccctctgcagctcacccttggcttgttttccgcaaacccggtaaacgcaagcccttggggcagatgcagaagcagaagagggaggggaaacctgcctctggggtcaccctgttagcacagcgttctcatcgggagacagcatggaactctctctcgcagtgctcgaggctgtgtgtcagtgtttgctgggcttgtggctccttttttggctggataaagaagtcagctgtttttgtactgcttctgtggctcttcacagacctcacggatgtgaccgggagatgagtgccgatgaccacgttttaaaggagaaagagagctcctggtggggccctcggggtggtctcaggtcccatttgcagtctgcaacagtgacgcgcagcccggtccggagcgtggtgagctttgtttgccttctgggtcggctttcgctgtgtctcctgtgtgtgttagaatccagagcccagaggaagtgcaagcgggtcctccgccaacggggagagcctcttcgcggcgctgttggcgacacgagcgcatgtgattcgcgtacgaggggagttgtttgaaacaccttcctgagtagtccggccttgtcaatgagtgcttgttttcctttaaacagtctgacatatttactcgtcactttcaaaccagaagcatgaaaggaaggagatattgtggggtccgtttaactcgatagaaagcgcagggggatgggcccccgggcgcaggctcttgacccgctcagcgctgaccccaccgccctggccgaggcacttggccttgctgagctggacttcctcctcctcctcctcatgaccggggtgaattagaacgtttttaaagacacccccttccaaattctgtaacacattgtaattggagaagaaggaaactctgcaaggctaaactgtcattcacaacttggctacacatagactctagtcagttttgtctccagaaccttaggcttttgtattttttaattttaatttcactgttaatccttattgtcttttttattaagatgttggaaaagcaggaggtagttgtgcctcaattattgcaaaaatgtaacaataaagttcctcaaaataagatctgttcctcatagctatactgtgtacacataagacgcatatagggttttactgaaatctatttttaactcttatgttcgtagagaaattgtttcaaggattttgagtcataggtctgtaatttatagagatctctagaattcttattgtaattttcctacttctttgataaaagaaaaataagtcagattgttaactccaagattgaaaaaaaaaactcttgaaagaagattattagttgtaactaatttgggggttctgggcacagacatctaacctggtattgtaaggcagaggctcccattggaatggtagtggtccgggtcagttgttcatggtgtaagctttgcacagtgtattaacattgggagggtctggcttgaaaatttggccaccctcagcctctgaatgtttattaaaataaatttagtctttctttgcttaatat

SEQ ID NO: 12913 - DNA, 2202 bp, Homo sapiens
  misc_feature (1)...(2202): n = a,t,c or g
cttgctgtcacgggcctggggtcgcctcaatcaggtggagctgccacactggctgcgcaggcccgtctacagcctgtacatctggacgtttggggtgaacatgaaagaggccgctgtggaggacctgcatcactaccgcaacctcagcgagttcttccggcgcaagctgaagccgcaggcncggcctgtttgtggcctgcacagcgtgattagcccatcggatggaaggttcctcaactttgggcaggtgaagaactgtgaggtggagcaggtaaagggggtcacctactccctggagtcgttcctgggcccgcgtatgtgcacagaggacctgcccttcccaccaggtgggtcactgcacaggcggggctaggcagccctgctgctgtgtggctggaccgggagggaggggaatgctggggaaggaactgaggctggcatgtggggcctccctgagaatccatgtgcagaccacactcgggctccgtgctgggtgctcactgttttggtggcccccacgtntgctcctactccacagccgcgtcgtgtgactccttcaagaaccagctggtcacccgggaagggaatgagctctatcactgtgtcatctacctggcccctggggactaccactgcttccactcccccaccgactggactgtgtcccaccggcgccacttcccaggctccctgatgtcagtgaaccctggcatggctcgctggatcaaagagctcttctgccataacgagcgggtggtcctgacgggggactggaaacatggcttcttctcactgacagctgtgggggccaccaacgtgggctccattcgcatctactttgaccgggacctgcacacaaacagcccaaggcacagcaagggctcctacaatgacttcagcttcgtgacgcacaccaatagagagggcgtccccatgcgtaagggcgagcacctgggcgagttcaacctgggctccaccatcgtgctcatcttcgaggcccccaaggacttcaatttccagctgaaaacaggacagaaaatccgctttggggaagccctgggctcgctctagagtctctttcctgattatggctgctaagggatcttttccaaacagagtgagggtcttttcaagagggaggcccatgaggccatccaggtaagggcctgcctcagcgtggttgggagtctgaccaggtaggacttgaatgattcggctaccacctgttccagaggtgcagacaagaggtggcgagagcccccatcatgcccctcaacctatcccgttccttctgcctacaaataaaaagtgcaggctggaatgatctcagtcacatttggatctttttaaacactgtatagacggaagagcctgcattcctgaccgaaccttcagttggtctcggttgtcgttttttcttgctgctcctccccccatcacctgagctgttttctgttggccccttttgttttttggccttaacgctcctgctgcacagggtgaggtgcctccttggcacagactgtggatgcctctcccccaggcagagccacacagccttcgtgacaactgctttccgttcccacattcacctcatcctgctctttagaaaaagcagtctttgtgcttgtggctgaacgcatcaccctggactctgctagtgtcttctgaggacactgatgacactgattaatgatacagacctttgcaggacctgatgagtgacccttctggagctggccaggtcctctgcagcaggcaagaccaatcaatcactgaacctgcctcatggcaccagagtgaacagggcaggcaggtagtaggcccagctggggaaatgggagagttcctgtccccctccacatatccctacatgaaatatgggaaagttgctgctattgattcagggtctgtcttggaggcagaggacccttggtggatagttggtcagtgcctggaaaacctgtcccagtttatcaggaacgcaggcctggggagcccccagtggcggggacagggccagatttcatgttgaccctggggatgctgtgaatttctcctgcaggagagacatcattgaattttttcaactgtatcagtagcacagtatttttgtatgaaaagtgggagacttctgaacagtaattcatttaattgcaaagcattttgaaataaaaaaaatcaaacttaaaaaaaaaaaaa

SEQ ID NO: 12914 - DNA, 5515 bp, Homo sapiens
cgccgagtccgacttgcagctggcccagatcaaatgcaacctgggccgggccgtgcagctccaagagctgtggcccgggggcctcttctggaccaggaaactctccacatatattcgactttatgggagaaaatttagcaaagaagatcatgttctttttattaagttattgtatgagctggtatcaattccaaaactggaaatcagcatgatgcagggatttgcccgccttttgatcaacttgttaaagaaaaaggaacttctttcaagagctgatttggagttaccctggagaccactttatgacatggtagaaagaatattatattccaagacagagcacctaggattaaattggtttcctaattctgtagaaaatattctcaaaacactcgtgaaaagctgccgaccatattttccagcagatgccaccgctgagatgctagaagaatggcgacctttaatgtgcccttttgatgtaaccatgcaaaaggccatcacttattttgaaatatttcttcctacctcccttcctccagaacttcatcataaaggttttaaactttggtttgatgaattaattggcctttgggtttcagtgcaaaatctcccacaatgggaggggcaactagtaaatctctttgctcgattggctacagataatatagggtacatagattgggatccatatgtaccaaagatatttacaagaattctgagaagcttgaacctcccagtgggaagcagtcaagtgttagtcccaagatttttaacaaatgcttatgatataggacatgctgtaatatggatcaccgccatgatgggtggaccaagtaagctagtgcaaaaacacttagctggtttgtttaacagcatcacatctttttaccatccttcaaataatgggcgctggctgaacaagttaatgaaactacttcagcggttgccaaacagtgttgttagaagattgcatcgtgaaagatacaagaagccctcttggttaactcctgtgcctgatagccacaagcttactgatcaagatgttacagactttgtacaatgcattattcagcctgtcctcttggctatgtttagcaaaaccggtagtctagaagcagcccaggctttgcagaatcttgcactcatgagacctgaattggtaataccccctgtacttgaaagaacatatcctgcattagagacattaacagaacctcaccagctcacagctactttaagttgtgtaattggagtagcccgcagtttggtatcaggaggcagatggtttcctgaaggtcctacacatatgctacctctgttgatgagagcattgcctggggtggatccaaatgactttagtaaatgcatgatcacattccagttcatagcaacattttctactctggtgcctttagtagattgttcatctgtactacaagaaagaaatgacctcacagaagtggaacgagaactttgttcagccacagctgaatttgaggatttcgtcttacagtttatggacagatgttttggacttatagaaagtagcacattggagcaaacaagagaagagacagaaactgagaaaatgacacacttggagagtttggtcgaattaggtctgtcttctacgtttagtacaatcctcacccaatgttccaaagaaatatttatggtggcccttcagaaggtttttaatttttctacttcacatatatttgaaacaagagtagcaggtcgcatggtggcagacatgtgccgcgctgctgtaaagtgctgcccagaagaatctttgaagctctttgttccccactgctgcagtgttataactcagcttacaatgaatgatgatgtattaaatgatgaagagctagacaaggaattactatggaatcttcaacttttgtctgagattactcgagtggatggaaggaagttgcttctttatagggagcagcttgtaaagattctccaaagaaccctacatttaacctgtaagcagggttacactctgtcttgtaaccttttgcatcatcttctccgttctaccacacttatctaccctacagaatactgcagtgtgccaggtggctttgacaagcctccttctgaatactttcctatcaaggactggggcaaacccggggacttgtggaatctgggaatccagtggcatgttccttcttcagaagaagtgtcttttgccttttatcttttggactcctttcttcagcctgagctcgtcaaactccagcattgtggggatggaaaacttgaaatgtctagagatgatattctacagagtctgactatagtgcacaactgtttaattggctctggaaacctcctacctccgttgaaaggagagccagttactaacttagtaccaagtatggtgtccttggaagagacaaagttgtatactggacttgaatatgatctgtctcgagagaaccaccgagaagtaattgctacagttataaggaaacttcttaaccacatacttgataattcagaagatgatactaagtcattgtttcttattataaagattattggagaccttttacaattccaaggatctcacaagcatgaatttgactcccgatggaaaagcttcaacttagtaaagaaatcaatggaaaatcggctccatgggaaaaaacaacatatcagagcactgttgattgatagagtaatgttacagcatgagctacggacactaactgttgagggttgtgaatacaaaaagatacatcaagatatgatcagagatcttcttcgtttatctacaagttcatacagtcaggtgagaaataaggctcagcaaacattttttgctgccttgggagcatataacttctgttgcagagatatcattcccttggttttggagttcttaaggcctgatagacaaggtgttacacagcaacaattcaagggtgccttgtactgtctccttggaaatcacagtggtgtgtgcttggcaaaccttcatgattgggactgtattgtacagacgtggccagcgattgtttcttcagggcttagccaagcaatgtccctggaaaagccatcaatagtgagattgtttgatgatcttgcagaaaagattcataggcagtatgaaacaattggcttggacttcacaattccaaagtcatgtgttgaaatagcggaattacttcaacagtcaaaaaacccctctatcaaccagatattgcttagcccagaaaaaattaaggaaggaattaaacgccaacaagaaaagaatgccgatgccctaaggaactatgaaaatttggtagacaccttgctagatggtgtggagcaaagaaacctgccctggaaatttgaacatataggcattgggcttctgtctctactgctgagagatgaccgagtgttgcctcttcgtgccatacggttttttgttgagaatctcaaccatgatgcaattgtagttcgaaagatggctatctcagctgttgctggtatccttaaacagctaaaaagaacccacaaaaagctgaccattaacccctgtgaaatcagtggatgccctaaacccacccaaattattgctggtgataggcctgataatcattggttgcattatgacagcaaaactataccaagaactaaaaaagaatgggagtcaagttgctttgtggaaaaaactcactggggatactacacctggccaaagaatatggttgtttatgctggtgtggaagagcagcctaagcttggcagaagcagggaggatatgacagaggcagaacagattatatttgatcatttttctgatcctaaatttgttgagcagttaattacttttctatcattagaagacagaaaaggaaaagataagtttaatccacgacgtttttgtctctttaagggtatattcaggaattttgatgatgccttcctgccagttctgaagccccatttagaacatttggttgcagattcacatgaaagcacccagcgatgtgttgcagaaattatagctggtttaatcagaggttctaagcactggacatttgaaaaggtggagaagctttgggagcttctgtgccctctgcttagaacagcactgtccaatattaccgtagaaacttataatgactggggagcttgtatagcaacatcctgtgaaagcagagatccccggaaacttcactggctttttgaactgctgttggaatcaccattgagtggtgaaggaggatcctttgtagatgcatgtcgactttatgtactacaaggtgggccttgcccagcaagaatggagagtgcctgaactattgcacagactactgaagtacttgggaacccaaactcacccaggtttacaaaaatgtcagagaaagaataggaagtgtgctgacctacatattcatgatagatgtatctttgccaaataccacaccaaccatatcgcctcatgtccctgagtttactgctcgaattctggagaaattgaaacctctcatggatgtggatgaagaaattcagaaccatgttatggaagaaaatggaattggtgaagaagatgagcgaactcagggcattaaactcttgaaaaccatattgaaatggctgatggcaagtgcaggaagatccttttctacagcagttacagaacaacttcagcttctacctttgtttttcaagattgccccagtggaaaatgacaatagctacgatgaacctgaaaagagatgcaaagttatgtttatcattaatgtctcaggggttgctttaccctcatcaagtgcctttggtacttcaggtgctaaaacaaacagcaagaagcagttcttggcatgcacgatacacagtactgacctacctccagaccatggtattttataacctctttattttcctaaacaatgaagatgcagttaaagatatccaggtggctggttataagtcttttggaggacgaacaactggaggttcgagaaatggctgctactaccttaagcggtctgctacagtgtaactttcttaccatggacagtcctatgcagattcattttgagcaactttgcaaaacaaaactacctaagaaaagaaagcgagaccctggttctgtaggagataccattccttctgcagagttggtcaaacgccatgctggggctgctaggacttggtgcatgtgttctttctagtccttatgatgttcccacctgggatgccccagctcctcatgaatctcagtgcacatctaaatgatcctcagcctatttgaggatgactgtaaaaaaaaccttatccaatttccgaagacttcaccatgacaactgggcaggaacataaacagcaattcactgatgaccaactgcttgttcttcaccgatcttcttgtgtcaccatgctattatggcataggaaaggtgactagtcctcacttcaggctcttttttcattcaaaaaatttcccacacccttcagggtaccctctgtgggtgggcttttctggcaagttttttaaaaa

SEQ ID NO: 12915 - DNA, 631 bp, Homo sapiens
  misc_feature (1)...(631): n = a,t,c or g
ggtggtggggaggttgtggtccttattagacattcagatacccaggtcccaaatctggtccagccctggtaatcctgatgcagagggtccacaaccacatttgggaaatgttgacctaatgtacagcaggaaagcactttcatttgctaagaagtttccatatgaagggccacgcagacctgagcatgtagaaaggcaaggggccagggaagttactagaacactgactctggggttatattgcctgggtttgaatctaatcttggtcgcttactggtgatgctacccaaggtgtctgtaccttcatttccccacctgtagaaatagggataggatagtggaaggtattgaggatgagctgagaccatctgcatagagggcttaacatagtgactggtacttagcaaatgctccatgagttatgattgctggcactggcatgctctccagagtggccctcaggacaggggccctcagccaccaaatcctagacagggcttcctctgacagaggtgcaggctatgactacatggctccagggcatgccactcaccctgcantccccatggccttgggttggtggttatcacggttctccatcaggggggcggtaaaagattcttttccgaaa

SEQ ID NO: 12916 - DNA, 487 bp, Homo sapiens
gggccctggagatcactactactaccctcctcaccttcacagataggtaaattggagcccaggaaccgagatgatcacacagccaggtagggacagtacaagaactagaatgaaaatcctagctcctgactcagtgttctttgcacgatgccacactgcttcccaattcgctggtcagttattaaaatttgtcaggcctgccgaaggattgacatgctgggcaatgcaggccaccacggtggatctgtgactcctgaaggtggcaaagccctgcacactgccttgggatgagcacactgagctctgcagggcctcagctggaaggcgccatccaatcgtccttcccctccccagcagaactccagaggtggggcggctgccgcagggcccaaggcttgcctcggcagggggctttgtgctttttgttgtggaggccaccagggattcaggaagatcctgaatgggttgtcaattgactgaaaagtaa

SEQ ID NO: 12917 - DNA, 1288 bp, Homo sapiens
ttttttttttttattgttcacattttttattgaattccaaatgtagcaaaatcattaaaacaaattataaaagggacagaaaaattaagaatcaaacatcattctggaccatgggaaccttgaaaaggcatggcagtggagaccagtaactagtatacagcttgcctgagaaggccttagtaacaaatggaattcaagtcgtattagatattctaaaccttccttaatataagatgaagtgtcatatgttaggaggtaaaaacgtaacacaaaattctgggaataagaataaagtctggaccctgagctcagaatgatccatagcatctactgtgcaaatatattacagcagacattatagcatattacctcctgctgtacacacatgcacaggcctgaaactctccaagagcaccataagaatgattccctttacctcatctagataaaggctgaaaaaaatgtattctgttgcagatgggagggaaaaaaatagacaattacgttgaaaatttattaaaacagaccagcttgaagtgagtttattcttgtctgtataatcaccaatgttatttccaaatgtccgtgaaattatctataatcctatctccttgcttgctttggtaggagtatagctaacaatatagccatcttttgccctcagtaagggctatcagcagttccaagctctgtgagattatttttgcccttcttttattcaactctagttgaataaagttacttccaatttgaaagctttagaagacccccccaaaactgttttggaagattgtctccctagagagtaagaacaaatggatagctctattccatttaaacctaatctctgacatcagaatagggatcatgctcagcaaatccaagagcaaggtcatttgtatccattgctctgacttcctcctagggtacctcagtgcccctactgcccagcctcagggtaaaagtggcagactttccctcctttctttcactctcagcagcattgaaactttgttcctgtagcattgcctgtgctaaagtgctataaaagggactttcttgggggccaaaaaaaaaaaagcattcagggaagaaggccaagatctatagccactctttggacataagtgagacagaagtacttctaactggcaagataatgtctgatcctgccaggattctgtcagttggcctctgaaggtaattatacaagctgtccctatggagctgttgccatctgtagaaacaagaagagctgaggtccttggaacagacgtgctgttcttta

SEQ ID NO: 12918 - DNA, 1230 bp, Homo sapiens
ggtgacaaagccaacaagactggaggaagctggggcctcggcagggtcactgggaggaacaggactgctccctccctggggttggaacagacataggcgcgctcagtccgaggccagacaggggagacatggagaggatatcggtaccacccgcctacctctctgaaagactgtcttaagggagtatccaaccagcacttacaaagcagctttttgtggatgtgacactgggtggagaaaaagattcgatggaagtgttttgctcttgaacatcttagcttgggatagcagggaagtctggaggagcgtcttgcctggagtggctggtcgccactagcctcttggggatccccaaggttgcctggctctgggtctcttggattcacagagcagtggggcataatcccagcacttcatttgatagtctgggccccttcctggagggaaagcagcagcaagacccagtggagacgatggcaaaggggctgatttcactttaggtaaatatggacagctgggccacgaggacaccaccagcttggatcggcctcgccgtgtggaatactttgtagataagcaactccaagtaaaggctgtcacctgtgggccgtggaacacctacgtgtatgctgtggagaaagggaagagctgacatgtgtacgtatatgtatatgcaacacctgtgagacccccattcaggtcaaggaaaaccattgcctgcaccccaagggccccatatttgcccctccccatcacagtcctgcccttcaccctcaagcacggtcctaaacttgtctgcactttagaaacacctggagagcattgaaaactctgctgcctaaggtcagcatcaatcaaaacaatgaaatcaatgaaacaatgaaaccagagcttctaggtgtgtggcctggatagtggtagattcaaagctccacccacctcatcccaggtacatttgatgtgcagctgagattggggcacattccaggtcatcgtcttctgtcagtcatttccctgctttcgtttgaattttaccattcttgtatgcagccttatacgacatagttgtgtttgcttttgagtgttagataaatggaatcctgtgtatgtgcttttgtgtcgtttttgtcactcagcattgtataatccatccttgttgggtcctggagttcatttttaatgctatatggtgttctgttgtatgaataatacctcaagtgatacagcctt

SEQ ID NO: 12919 - DNA, 2328 bp, Homo sapiens
aacgagaacccggagtgggtgaaggtggtgggctacaagggcagcgtggaccacgagaactgggtgtccaactacaacgccctgcgggctgctgccggcatccagccgccaggctacctcatccatgagtctgcctgctggagtgacacgctgcagcgctggttcttacctgccgcgccgcgccagccaggagcctacagcgagaaggacgacgacggcaagggcgccaacctgcagctgagcgcctcccctgacttcggcgacatcgctgtgagccacgtcggggcggatggtccccactcacggcttctcgtccttcaagttcatccccaacaccgacgaccagatcattgtggccctcaaatccgaggaggacagcggcagagtcgcctcctacatcatggccttcacgctggacgggcgcttcctgttgccggagaccaagatcggaagcgtgaaatacgaaggcatcgagttcatttaactcaaaacggaaacactgagcaaggccatcaggactcagcttttataaaaacaagaggagtgcacttttgttttgttttgttctttttggaactgtgcctgggttggaggtctggacagggagcccagtcccgggccccatagtgggtgcgggcactggacccccgggccccacggaggccgcggtctgaactgctttccatgctgccatctggtggtgatttcggtcacttcaggcattgactcaaggcctgcctaactggctgggtcgtttcttccatccgacctcgtttcttttctttcctatgttcttttgttcagtgaatatccctagagctcctaccatatgtcaggccctatgcctcaccctgagaacgcagtagagcatgaggtggacctgtttgctgggaaccccaggtcacccccttttcttcctactctgtgcctggagcatcatgtccacccctgcagatccttggaaaagaaaatgtttatgttgcagggtattgcatggtcacgagtgagggcaggcccctgggggacacatctgcccacagcttgcacaggccagggcacaggcacatctgttggttctcaggcctcagataaaaccatctccgcatcatatggccagtgaccgctttctcccttcaagaaaattctgtggctgtgcagtactttgaagttttaattattaacctgctttaattaaagcagtttcctttcttataaagtggaatcaccaaatcttatcacacagagcacagtcctgtagttacccagcccgctccagcagtgcgggagattgtaaggaagcggtggcggctggtgaagcaagtctcacatgtcggcgttcttggccaatggatacaaagataaagaaaatgttgcctttttctaggaactgtcagaaatcctcatgcctttcaagacttctgtgaatgacttgaattttttattccctgcctagggtctgtgaacgaggcctgtctcttccctggggtttctttccatggcctttatttctcctcttccagtgggagttttgcaggctcttctctgtggaaacttcacgagcgttggctgggcctcggcttcgctgggagtgtactccaggggtgaaggcagagtggggatttgagacccaggttagggcacgacccagggctgagaagggacgtttccatcattcacagtgccctccccacagcactacctcaccccgacccccaccctcactcctaccccaccccgcgatcgtcaggggtgccacggtgggccggaaggtgccggctctggctgtccctgtgccggtccctcacaaacctctccccctttgaaactcaagcacagctgcgaggagggcagcgaggagggacccctctctcatggttgtctctttcccccgctatgtcataggtagtggaggaagcgaaggaagtgaacgctgaatgtgacgcatttctgaagagctcagctgtcaccgggcatagcctggaagccccaagtctgttctgactttgcctggctgtctccttgacccgcctcctagatcattgtccttgatgtccaggctgggtcatttaaaatagagatgcaatcaggaaggttgggggacttgggactgtggctgaattgagaccttgctgatgtattcatgtcagcacctgagtcacagcccaggtgcccggaagcagcctcttcgcataggcagtgatttgcgattactttaaagctcacctttttttcttcccctctctgttcgctgctgtcagcataatgattgtgttccttccctatgggatccatctgttttgtaaacaataaagcgtctgagggagtgta

SEQ ID NO: 12920 - DNA, 445 bp, Homo sapiens
gccttggttcttaaacttcatgaagctatttttccagcctatggggtagttcttgctccagtaagaggaatcttagttgtcataatcccttggagcctgggtttttggagaaagagatctccgtgcccttacagccctttttcttcaacggaatgtgggaagggcctggctttaaaacacgcacacaaacacacaaataaacagacataagatgtcatcacgaaactgcccacggatctttaggctttctgcattgacataaatacattttctaagggggggggggaagaaattaaaaaacacctgttaattttaaacacattttttaagaaaaaaataattaaaaaagaaacagtgctcatgtcataagctatgttgacagttgccagtggaaatgttgggttggttcaaaaaaaaaataaaagctatactatatctctctaaa

SEQ ID NO: 12921 - DNA, 533 bp, Homo sapiens
gacttattgacagtgccaaagctcggtactggacacaacgagggacctgggtctacgataacgcgcttttgctcctcctgaagtgtctttggtccaacgttgttccagagtgtaccatggcttccagtaacactgtgttgatgcggttggtagcctccgcatattctattgctcaaaaggcaggaatgatagtcagacgtgttattgctgaaggagacctgggtattgtggagaagacctgtgcaacagacctgcagaccaaagctgaccgattggcacagatgagcatatgttcttcattggcccggaaattccccaaactcacaattataggggaagaggatctgccttctgaggaagtggatcaagagctgattgaagacagtcagtgggaagaaatactgaagcaaccatggcccatcgtcagttacagttgcttatttaaagaagaagatctcgtggtctgggttgatcctctggatggaaccaaggaatcataccgaaggtctttcttgacaatgtaacagtttttt

SEQ ID NO: 12922 - DNA, 520 bp, Homo sapiens
  misc_feature (1)...(520): n = a,t,c or g
ggcggctgaccgccgggctaggaaagggcccagggccccgaatctcggtggccgctgctccaacgcggcctgcgccatggcctcctccgccgcctcctcggagcatttcgagaagctgcacgagatcttccgcggcctccatgaagacctacaaggggtgcccgagcggctgctggggacggcggtgaccggggagattagtaatttttaggtattaaagatacactcaaccaaagggacagaatgggaaaggctgaaaggggaatgaataacgttctcatcgttcaagtcattgccggtgccacacccagagaaaaacaagcaccacaccagacagcctctgagcaagccgngaaagaggaaattgatcagggattttgatgaaaagcaacaggaagcaaatgaaacgctggcagagatggaggaggagctacgttatgcacccctgtctttccgaaaccccatgatgtctaagcttcgaaactaccggaaggaccttgctaaactccatcgggaggtg

SEQ ID NO: 12923 - DNA, 379 bp, Homo sapiens
  misc_feature (1)...(379): n = a,t,c or g
ggtctgttgatataaatatatgacgttactaaattcttaatctagatagactttataaaaaccgtttccagaaacccctctggttgtttgtctaacatggtcacaaaaacccaggcgctgctggctgtaaacattatcagaagtttaatggcagcaactttccttcaactatgcaagcgcttcccggcggctctgctggttgggggaggaggttccgccagcgacctcccagcccctgggtccgtggagggggtgnncagaacagcactcctgggcggctcctgtgggcttcaggactggccggctccagccgcaagggcgatgctgcggacgtttgtgtggatggngcanngttcttggaatctgtngaccnnatcgg

SEQ ID NO: 12924 - DNA, 857 bp, Homo sapiens
taattctggttattaatccccttgtcagatgggtagtttgctattttctcccattcatgggttgtctctttactttgttgattgtttcctttgctgtgcagaagcttcttaacttgatgtgatcctatttgtccattttggctttggatgcctgtgctatgtagggtattactcaagaaatctttgctcactccaatgtcctggagagtttctccaacgctttcttttagcagtttcataatttgaggtcttagatttaagtctttaatccatttttacttgatttttgtatatggcaaaagatacgggtcttgtttcattcttctgcatacaggtatctagtttttccagcaccattttttgaagagactgtccttttcccaatgtatgttcttggcacctttgttgaaaatgagctcactgtaatatatggatttgtttctgggttctctattctgttccattggtctatgtgtgtgtgtgtttcatgccagtttcttgctgctttggttactatagctgtgtagtataatttgaagtcaaataatgtaattcttccagttttgttcttgttgcttagtatagcattgtctattctgggtcttttgtggttgcatataaattttaggattttttttttctatttctgtgaggaatgtcatttgtattttgatagcaattgcactgaatttgtagattgctttgggtaggatggatattttaacaaaattgattccaccgcgcccgacctcccgtctcctttcagtcctcctcgggatcgcgcatcacccgcattttctgttctcctcctgcacttgctctcctcgcctctcctccgtctcctctcacttttcgga

SEQ ID NO: 12925 - DNA, 658 bp, Homo sapiens
gcaagtgggaaaagagaactgccccatgcccagcttgtgatggtcgtttttggagacctgaagcccacactcgggtcgtatggacttctggaaaagttcttgtctcctggactgaaccatgtgaccggaggcccctttcctagtctcatcctcccctggctgcagatgcttagctgggccagggattgacccaagcgcgatgcagcaggcaggctcagaagacgatgcggggctgtgtgccggccttcttgctgcatgtactcagcctcaggagagcttgctgcacccaggccgcccaggtcttcacagcacaactgcctggaaggcaggttgcgagaaggagaggcggatggcatgagcagcaagggggaccgatgctgtgcagctcacaccactccagaacctgacaaggcaccagcaggaccccttgccaggagcatgtctgtgcagcagtgtttttgcccctgcacattccagaagccctcatgggaagggatgcagccaggcagactcctgccagatggggcaggtagtttattcaaagagaactctgtatcccataggcccaggctctcctttcgcttggcgtgggctttgctggcccagtgtgtgctcctggctcagcagaaacatccatttgagttggcatccctgtagg

SEQ ID NO: 12926 - DNA, 1385 bp, Homo sapiens
gcggggtcgagatggcggcgcctttgaggattcagagcgactgggcgcaagccctcaggaaggatgaaggggaggcctggctgagctgtcatcccccagggaaaccatctttgtatggcagcctgacttgtcaaggaattggcctagatggcatcccagaggttacagcttcagaaggatttactgtgaatgaaataaacaagaaaagcattcatatttcatgtccaaaggaaaatgcatcttctaagtttttggcaccatatactactttttccagaattcatacaaagagtataacatgcctggacatttccagcagaggaggtcttggtgtgtcttctagtactgacgggaccatgaaaatctggcaggcttccaatggagaactcaggagagtattggaaggacatgtgtttgatgtgaattgttgcaggtttttcccatcaggccttgtggtcctgagtgggggaatggatgcccagctgaagatatggtcagctgaagatgctagctgcgtggtgaccttcaaaggtcacaaaggaggtatcctggatacagccatcgttgatcgggggaggaatgtggtgtctgcttctcgagatgggacagcacgactttgggattgtgggcgctcaggctgcttgggagtccttgcagattgtggttcttctatcaatggagtggcggtgggtgctgctgacaactccataaaccttggctcccctgagcagatgcccagtgaacgggaggttggaacagaggccaaaatgctgctcttggcccgggaagataagaaacttcagtgcttgggactacagagcaggcagctggtgttcctctttattggctcagacgctttcaactgctgtacttttctctctggcttcttgctattggctgggactcaagatggaaacatttatcagctggatgtgaggagtccaagggctccggtacaagtcatccacagatcaggagcaccagttctatccctgctaagtgtcagagatggattcattgctagccaaggtgatggaagctgttttattgtccagcaagacttagactatgtcactgagctcactggggctgactgtgaccctgtgtacaaggtagccacatgggagaagcagatctacacatgctgtcgagacggtcttgtacgacgctaccagctttctgacctctgacttcttggaaagagcagtcccggttagtgaaaaggtttgaccctgatcaacaatgagcagaaacatcatcagtccttcccaaggaccatggcgtttaatgtcttgggcaccccttggaaatcacagaaagtcagctgtactggccgtgtggaactctcatcccaagacctactttgaactgagtaagaagggtca

SEQ ID NO: 12927 - DNA, 501 bp, Homo sapiens
aaaactgtaaacttcggcgcttggcccaaacccaccatttcagacaaatcccatctcctgcaaatggtatccaaactggatctcactgatgccaaaaactctgatactgctcatattaagtccatagaaattacttcgatccttaatggacttcaagcttctgaaagttctgctgaagacagtgagcaggaagatgagagaggtgctcaagacatggataataatggcaaagaggaatctaagattgatcatttgaccaacaacagaaatgatcttatttcaaaggaggaacagaacagttcatctttgctagaagaaaacaaagttcatgcagatttggtaatatccaaaccagtgtcaaaatctccagaaagattaaggaaagatatagaagtattatccgaagatactgattatgaagaagatgaagtcacaaaaaagagaaaggatgtcaagaaggacacaacagataaatcttcaaaacccaaataaaacgtggta

SEQ ID NO: 12928 - DNA, 1345 bp, Homo sapiens
  misc_feature (1)...(1345): n = a,t,c or g
gtggcgctgtgcgaggcccgcgggctgcgggagtgccctgctctggcctcgcttgttgctcttcggggactccatcacccagttttccttccagcagggtggatggggagcatcgctggctgacaggctggtcagaaaatgtgatgttctgaatcgtggattttcaggttacaataccaggtgggccaaaattatccttccaagattaatcaggaaaggaaacagtttggacatcccagtagcagttacaattttctttggggccaatgacagtgcactaaaagatgagaatcccaagcagcacattcccctggaggagtacgctgcgaacctaaagagcatggtgcagtacctgaagtccgtggacatccctgagaatcgagtcattctcatcacgccgaccccactttgtgaaacagcctgggaagaacagtgcatcatacaaggttgcaaactaaatcgcctgaactctgttgttggtgaatatgccaatgcgtgtttacaagtggcccaagactgtgggactgacgtacttgacctgtggaccctgatgcaggacagccaggacttctcatcttatttatcagatggactacatttgtctccaaaggggaatgaatttttgttctcgcatctctggcctttgatagagaaaaaggtctcttctctacctttgctgcttccttactggcgggatgtagcagaagcaaaacctgaattaagtctgctgggagatggagaccattagccaatcacaggagacccaaatctgcttgttatctacagaactcaaagttgtcaatacgtagaggtacgcttttttcctcaggcttaaacctttgccactgatattaataataaaagtattagatgatttttcagggaagttttatacttaggtccattgtgtttcgacagtatttattaatgcagatatcagtgctacagctataaaatataccctgagcagcttgttaattctataaatgacaaagactatgtttttaaaaagtcacaattttataaaaatggtttttcttacattcttttgagaactgtttcactcatacatacacccacacaccccactcaaccttgtatcaaattccaaaagtgtaacccaaagtataaggaatatcatgactagttaaaagataggcaaataccataagggtacaagttccaaggtattaggtataacaaggtatctggggtaaccaaatgtccttgggaatgggggggtgggnggggtatatggttaggtccccgggttgggttaactgcccntcaaatttacaggtttaaatgttttgggccggtgagcccctttccgttcttggggggg

SEQ ID NO: 12929 - DNA, 1493 bp, Homo sapiens
ctttttttttttttttttttttgccaaggtatatacacgtttatttaaaaaagtttacagttttcattatacacaactattaagaggttatagtcagaggaggcatgtgtcctgttgacagacgtgcctactagatcatcacaatgcaaggagaaaggtggaagggaggagaccagggcgaggaaaaataagcgataaaaagcttcagattttcagttaggggctggcagtcccttttatcttttcaagtatcacacaatatgtaccaaatacaatctgtaaataatggccatttcttcccaagcccacagccaagatgagtgttaggctaaattcagagccctggctcttcctcagatgagtggaaaacctgcgcatgacagggccggctcccccttctcaaagggcttcctcccactcatcccatccctaacagaatcgccgaggtgttcacgggccagagaaagcacaaacatggattcagaagtccaaagaaatgcagttcgttgcgcccaatcagagatagatgatttcattcaacaaggctggaagcccagttgggaagtcgataaaaaatcttgctaacttttttaaatggcttttacttttctaagtcactgaaacaaggaagggccacatgccatttaaaatcaaacactagttccccagagacttggtgtccagaaacttgacccacagaggctagcggaggatctgtctttcatgattctcagccatcccaacgggaggcctaacataaagcatgtgccaggccaatgccaactaggacttcagggggccctttggagggaaaaattcctttgagaggagacattcctcaggagcttagatcagccagctggcagtcagaacagcttttgaagtggatgagaaatgttaggtactggagagatgatatggcaactcctgataatgacctcactaggataaaatgctggttgaaactgcacagtaacctcaaggagggtgatgaaattgacgacaaagccaaatgtcagtgtctaagatggctaccactgaccctgtgcccaaaagccccccggtgctggggcttccagagggagcccaagggtggtggattcaatgttgccaggttgcaaccatcttgcttgttggtgtttggcaagagcttgagctcagttatgtgaacaggggcaaagaatggcttgtgctggtaaaactcaagggaggatccaaaaactatgggcactaaaaaggggagggaaaccgccagaagtggctctgacctgctgccgctgccaccacctctaaagccaagaatgtagagcctctgcccagggatctggatgctctcctgagtgttggaagggcagcctggaaaggcatttggtggtgaaaacaccgctgctccagacttacgctaccatctattgttgggggcccagagtccttggattcactgcccaggccttcttccagatctttctgtacctgtgtgtttgggctcctac

SEQ ID NO: 12930 - DNA, 459 bp, Homo sapiens
gagttgccaggcgagacaggaacttctttccccttctctgtgtcaggatcgcagaaagtatgtcccttctctcaccatgagctggctctccagttcccagggagtggtactaacagcctaccaccccagcggcaaggaccaggccgtcgggaacagccatgcaaaggcaggggaggaagccacctcgagtcgcagatatggccagtacactatgaaccaggaaagcaccaccatcaaagttatggagaagcctccatttgatcgatcaatttcccaggattctttggatgaactatctatggaagactattggatagaactagaaaacatcaagaaatctagtgaaaacagccaagaagatcaagaggtggttgttgtcaaagaagccctgatgagggagaattggaagaagagtggcttaaagaggccggtttatccaatctccttccggagagtctt

SEQ ID NO: 12931 - DNA, 442 bp, Homo sapiens
  misc_feature (1)...(442): n = a,t,c or g
ggtgaccttctcttatcttcctttcacttgcccaaggcaggactctaatctaattgtaagtctaaagacttttattccagagagtnnnnnnnnnnnnnnnnnnnnnnnnnnnnnnnnnnnnnnnnnnnnnnnnnnnnnnnnaactgaagggtgttggttgatttagatcataccctttttgtccagtcacatttctacatggttgtcaatcttgcctacactatgaagtcttcataaaaggcccaagaggactgggtctccagagagcttctgggatagctgagcatgtggaggtttagggagagtggtgtgcccagggagggcatggaagcaccacgccccttcccccatatctcaccttacacatctcttcatctgtgtgctttgtaatgtcctttacaataaaccgttaaacgttaagtaggtgtttccttgagttctg

SEQ ID NO: 12932 - DNA, 1375 bp, Homo sapiens
cctttcttgaagatggcagcccatctccagtccttgcctttgctgcctcccctcgacctaatcatagctacatcttcaaacgggagcccccagaaggctgtgagaaagtgcgtgtgtttgaagaagccacgtctccaggtcctgacctggccttcctgacttcctgtcctgacaaggaacaaagtccatttcaacccgactggctcagccttctgccccgtcaacctgatgaagcccctcttccccggcatgggcttcatcttccgtaactgcccctcaaacccggggatctccccttcccccggccagccccaggccaccacctcggaaggatccggaagcctccaaggcctccccactgccattcgagccatggcagcgcaccccaccatcagaagagcctgtgctctttccagagctccctgatggtctgagggtcccacccctgccccactttaccatagagaccagtgccttggtggcaggtccctccccaggtcccctgagatggggtatggaggggcccttccctctcggccttcgagcactttctttcacttactgtgtcaaagccctggggtcctctttttgatgggcaccggcccctctgaacgtgatgggacctgccttctccactagtagctgggcagctcacaattcacacctgtgtaacctgccacatccctcacttggtggaaaacacccagaaggtcttgagtcccccacccctgggtgtcagtccaaatgactgtataggaggcccttatttttgtcacagagcaagctgggccatgaacgaaggagagaagacgccacagatttccttccctctcctccaggagaccataagatagatcccccatcctctcagccctattcccatgcctccctctcattggaggagctgaccaaagcagccctaacgggccataacacttgaccaattcagctgctggcagagggaggaaacaagtgttttcccaagtggcattttcatctcgctttcaccctgactaaagattgtcttaagtagcagcccagcccgcccagccccaggtgggtagtggggaggagagctggcattcctccaggtggcaaatggcgactctatactctccgctcgccccagggctggatggattagaaaaatgcctatttttcttgtatcgatgtagagactctattttctcccaaagacactatttttgcagctgtttgaagtttgtatattttccgtactgcagagcttacacaaaattgaagaatgttaatgttcgagttttcttatcttgtgtttagaggttgttttttgcagatcttggtgttaatagaccaaataaataaataaatattcccagcaaaaaaaaaaaaaaaa

SEQ ID NO: 12933 - DNA, 1088 bp, Homo sapiens
gcggcacgagctgttttttgcacgttctttgcgcttgtgccgctggggagccaaacgattgggagttgcctccacagaggcccagagaggcgtcagtttcaaactggaagaaaaaaccgcccacagcagcctggcactcttcagagatgatacgggtgtcaaatatggcttggtgggattggagcccaccaaggtggccttgaatgtggagcgcttccgggagtgggcagtggtgctggcagacacagcggtcaccagttgcagacactactgggaagtgacagtgaagcgctcccagcagttccggataggagtggcagatgtgggacatgtcccgggatagctgcattggtgttgatgatcgttcctggggtgttcacctatgcccagcgcaagtggtacaccatgttggccaacgagaaagccccagttgagggtattgggcagccagagaaggtggggctgttgctggagtatgaggcccagaagctgagcctggtggatgtgagccaggtctctgtggttcacacgctacagacagatttccggggtccagtggtgcctgcctttgctctctgggatggggagctgctgacccattcagggcttgaggtgcccgagggcctctagtatgtccattactggagtccctaatcacgcctttggccagcctccttttgaaagtgtccgaagcctttttactttgcctcaagcaacctctagctcccacaattcagtgttgggtcctctgtgcaatatcatgatcatcttcctcatcccctaccttgtgaaagctaggcatacagccaaaccctccttttccccacccaccaacactactgccaatttcctaggctaccatgggtgtatcttccttgacctgcttccttcagtccctctgcctccctttgcccaggcctttctcagactgtattccatcctggggtcttatcattcagctttgtttgaatttattaatcaccatgatacctctccctccctttgtccacatgtaacttgttcttggggctctaccagatggctgaagagtaaatcctttctacctctggctgaaaaaaaaaaagaaa

SEQ ID NO: 12934 - DNA, 984 bp, Homo sapiens
  misc_feature (1)...(984): n = a,t,c or g
ggcaggcagggactgtgaaatgttatagtggaaaaaaagggaaggctctgggtgtgctgtgattggagattgttggcatggggacagagcggactaactggaggggcatctttggttggttgggggggtatatttggctttctctggttggtctggagttggaagagggggtgtggtggctggggattgggaagaagctggcagccactaagttcagactgttctgggtccgattgctgctgaggctgtggtttggcttccttggcttcccaggctggttatgggtttctggccagagtctattgtcacatgtggcctggccattgtccagttgtatgttcagtctcttggaaggaagggtattgactctgagaggggccaccatcgctggaatgggggacacacagtacttcctccagctgcctacacccccctagggtcagtgggcgcctgcctgtgagggtgagcccaatggctagagggctctgctccaagtcattgcttactacacccacaaacattcttcgttctttaaggcctaacttaaagcccagatcctacaggaaaccttgattagacccctctctttattaagcttcctaagatcaaaccctgcttttgtgtaaatgctgacctccttgcctacattttaaaaacctagagctgggcatgatggccccannctgtgnaaccccgngtgnttagggnncttagggtggnnggattnctagaancccaggagttcgagaccagccctgggtaacatagctagaccacatctcttaaaataaaatagttaatttagccaggcatgatgatatatgcctgtggtcccggnnnnnnnnnnnnnnnnnnnnnnnnnnnnnnnnnnnnnnnnnnnnnnnnnnnnnnnnnnnnnnnnnnnnnnnnnnnnnnnnnnnnnnnnnnnnnnnnnnnnnnnnnnnnnnnnnnnnnnnnnnnnnnnnnnccctgaatatcttcctt

SEQ ID NO: 12935 - DNA, 969 bp, Homo sapiens
tttttttttttaggtgtttaatatttatttatttagttcataaacaggcactgccacctccagtgttcatccatggcactttcatgaccgcttcctgttctgtggcttcttttagtgcccaagttgtatcacatttcttgctgaagttcagacaattgaaaacaaacagactcacatctagggaaatcaacagaccaacaatggcaaaacacaatacaatgaaatggaaaaataatgtttgttacaggagtgcagcaatttagagagtgtctcaggagtgtggctcactggcagctgcagctatgttagtgcttctttctgcctcaagttcagaaacaagctggactatctcagggtgattgaattttcctgctgtggaatcatagaagtcttgcagtctcccaggtttgtgttcaaggtcttcatattcagatgcttgaagaatcatttcacattggtctagctgcttcacaaatttggcttctgcactagattgggtctcgtactcttcccaaagttcatagagctcctttctgaggtcctctggtaggagctgggttatctgcttcatagcttccggtctttgttaagacggtcatctttgatcaccatagccataactgccatccggtacatgtgatctgaaacgctctccggcctctggacatttctgtatacccagccagttcgtgggactctcttgagctgccctaccagccgcaggaactgcagtagggaccgagccccgtggcccgagaaggtcgcagaggagaccgaagccatgcggccaccgaccccggctgggcggagcaggccgcggcgaagctcctccccgtcctcctcctcctccccttccccttgtctttcttccccctcctcttactcttctatctctttctcctccccctcttcttcttccttctgccccctcttcctgctccccctcttcctcctccccttccaacgcct

SEQ ID NO: 12936 - DNA, 912 bp, Homo sapiens
  misc_feature (1)...(912): n = a,t,c or g
attcttccatatgatcctctaaaaatggacacttcctctgaatgctgtatctcatggcacctggtccaactagaaatggtcaaggaattcatttggctccttgatacatcagtcctcaatattactttctaggtattttatggccagattgcttatatgagtggtcttttggtttggtagtaggtttttatttttaatttctgtactaatgaaattcctgactttaatttctgaaaaccaaaaactctccaagtgtatttatttannnnnnnnnnnnnnnnnnnnnnnnnnnnnnnnnnnnnnnnnnnnnnnnnnnnnnnnnnnnnnnnnnnnnnnnnnnnnnnnnnnnnnnnnnnnnnnnnnnnnnnnnnnnccaatatggagccaccatgccaggatttgttcatttttaaacatttttatctcttcaagtcatcttttgatcttttaaaaagcaccttcaaacagctgcaccttccatttgcactaggaaatgaaggtagtgatgggattggcaatgttcctggcagatgtttcagcccaaaagctcttctacagaccggtttagagctggtgccctatgagaatattagggagcttttattttaaattgaactttacccttgtccatgcaaggcattcctcctgaatgcatccatgaatttgtttacttttgcgtcaaacatatgagccattgtcatgctcagcctgtgccaccattgctctgtctgatgtatgtaatcatacaagacctgattttggttctaacacagtggtctttgactatcaacattgatgtttttagagatgggttcttctggttgatacagactatgcattgcgtttagcagatggggtaaaactggcctaaaacaagtctttgcagaatacatgccaatttccaaaaaaaaa

SEQ ID NO: 12937 - DNA, 959 bp, Homo sapiens
ttttttttttttttttttgcagtgagaataatgtttattgagaatggctcattacaaacaaaatatatataaaatctctgcaatgcaaaagatccctttcatccccgtggctagaatgaacaaagcccaactgtcccacatggcttcaggtgctgtgctggtccccagcatgtgaacaggctgggcagctgtcggtgtcatgtgctgtgggcaaaagtccctgatgtccaggctctctggctccattttcatgacttgtgcaagaatgcaacacagtgtgtcttacatcctgcctctgtgaccctccctaggcagatgagtcttgagaatgggcagctttctcattcatctttcaggaaggtgacctttaacttgtggcatgccctgagaagccatcctctgggaccagagactgagtgtttctaaacattttggctggactgaggtgctgttaccaccctccatgaaggccactccctagtgacagccctaacagcatgtgcactgtctaaatcacatcccaccatcctgaaaacttcatttcctcccactggtttccttcatacagctattctaacaattttaccagaacaccacctgaagatgcccacacccccacagctgctgtgcatgggtactcctgggccacctggcattaaggcaatggagatgagaccagtctagagccaacaccggtctctgaaacccagaagggctgcccaactaacagcacctccctcttggccaaaggctttgtctagggttgagaagcaatttggctgggtggtctcactgccctcctaaagcagagcccacctctgcccccagagtcatctgtgctccaaagcaatgggcgggggcacagctgccaccatgcccatgccttgggcattggaagagcaggaccccaggagtgcagggatggtatcactgttgcccctttgaaaatgacccatttc

SEQ ID NO: 12938 - DNA, 1467 bp, Homo sapiens
cgctcattctgctgaagaaataggcatcatagctgggaaacggattcacaagacccaggctgttccctacatatgtttcctcctccgacatcagttcatcagtcaatcaagccatgtgagagtggaggccttgtattccctattattcttgggcactctactccaagtaggaaaaggccaggaggtcctgttaaaggatgcactcagagcccgggctccctaacgtatgagagtgctaaccagcaggtgtagacttttcaggagtgaagaatgaggcaggcattccaaacctggaccttcatcaccttttgtttcatctcaagacaattctgagggactgttttggagcgtgtctggaaggtgaaccttgaagaagagtgtgggctttgatgtgactcagttgagatctttcatggggaggcaggaattcaatgcccagaatctgggctggtgtctttgaggtcagtaggttgcgtctttgtatccaagtccattgttactaggttggaggctggagattctaaatggcttccagaccatctctctgattctctttgggagatggggtctgaaagacaatgtcagtagttttgggaaattctagaaagtgtgcttggaaacgtgggaagagctcttgcctagtgcctaaatgctccatttgcagctctagccaagtagatacttggtaggtatagagccgggtttgcgtttatatcagcaaaacctatgtcagagttgaagaagtagtcaggaaaaagcgtcttggtcgcaggccggggaacatcttaaaagcaaacttctagcctgctgactcttggcaatgagtgttggatcctggctaaagtgccttgaatgcagcatgaggccaatccatgaatccaacttctcatgggagaaatgttaatattttttcgagtttgaatcaatcagggtgaaactaccatgctattggtttgcttactttttattatttcatgtaaaatctaagacaaaatacattaaatgcttattgacatatgtatttattcttcaccaggctgataatatctgcctaattttaaactttcttccattttgtaggtttcaacttattctattgtaagatactgttaaatctaatagaggcattgtcacttttacgtataattttattttatttcatatatttcctattggttttttacatttaaattatggagcacttcatcatataaaaaacttcaattatatttaaacagtaagtctttggatttttttgccttttaatttccatattacataataatgagataaacattaatgttttcagggtactttaaattttagataattactcattgtattcatgtgaaatttgtttttactgcatgtgtgggttggaggacggttttcacttctgattcatctttactcttatctcatcagagctcatacctcttgtagttgggggattgcagtttataattc

SEQ ID NO: 12939 - DNA, 447 bp, Homo sapiens
gtatgtttggtgtgggggcggggggcaagatacagacatttagtccatagcactgtatgtcttaaaattattgtttaaggcaccgttcacctctggaaaaggattcttcacctggaagttcatcaacaagcttgttgataaaaaagcaaagagagacttcagacacgccgatcatgagagctttaaaagaacttgatgagggaaaaatatttaaaaattgggggacacagacagagaaagaggacacctcaaatataaatcctcggcaaactgaaacttcagttaatgcaagtcgttctccagaaaagtgtgcccaacagagacaaaagagacttaattcggcctcacagagatcatcatctttaccaccttcaaatcgtaaatcaagtactccaacaaaaagagagattatgctaacaccagtgactgtggcttatagtccaaagc

SEQ ID NO: 12940 - DNA, 1490 bp, Homo sapiens
  misc_feature (1)...(1490): n = a,t,c or g
ttttatttaaatacatttatttgaaccggcctgggggaggcttgatgttgatgggttggtgattaaagcctcccaaagccaatccttggcatggcctttgggactcaaaacacaggatctgactggtgggcacaataccatcttgaacgcccacaaaaaggtttggttttgttgccaaagggcaggtggctccaggcagggctgatggtggcagggtggggtgaggacaggacaagagatctgggtgtggaaggatggccgggtttctgcagcagcaggaggaaagggtgggagcacacaggcacagaacactgtgagcaggactgccaggccagtgtcacaagcgctaccatctgggtgtagacagacctgagctgacaaagcttgggggagcaaggccaacggctttaaacacaagctcaggggcttggggtttatcccgagggcacagggcagccatgtagggtggagttggcatgagttaagcctgggctgggtgtgtagactggacagaggtgggtagggcaggcagtgacgagctggtgtgcaagagactttagggccaggcatggggggacagaactcccacctcgttcgtgctcccaccctccccagctccaccgcctggtcttcagtctccggcatagcaaggaggaacgggaggacctggatgctgatgagcagcaaggctcctcactccctgtacagaatgggtgcccagagagtgccatggagatgaatggtagggcaccatgctgggaggtggggctggaggagctgagttcccgcaaactaactgcagggcctcaatttccctnagagccccaggccccggcaccaagcctcttccgccagtgcctgctctggttttgtggaatgagcagaggtggggtgggcagtcctccgccccttacccaggaggaggcagcggcagcagccaggcggctggaggacatcagcgaggacccgagctgggcccgtgtggtcaacctcaatgccctgctcatgatggcagtggccgtgttcctctggggcttctatgcctaagaccaactgcgttggacaccataagccacagcctcacaggaagtgggggtgaggagcctgcggtgctccccagaaaaggggaaggagcagtggggtgagaaggtcctggctccccttctccccgccttcctctcgctggggcccactgcatctgattggcagtcacttcccatgaggcctggcccaacccgctgcagttgccctaaggaaaaataaagctgcctttcccctgtcctgctgtggccaaagtgtccttgctccaggttcctgccctgggcttgggcctccgtctgggctgctcacaagaccttcttttcgggagacagacctgagctgacaaagctgggggagcaaggccaacgcgtttaaacacaagctcaggggcttggggtttatccgagggcacagggcagccatgtagggtggagttggcatgagttaag

SEQ ID NO: 12941 - DNA, 484 bp, Homo sapiens
gaaaatagctctgaaactaagaagcaattatagcaagatttcaggatacaggctaatatacaaaagttgatcatttttctatatactagcaatgagcaaatagaatttgaaattaaaaatacaataccatttacattagcaccccccaaaattaaatagttaggtacaaatctaacaaaatcgtgatacaagagctatatgaaaaaatctataaaagtgtgatgaaaaacatcaaagaactaaataaatggagatcttcatatggtaagggtaagagcaaaataaaaattataaaaataaataaataaatggatattgcatgttcatggttaagaagacttaaaattgttaagatatcagttcttcacaattttatttgtagactgaatataattctagtcaaaattgcagtttgttgtagatattaacaaactgattccacataagtttatatggagaggcaaaagacccagaataggcaact

SEQ ID NO: 12942 - DNA, 967 bp, Homo sapiens
gctatgcccggacagaggatcgcctcgctggcctactctctcctcccgtacggcgccggaatcccagctccacttaccaggccgcggctaccccgccgtcccccccgactcccgccaccccgctctctcaggctcttcaggatccaagtccgtaggccctttaaggggtctagttgccgtttgcgaggccctgggactttggtcccagacagcggggatccggatggcttccgtgcggatccgagaggccaaggagggagactgtggagatatcctgaggctgattcgggtgaagactgcaggccggagctagccgaattcgaaaaactctcggatcaggtgaagatcagtgaagaagccctgagagcagatggctttggagacaatcctttctatcactgtttggtagcagagattcttccagcgcccgggaagctactggggccctgcgtggtgggctatgggatatactatttcatctacagtacatggaagggacgcaccatttatctggaggatatctatgtgatgccggaatatcggggtcaagggattggttccaaaataatcaaaaaggtggctgaaggtggccttggataagggctgctcccaattccgcctggccgtcctggactggaaccagagggccatggacttgtacaaggccctaggagcccaagatctgacggaagctgagggctggcacttcttctgctttcaaggagaggcaacgagaaagttggcaggaaagtgacgccatccctaggaggatctctgtcttgagtttctccttccccatcagctgaagcactcttcagagactacgtccacagacactgatgctgaggcctccctggaggaaggagggttaggggtgcctatcctcaagtattggaagagcagaattgagggagagacctttcttccttgttgagggtgaaaaataaataagaattacatgtcaaaa

SEQ ID NO: 12943 - DNA, 587 bp, Homo sapiens
  misc_feature (1)...(587): n = a,t,c or g
tcaacaaggaagaaaggtcncnccctcaattctgctcttccnanacttgaggataggcaccccnanccctccttnctccngggaggcntcagcatcagtgtntgnggacgtagtctctgaagagtgnttcagctgatggggaaggagaaactcaagacagagatcctcctagggatggcgtcactttcctgccaactttctcgttgcctctccttgaaagcagaagaagtgccagccctcagcttccgtcagatcttgggctcctagggccttgtacaagtccatggccctctggttccagtccaggacggccaggcggaattgggagcagcccttatccaaggccacctcagccacctttttgattattttggaaccaatcccttgacctgttgtggagagaaagaggcaaaaaatagctattctttgagctgaaggggatcagaaaatgacaccggctgggctctggggacaggggataacagtggggtctgtggggtgctttgctcccaccccagcctcagcttctgcccagtaccccgatattccggcatcacatagatatcctccagataaatggtgcgtcc

SEQ ID NO: 12944 - DNA, 1371 bp, Homo sapiens
tttttttttaaatttaaatcactgtgtttggtatttttctgacaaaattaagaaaaagaaaaaaaattatttgtgggcaaatgttaaatttttttgtttccccttttacctcaattgtatcatagtactgggtttttttgtttgttttattgtgtggccaatgtctttgggcatgatgctatctaatcattgttaatgtgagaacatttctgaagatgtgaaagacaaattatgtagctcacaaactggtttattatatatatggataaaagacttttttcattgtggtcttaacacttttatataaaaatgagaatggaaaaagagtcgcactgaactctctcttccttctccttttctttccttccctctccagagatgttggtttctacagcaaccctagatataaaattgtggctttaaaaatgcatgaaaccacctttaattatccagaatgaatagatttgtcttttcctcaccaccttccctccaaaacatgacataaacaatattttttgcacttgtgatccttggcccctttccccattctcaacaccatccatccctctggacaaaggatcatacaggtgttattagcaagcaagagatactgaagcgatcaaacagttttagggtggaagccattcccagtttgagtcttcatcctgtaagcccccaggggcagtccctgctttactgaacttcatcctgttagatggagagcatgcctgtttaagggattactggtcctacagccaggagctaattgttcaagaagtgttgaactttaaaaagacaagaccacttgttgaaatccagcgtgctctgtggctttcccctatttctcttaatacttagggaagaatctgacaggaagaagcgcacaggggtgtgcacaaagaaaatgacatgaatctttatttttcactgccagcttcaaggaaagaaaattttttctacaatttgcatgagggatttttttaattgtatgtactcatggttgtaaaccaaaacgtactgtaccgtacagagaaaaggagcaaaaaaccaagtcttctgtttatcctgaggctttccacaatgttcccctcctgtgagccaaggaggcaaactgcacaagcttgtaaatggttcgtctttaaaatgtacataagtggaacatttaataaaatgaggggaaatggatttataaacttgttttttttctaggtgaccctgtttaataggctttcacagactggggaatgctcaagatgtgatgggcctggtggtacaggtgtgacatttgttaccacccatttctcccaccccaccctgcttttttgtttgtttgttttttcatcccccagcacactataatatagtgaactg

SEQ ID NO: 12945 - DNA, 6157 bp, Homo sapiens
ggaaggaggtgggggccgggagcgcaaatggcgttgagatggttcagggccctgttcaaactccagcactgaccattcaccggcggaagcggcgccgctcctgcccccccaaccgggcttcctatttaccgaaagcagagtccctcgcctctctcggctctcacctgccggccctgctctcccgcgcgagggttccgcgcccgcccgcgggccgtagggagcgggagaggcggaggcggcccgtggccaaagcacccgccaggctccgaggagaatatgaaactggtgtcaaaatgacatccagatttgggaaaacatacagtaggaaaggtggaaatggcagttcaaaattcgatgaagtcttttccaacaaacggactacccttagcacaaaatggggagagaccacatttatggctaaattagggcagaagaggcccaatttcaaaccagatatccaagaaattccgaagaaacctaaagtggaagaagaaagtactggagatccttttggatttgatagtgatgatgagtctctaccagtttcttcaaagaatttagcccaggttaagtgttcctcttattcagaatctagtgaagctgctcagttggaagaggtcacttcagtacttgaagctaatagcaaaattagtcatgtggtcattgaagacactgtcgtttctgataaatgcttccctttggaggacactttacttgggaaagaaaagagcacaaaccgaattgtagaagatgatgcaagcataagtagctgtaataaattaataacttcagataaagtggagaattttcatgaagaacatgaaaagaatagtcaccatattcacaaaaatgctgatgacagtactaagaaacccaatgcagaaactacagtggcttctgaaatcaaggaaacaaatgatacttggaactccccattttggggaaaaggccagaatcaccatcagaaatatctccaatcaagggatctgttagaactggtttgtttgaatgggataatgattttgaagatatcagatcagaagactgtattttaagtttggatagtgatccccttttggagatgaaggatgacgattttaaaaatcgattggaaaatctgaatgaagccattgaggaagatattgtacaaagtgttcttaggccaaccaactgtaggacgtactgtagggccaataaaacgaaatcctcccaaggagcatcaaattttgataagctgatggacggcaccagtcaggccttagccaaagcaaacagtgaatcgagtaaagatggcctgaatcaggcaaagaaagggggtgtaagttgtgggaccagttttagagggacagttggacggactagagattacactgttttacatccatcttgcttgtcagtttgtaatgttaccatacaggatactatggaacgcagcatggatgagttcactgcatccactcctgcagatttgggagaagctggtcgtctcagaaaaaaggcagatattgcaacttctaagactactactagatttcgacctagtaatactaaatccaaaaaggatgttaaacttgaattttttggttttgaagatcatgagacaggaggtgatgaaggaggttctggaagttctaattacaaaattaagtattttggctttgatgatctcagtgaaagcgaagatgatgaagatgatgactgtcaagtagaaagaaagacaagcaaaaaaagaactaaaacagctccatcaccctccttgcagcctcccccagaaagcaatgataattcccaggacagtcagtctggtactaacaatgcagaaaacttggattttacagaggacttgcctggtgtgcctgaaagtgtgaagaagcccataaataaacaaggagataaatcaaaggaaaataccagaaagatttttagtggccccaaacggtcacccacaaaagctgtatataatgccagacattggaatcatccagattcagaagaactgcctgggccaccagtagtaaaacctcagagtgtcacagtgaggctgtcttcaaaggaaccaaatcaaaaagatgatggagtttttaaggctcctgcaccaccatccaaagtgataaaaactgtgacaatacctactcagccctaccaagatatagttactgcactgaaatgcagacgagaagacaaagaattatatactgttgttcagcacgtgaagcacttcaacgatgttgtagaatttggtgaaaatcaagagttcactgatgacattgagtacttgttaagtggcttaaagagcactcagcctctaaacacacgttgccttagtgttattagcttggctactaaatgtgccatgcccagttttcgaatgcacctgagagcacatgggatggtagcaatggtctttaaaaccttggatgattcccagcaccatcagaatctgtccctctgtacagctgccctcatgtatatactgagtagagatcgtttgaacatggatcttgatagagctagcttagatctaatgattcgacttttggaactggaacaagatgcttcatcagccaagctactgaatgaaaaagacatgaacaaaattaaagaaaaaatccgaaggctctgtgaaactgtacacaacaagcatcttgatctagaaaatataacgactgggcatttagctatggagacattattatcccttacttctaaacgagcaggagactggtttaaagaagaactccggcttttgggtggtctggatcatattgtagataaagtaaaagaatgtgtggatcatttaagtagagatgaggatgaagagaaactggtagcctcactatggggagcagagagatgtttacgagttttagaaagtgtaactgtgcataatcccgaaaatcaaagctacttgatagcatataaagattcccaacttattgtttcatcagctaaagcattacagcattgtgaagaactgattcagcagtacaaccgtgctgaggacagcatatgcttagctgacagtaagcctctgcctcaccagaatgtaactaaccatgtaggcaaagcagtggaggactgcatgagggccatcatcggggtgttgcttaatttaactaatgataatgagtggggcagcaccaaaacaggagagcaggacggtctcataggcacagcgctgaactgtgtgcttcaggttccaaagtacctacctcaggagcagagatttgatattcgagtgctgggcttaggtctgctgataaatctagtggagtatagtgctcggaatcggcactgtcttgtcaacatggaaacatcgtgctcttttgattcttccatctgtagtggagaaggggatgatagtttaaggataggtggacaagttcatgctgtccaggctttagtgcagctattccttgagcgagagcgggcagcccagctagcagaaagtaaaacagatgagttgatcaaagatgctcccaccactcagcatgataagagtggagagtggcaagaaacaagtggagaaatacagtgggtgtcaactgaaaagactgatggtacagaagagaaacataagaaggaggaggaggatgaagaacttgacctcaataaagcccttcagcatgccggcaaacacatggaggattgcattgtggcctcctacacggcactacttcttgggtgtctctgccaggaaagtccaatcaatgtaaccactgtgcgggaatatctgccagaaggagacttttcaataatgacagagatgctcaaaaaatttttgagttttatgaatctcacttgtgctgttggaacaactggccagaaatctatctctagagtgattgaatatttggaacattgctagctgctttacctttgcttcaggtgctcggtaatgctggagctatccttagacaaagaaaagtcaagtcatgaaagaagtccttgaagatataccaagaacattcatcagtatcattcgtgtttggatttttaaggccacctgatttcttcgtcatgcattcggcatttgctaaatgacagttactacatcaatctgcaactatcaaaaatgaggggaaaaggttcaggctgttaacaattccatgcagtatttaaatacatttactttggcagagtttataccctccccttgttttcttgctttattctgggcaagtttgaaggggaaaatttgtgctgctgttagtgcaactgctgtgtatgttgagccactgttgtcatgccagccaggtgcaaaggcagcttagctactgaggtagcgaatgttctgaggacattctagacaacagcttagttcctttttcaggctcatttgcttttgcttttttgttgaatgattccaatcgtaaataaagcttttaataattttgtgaattttttggttgttgttccctgaactactgtctatatttaaaattagatggaatccaaagatacacgggattaatagtatatttttttattcttgattaggtttgggttattgaactattttttacttttgagaccacaaccatattcaatatcataccataatgtgtcatagctataggcacaagaaaaacaacagtttgagagaatattatataagatgatgtgccctgttaaaaggaggaggcaaaatagtcaaacccagggtagtttacacttaatgctagggaggctcttaaaacattattagattttgaggaaagactctctagatatattttctaatgttcagtacaataaatataaggaagctaaaacaccaatgtggaattcctgtttccagataacatgtatattcttctatagagtgacaggatcaattgcataagcgcaaagccttaaattgctggtttagagaagacccttttttcattcagattctttgttcgtagagcagttatttgaaaaacagttatggaacacaaaacattttatagatttaatatcataacattgcaaatttttcttgtattattgttcacaccactggttatacttttttttttccttttttattgattgggcctgaatacaggctttctagagatctttttcattaatacttttaaatacctttcaggtagttacatcatgtttcttcattggatttgtaaaacttgaagccataaaaatattagtttggtgtgtattggggaaaatagctaaaagtctaatttttacccatttagactttgttatttccttgtataaagtgacaaatcggggctcttgtatcagtgccagctgtaatgtttttaaatgcagtggctgccttctattgtcttcctatttttgataatgcagattgttgggaaatctgtaaggaagtaactgattccaggcaaattgttttcttccttctacccaccccaacccctacccatcaccttttaagaacatagtacgccagtgtaacgtgggaaccattgagattgtatttgccctgagtattaaagctagcttagcaaaatacttttaaaaacatattggtaaatgatacccataaaattaaattagttatattttatttttaaaatggcaaaaatacattgatatttattaatcattggatttggggacagatttttggtgaacctgacttgtggcagatggtaaggaatattataaaacatttggatgagaacaatcagggcgaactgcatttttctgttacactggtaatcatttgaaaattgatttacctcagtgtttaacagttttttgttttgttttgttttttaaataataactaattgtcgagcactgatagagatgcagattttggtggggggaggtggtgggggagataatcacttcaccaactgcagtgcatttgtgtgtttttaaccctcagagaactctgcattttagggtacttgaggctgacttaactaaaagttttaaagtaaccttttttccattgtaaatatttctgtaaatactaccaattggaaattagaacagtagagtacttttctgaatccaatcctatttttattttatacagtatttctcagctgtgatctttggagcaaaagccaacggcaggaaaaaatagtttgtaccagtttcatgaagtatgtctttgggtttttgtaaataattttaactcaaataaaattgctactttcaatacaaa

SEQ ID NO: 12946 - DNA, 591 bp, Homo sapiens
ttaacaaagatttctcaggaagacagcagagcagaggaatctatatagatgtatgcacagacctgtctgtatgctgaactttgttaaaaatatctgccagttattaaaaagcacagtttaaatggggtggggttaaagttcaggtaagtaagttagagagaaaacattgtatgatcagctcctgcacttgatctatctatctttggcttcccaaacagtaactcactccaggccaagtgtgccttagcacgagtgaccacagtttaatagaccacacacatcgtttaacctgctcttggtcattggaaatttacactgaacaaagtgcaattaactgtagaacagtttcatttttattaaaacttgactgaacaaaaggggaccatcaacattgtagacactggaggccttacagagtgctagcctcttccttcaggactcacctggggcctgctgcttttatattttgaaagagtttaagggctaataatttaatttgttgtttgttaaaaattaaaatctccgttctttccggctgcattgcttttgcatgttcacatatgatgtacttttatgatgtacttttttttt

SEQ ID NO: 12947 - DNA, 864 bp, Homo sapiens
attcggaacgagccggcgtggctactaggagaaggacgtacggtcctgctagtagaggaatatgtcgagtttctctagggcgccccagcaatgggccacttttgctagaatatggtatctcttagatgggaaaatgcagccacctggcaaacttgctgctatggcatctataagacttcagggattacataaacctgtgtaccatgcactgagtgactgtggggatcatgttgttataatgaacacaagacacattgcattttctggaaacaaatgggaacaaaaagtatactcttcgcatactggctacccaggtggatttagacaagtaacagctgctcagcttcacctgagggatccagtggcaattgtaaaactagctatttatggcatgctgccaaaaaaccttcacagaagaacaatgatggaaaggttgcatctttttccagatgagtatattcccagaagatattcttaagaatttagtagaggagcttcctcaaccacggaaaaatacctaaacgtctagatgagtacacacaagaagaaatagacgccttcccaagattgtggactccacctgaagattatcggctataagagaataagaattgcagaaaataacagtgaagtgattgaaactttcttctgatgagtttctctaacctacaggatggagtaaaacaactgctacagttcagcacctgttttatgtgccgaatcactgtggggaaaggtcaggaaggtgtagtccttcaataggaaattgtaattaaaatataattttatagaaccatttttatgtaatctgatttgaatgttatagttgataataataaaatcacttacttggttgactaaaaa

SEQ ID NO: 12948 - DNA, 1732 bp, Homo sapiens
acctggatcagcggctgaaactcgagagaacaagtttgccaagtgcctcatgacctgtctcaaatgctgcttctggtgcctggagaagttcatcaaattccttaataggaatgcctacatcatgattgccatctacggcaccaatttctgcacctcggccaggaatgccttcttcctgctcatgagaaacatcatcagagtggctgtcctggataaagttactgacttcctcttcctgttgggcaaacttctgatcgttggtagtgtggggatcctggctttcttcttcttcacccaccgtatcaggatcgtgcaggatacagcaccacccctcaattattactgggttcctatactgacggtgatcgttggctcctacttgattgcacacggtttcttcagcgtctatggcatgtgtgtggacacgctgttcctctgcttcttgggaggacctggagaggaatgacggctctcaggagcgaccctacttcatgtcttccaccctcaagaaactcttgaacaagaccaacaagaaggcagcggagtcctgaaggccccgtgctccccacctctcaaggagtctcatgccgcagggtgctcagtagctgggtctgttcccccagccccttgggctcacctgaagtcctatcactgccgctctgcccctccccatgagccagatcccaccagtttctggacgtggagagtctggggcatctccttcttatgccaaggggcgcttggagttttcatggctgcccctccagactgcgagaaacaagtaaaaacccattggggcctcttgatgtctgggatggcacgtggcccgacctccacaagctccctcatgcttcctgtcccccgcttacacgacaacgggccagaccacgggaaggacggtgtttgtgtctgagggagctgctggccacagtgaacacccacgtttattcctgcctgctccggccaggactgaaccccttctccacacctgaacagttggctcaagggccaccagaagcatttctttattattattattttttaacctggacatgcattaaagggtctattagctttctttccgtctgtctcaacagctgagatggggccgccaaggagtgccttccttttgctccctcctagctgggagtgacgggtgggagtgtgtgtgcccaggtgggggtgtctcctggctgggaaggagggaaagggagggagagttttgcgggggttggcagtggagagcaggctggagaggagatggctaatagctgtttaatggaaacctgctgggctggagggagttaggctgaatttcccgacttcctctgccagttattgacacagctctctttgtaagagaggaaagaaactaaacccacccaagggatgatttcagggggagaggtggagggcagatgtcctgggcaaaccgggcccctctgcccacacacctcacttgatccttttgccaaacttgtcaaactcaggggaactggcttcccagttgcccctttgccatattccaagtccccctcagacttcatgtctctgctcatcagcactgtcccaggatcctggagagggagaacccctggccccaggggaaagaggggggggtctcccgtttcctgtgcctgcaccagccctgcccccattgcgtctgcacacccctgcgtgtaactgcattccaaccactaataaagtgcctattgtacaggtcaaaaaaaaa

SEQ ID NO: 12949 - DNA, 674 bp, Homo sapiens
gcggttcaacccctcgggctacctcttgctggcttcagaaaaggatgctgcagccatggagagcaacgtgaaagtgcagaggcaggagggagccaaagtttctctgatgtctcctgatcagcttcggaacaagtttccctggataaacacagagggagtggctttggcgtcttatgggatggaggacgaaggttggtttgacccctggtgtctgctccaggggcttcggcgaaaggtccagtccttgggagtccttttctgccagggagaggtgacacgttttgtctcttcatctcaacgcatgttgaccacagatgacaaagcggtggtcttgaaaaggatccatgaagtccatgtgaagatggaccgcagcctggagtaccagcctgtggaatgcgccattgtgatcaacgcagccggagcctggtctgcgcaaatcgcagcactggctggtgttggagaggggccgcctggcaccctgcagggcaccaagctacctgtggagccgaggaaaaggtatgtgtatgtgtggcactgcccccagggaccaggcctagagactccgctttgttgcagacaccagtggagcctattttcgccgggaaggattaggtagcaactaccctaggtggtcgtagccccactgagcaggaagaaccggaccccgcgaacct

SEQ ID NO: 12950 - DNA, 912 bp, Homo sapiens
tgcgcccgccccgaagccccgccccctccatcgcctccggcatcatcacttccggtaaccccgccggccgccagctccaggagggagaatgggagaggggcaaggagggaacgagtggaagattgcgtcacgacgcacataaagacgtacgaagccgtcgccaaatgacaacggcaacacgacaagaagtccttggcctctaccgcagcattttcaggcttgcgaggaaatggcaggcgacatcagggcagatggaagacaccatcaaagaaaaacagtacatactaaatgaagccagaacgctgttccggaaaaacaaaaatctcacggacacagacctaattaaacagtgtatagatgaatgcacagccaggattgaaattggactgcattacaagattccttacccaaggccaattcatctgcctccaatgggccttaccccactcccgaggccggggacttcgaagccaagagaaactgaggaaactttccaaaccagtatatctcagatctcatgatgaagtttcctaatctagaggaaagtttatttctgcaaatgatgagccaactagttattgaatgtaaaccagatggcaaaacacttcttgattaggggcaaaaattcaaatgtcttcttaaaacctccacaattgattctccccctgtgatgtaaacttagatatccctagagtttctcagcatctttcttcctgagtggatggcattatccctagaggtcatggaccttacatcctcactggcagtcacctttggaaacaagaccgaggcctgtagaaggaaagcggaaggatggtaagagctgttcatgggaattccattcaccacacatgccagctgatgcaaagaaatttgccagtcactggaagttactgtggctactatataact

SEQ ID NO: 12951 - DNA, 381 bp, Homo sapiens
ggaagttttgcaaggaagagagccttgaagatgaggaacgtgatatgggccatgggaagttgacaacgacccaatttgagagcaatcattgaactacatgaaaaattacagaagaactcagcgttgactattctacgggtcattagggtcgttcagcattcgaagcaaattggaaaggtgaaaaagcttgataagtgggtgcctcatgagctgagcggaaatcaaaactatcgttttgaagtgtagtcttcttttatgctatgcaacaacaaaccatttctcaatcggattgtgacatgtaatgaaaagtgaattttatacaacaaccagctcagtggttggaccaagaggcagctccaaagcagctcccaaagccaatct

SEQ ID NO: 12952 - DNA, 1140 bp, Homo sapiens
ccacgcgtccgctgttttcagagatggttgacggtggagagaaaatttgctcttcaaaaaatggactcaatgctttcctcagaagctgcctgggtatcgcaatataaggatatcactgacgtggatgaaatgaaagttccagattgtgcagaaacttttatgactctactcttggttataactgacaggtataaaaatcttcccacagcttcccgaaagcttcagttcctggagttacagaaggacttagtagatgattttaggatacgattaacacaagtgatgaaagaagagactagagcttcccttggctttcgatactgtgcaattcttaatgctgtgaactacatctcaacagtactagcagattgggctgacaatgttttctttctacaacttcaacaggctgcactggaggtgtttgcagagaataatactctgagtaaattgcagctaggacagctagcctctatggagagctctgtctttgatgacatgattaacctcttagaacgtttaaagcatgatatgttgacccgtcaagtagaccacgtttttagagaagttaaagatgctgcaaaattgtataaaaaagaaagatggttgtccttgccatctcagtcagagcaggcagtgatgtccctgtccagttcggcttgcccgttgctgctgacgttacgagaccatttacttcagttggagcagcagctttgtttctccttatttaaaattttctggcaaatgcttgtagagaagctggatgtatacatctaccaagaaataattcttgctaatcacttcaatgaaggaggagcagcccagctcgagtttgatatgactcggaatcttttccctttgttttctcactattgcaagagaccagaaaattattttaaacatataaaagaagcctgtattgttttgaatttgaacgtcggttctgcactactgctgaaagatgtactgcagtcagcttcagggcagcttcctgccacagcagcattaaatgaagttggaatttacaaactggctcaacaagatgttgagattctacttaatttgaggacaaattggcctaatactggaaaataatgtctttcagaaaaaggtttctttggtttttgtttctaagaaagagga

SEQ ID NO: 12953 - DNA, 1100 bp, Homo sapiens
agagggtccatgtaaataggacgaggtagacagtgcatgattgtaggagaagggttgaagggaggacatgattccaaaaaagatcgttctcaatgtgtcgtctgactcaaccagctggcagattacacttgccaagtcgttccctttccttctaagtcagttggctccatattcacttgaatatgcctctgtttgggcaaagcaagatacctccacttaacctttatccaaggaagctcttggtgtcctcttggtcataaagttgtctcctacctaacccagttttaccaaatggaagtaaaaggggacaaactatggaagatggactccatgccattgcagtcagccaccattctcttttccatataaggagccccattacataagctacgggtgaggttggaacagctatgtttcataatttcaagagtgtgaccaccctgctctagtcatcatcattggatgaatccagttgactctttggcaaaagggtgatacttttcactaaaaatgcctactcttcctgttgatgttccttttctgtttttaccttgtccaatttccacactagtcattttttttattttttagaggatcagattttagcgctggaaaatgagttcaaaaatttcagtgtaatgtcataaggatgttgggatacagagattttttttttccttggaaacaaatggactgggaagaaacacagcatggctttgctctgagtttcaatctgatgattatgaccatggaagatagtcttatgtaaaggttaaatggtgtttacaagtggatagataaggcggagatggtgagaagccgggttttctctatgctaaatgtgtctactaagagcagcacttcctactagctaagcacaatcatagccccaccgtgatgagctgctagtctgaataacattccctgacttagggaaaggcacacaaaaacatataaagaatatgtctattttcatatgtgtgatactgacagagccatgggtattccctaaaatatagggtttccccttttttcctggtatccttagcaaattgcatttattcactacattacaaacccatcactgatggtatcccaaa

SEQ ID NO: 12954 - DNA, 694 bp, Homo sapiens
tttttttttattcaggtggcaggttttacaacatactagctcttaggatctctcagcattaataggattcaaattttaaataatatggttcctagatataatgcaaaattaactcaaatgcctttaccatatacgattttatcttccctaggatgcacatcctactgaccttttcccaagtatagtggaaacacatttaccacccctagattgtagagcctgaggattcttttgaaattaaacaataatcattgcagatgtggcaaaaactagactagctttagggactctgttcaagataatagctttagtccctggttggcaagttctcaaaatttttaaaggtagaaggaataactggtttcctatctactgacttcattgccatagttacaaacatactgttcaaataggtaacagaatgcattgtagaagtaggcaggcttaatatcttttctttttaaaaaggagttttgttgatttctaacaccattaagtgtaagtctgaatgtgagaaaagatatcccaaaatcgaatccagttaccctcaaagcatctcagaactagaagggatttcaaaggagggtaacaatcagctttaccactaggcagaaacccatgggcagcctttaaataacaaaaagagcttattaaaacagatacttaaatctctgcagtaatggaatagttcatc

SEQ ID NO: 12955 - DNA, 1095 bp, Homo sapiens
gcggccaccgttttaaccacgattggcgaagcgccgtcatttcggagcgactcagcgcctgcccgccctctcgccgcgtcgccggtgcctgcgcctcccgctccacctcgcttcttctctcccggccgaggcccgggggaccagagcgagaagcggggaccatgttccgacgcaagttgacggctctcgactaccacaaccccgccggcttcaactgcaaagatgaaacagaatttagaaacttcatcgtttggcttgaagaccagaaaatcaggcactacaagattgaagacagagggaatttaagaaacatccacagcagcgactggcccaagttctttgaaaagtatctcagagatgttaactgtcctttcaagattcaagatcgacaagaagctattgactggcttcttgggtttagctgttagacttgaatatggagataatgctgaaaaatacaaggatttagtacctgataattcaaaaactgctgacaatgcaactaaaaatgcagaaccattgatcaatttggatgtaaataatcctgattttaaggctggtgtgatggctttggctaacctgcttcagattcagcgtcatgatgattacctggtaatgcttaaggcaattcggattttggttcaggagcgcctgacacaggatgcagttgctaaggcaaatcaaacaaaagagggcttacctgttgctttagacaaacatattcttggttttgacacaggagatgcagttcttaatgaagctgctcaaattctgcgattgctgcacatagaggagctcagagagctacagacaaaaatcaacgaagccatagtagctgttcaggcaattattgctgatccaaagacagaccacagactgggaaaagttggaagatgaacacttgaggacttcagcttctcacctactttagtacagttgggaaccatacacttctggcatgtttggaaatcaaaatgtcacattctcgggggaggaagcccagaaaattgggtatgttctagagatttaccaccattgcttattgcttttttctttaataaagtttaggaaagtagaaaaaaaaaaaaaaaaaaa

SEQ ID NO: 12956 - DNA, 1361 bp, Homo sapiens
ggaaggtagaaggtggggtctgccggacgcgtgttcctgccaccaggtgcccgctccccgcgaggccggctcaggagcaggtaggtgggcgggggctcgcgtctctgtttccggtgggtcctcgcccttgtccacgcagcagggctgtagtccggggagggcagtattcctggctaggctggggcgcataggcggtgcgagtcgaggagagacgcggtgcccgcgctcagccgtgccctagcagcgggaacagttctgcagtgagcgatcggtgctctggggtattgtttccgctgcccagggtaagtctgggactgccgttcgggcctacccagcaggtaagtcttaggccatcgcctgcggtgtcggccccgggagcagcgagacccaagattgcatcaaacgtttgccccgtctctgcatatgtgactggacgtgaatgatgcttcattttggcaccccctttccctgctcaggtagaatgtaaacaattgaaaaaaatcccttcccaatcagaataccacccacaggacaacgaagaaaacctatcttcagtccccacccacgaaatgctggggggtggggaggactggaaaaggagtaaggggagaggaagggtgagcagctgcaagaagtctttacacctctctgcggttcctggtaaacgcgctcatgtcctgggtatggaagggacttaagaattcaggaaagatcaaaataacgggcctcttccccactccctcgccctcccttccccgctgctggggggttagggaggctccgtggacttccagcactctagaaggatcgggtgaggcgcgaggccttgcgggcgggtgaacccaaggtggggtggaaggctccaacccgcccaatctgagcccgaggcctgctgagaagcatgggggccttgggatagttccagaatgaggatgtgcgtttctagctgctttgcgccctcctcccccaaaaatctgctaccacaattccaccccggcggcacgcccccaagactcctttgtcgcccccaggggcgggacctgagctgtcggtttcaggagcccttcgtgacttcaaaagtcctgggcactgttgctcatgagtgctgcacaactgtcgccctctaaagccacctccatccctcactgggctggcctcctgagccttcggtgaggaaacggggttccgagttgccccgcctgagagcttaacagtctgactagaaaagggctaattcgctttctgtgcaaatctcttgagctaattatttaatctgaaacatggacaggtaaaggaccattggcgggcgtggggagggaggtgtggaatctttcccacactttttgtcaccttaaagaaaa

SEQ ID NO: 12957 - DNA, 1325 bp, Homo sapiens
agatagcaccagccaattgtacatcaccttttgaatcattttcttgaaggattgtcaatattctctgacatatatcacctgacaaaaagcgaacaagcctagacaaactgaaaaaggaagcattcagtggttggagctgagcactactgtgttcttttgtgagaggccacacgttttcttattgaagatttggcttcttcggtattgtgaataattatttcttaattgtgaaaatggatgtcagttcttcttagtcactcttccaaaagctaatataaatttctgttgttgtcatttaaaaaagggataactgtattgcatttctggtttgcagatttctaaccagtttgtaggcatttttgttctagagtggctccttaagaatctgtgagcaagttgcagaattagagtgtttatttataggtcaggggccaagaatgctcatttagctgttaattgtggcaggatgtgacttttgaaagctctgaacatatacctatatgcaacagtatgcacacttatttactatttagctcagtggaaaaacagcctgctctttgagcttttgagaatggtttcccaatgtattgtgcttctaaatgtaatgcacttgctttaatgcttttgttctcaatcaatctctggaagctattccaaacatggcatttctcaaggaaaatttcttgaatgtgcaaaattattctccaatgtgtaaaagtgacaggccacctttccctcatgccttatacctccacccaaaatacgcaataagcactcaaggcagaatggggggtcttcaggtggtcatttggccgtgctgtaaagatggccctgcttctcccagtacaccatgatattgaagaaggacactgtgtaaataaactcttgtttctagataaagcatggggacacaatttcatttcttcttagttccatctctagttggaaagcataatctgtttttaatatgctggatgcaaaaaataaaattcctgggaaaattttttaaaaaagtattttaattttatatttgtaaagtttctaatagacatttgtttgtaaaaacaggccttagcacataagtgagaaccagagctttttggaaagactcatctttatccggtgagtttaatcaccttgagctcttactcaaatgataaagacctagtaggtctttaaaaatgtaaataatgtatagtttaaagaaggatacaaatcattttttaaaaacggaaaggaaattaccaccattggaggattagggttttaaggtgtgtctcatgggctaaatttaaaagtctttttaaaaattctggtagaaactt

SEQ ID NO: 12958 - DNA, 843 bp, Homo sapiens
  misc_feature (1)...(843): n = a,t,c or g
ggtaagcctgccagacacactgtgacggctgcctgaagctagtgagtcgcggcgccgcgcactggtggttgggtcagtgccgcgcgccgatcggtcgttaccgcgaggcgctggtggccttcaggctggacggcgcgggtcagccctggttcgccggcttctgggtctttgaacagccgcgatgtcgatcttcacccccaccaaccagatccgcctaaccaatgtggccgtggtacggatgaagcgtgccgggaagcgcttcgaaatcgcctgctacaaaaacaaggtcgtcggctggcggagcggcgtggaaaaagacctcgatgaagttctgcagacccactcagtgtttgtaaatgtttctaaaggtcaggttgccaaaaaggaagatctcatcagtgcgtttggaacagatgaccaaactgaaatctgtaagcagattttgactaaaggagaagttcaagtatcagataaagaaagacacacacaactggagcagatgtttagggacattgcaactattgtggcagacaaatgtgtgaatcctgaaacaaagggaccatacaaccgtgatccttattgagagagccatgaaggcatccacttntcnggggaancccacaagggtccaaaacagnaggtttngggnggtnttaaggaggttannggggaaanttnggnttgggnggntnccaaatnggggncccncccccccccccccnnnnaantnngggaaanntttnnnaanctcccacccccttctcaannnaananggggnnntttttttcccaaaanntttttttttttttttttccccnttttccannttgtgccaatnccca

SEQ ID NO: 12959 - DNA, 1206 bp, Homo sapiens
ttttttttttttttgtattttgaaaagtatttacttagtttaaataaattaattgcaaataaaaattaagctacaatatatagcctgaataaaaatgactagaacaaatacaacacaggacttgctttcttgcattagtcacaaagcatgtgacaatctagaaaacttcaaaatcaattacatttctttgaaaaaggggtaacagcagttactgatacatcacaactaataaacttataatacaagtttcctgacatgcatttcctgagtgaacccaaatgatcattttttaaaacaaggaagtttcgacagttgaagtaaaataaaataattcatggcttctaagcaacaagttttgttttttaaaaaccgaaagaaaattcagaacagttttgtaataggataaattaaaggtatgctaccacatataaaactttgctacagtcagttaagtattatacaacttttcaaactcaaaggaaaacaaatcaaaatattaaaagaagatactgtctaatctaaaagtgtactggtttctacaagtgtcaaaaaaagatttgatgtagtgcaactgtctatacttgtggtgcctttgaaaaaagggtgggaaggaggggagagaagaaacttttcttgcttctggaagcaaaagacatattggaattagagaataaacagaccatgcagtgcgtcactccacgctgcagtcattggtgctcatctgccaaccaaacatttccttaagtctcactgtggcaatctccttaggattcaaacccagagttaaggctggtctgctaaaaacgggggcacctattgtcattcaaccctttagatctctagatttccctaatgcccgaataaggcccaaatacagaataattaattaagcatttctttttccaaaagcaaatcaagtcactctcctttcttgctaatttatactttttcttatggcaatgatttttttctagaaacagtgaacagatgaaccacagtttatatccaaaaaataaacttgccaaatgctgctgatactaaaaacagattagttatcatgggagaaaaatagataatctagattaaattgcatatccaaaggagcatataaaatgtttcttagcattaagtttttgttatagtactacgctcgagagaaacattaagaaaaaatctttcctgattatcttcaatgttgttaaaaac

SEQ ID NO: 12960 - DNA, 1252 bp, Homo sapiens
attcggcacaggtgtagccagcaaattacttcatcatctagattatccattcagttgatcctaattagcaaggataacaaggtaacacaaggcttacttatattcacccaacaaaagtgtctctgtggagccacttcccagtgaactacatactgagataggggttcctggatgagaaggaccaaggacagaaccgagaagagtttaggggcaggttatgcgagatggaaatggcgcagataacggagggaaggatttgagggctcaaacgtaggcgtctgtgtttcgcaaaagttggagacgttctaggctgcctctcgttgcctccatctcgctctgcgcggggttttgggaggacattagcattctttcttgtatctccgttgattccagaatcgtccgcactaaagtcccctgcagcgtgaccatgtcgagaccccggaagaggctggctgggacttctggttcagacaagggactatcaggaaaacgcaccaaaactgagaactcaggtgaggcattagctaaagtggaggactccaaccctcagaagacttcagccactaaaaactgtttgaagaatctaagcagccactggctgatgaagtcagagccagagagccgcctagagaaaggtgtagatgtgaagttcagcattgaggatctcaaagcacagcccaaacagacaacatgctgggatggtgttcgtaactaccaggctcggaacttccttagagccatgaagctgggagaagaagccttcttctaccatagcaactgcaaagagccaggcatcgcaggactcatgaagatcgtgaaagaggcttacccagaccacacacagtttgagaaaaacaatccccattatgacccatctagcaaagaggacaaccctaagtggtccatggtggatgtacagtttgttcggatgatgaaacgtttcattcccctggctgagctcaaatcctatcatcaagctcacaaagctactggtggccccttaaaaaatatggttctcttcactcgccagagattatcaatccagcccctgacccaggaagagtttgattttgttttgagcctggaggaaaaggaaccaagttaactgagatactgctgctggaatgggcgagacattgctgcaaagaagtcaagcttttttcagacaaaaggtgtgagggggcttgcttggtatgcttacctgggcttgtgtacctcagtggtttttgtgtacttttttcaataaaatatc

SEQ ID NO: 12961 - DNA, 1355 bp, Homo sapiens
tttgagatctaatttaattctttatcattcaagtagagagacaggcattttccaaagcaaacccaaccctcgtgattatttctagccagggtgaagctaaggaaggtagcagtaggtggtaggatcagcaccttggttccaggcatcacgccagtcattttatttccatcatcatccttgtgaagaaatggaagtctggagaggtgaaatgatgaaggcaatctggccacaaatcttccttctggatcctgctcttcagggcatgcatctcccatgctgaaggttaaaatgggggtcatttgccaacaaatttgggagtccgcttctccctgaaggctgcccatgccctctagccggtcccgggttggaatattctggggcataggcacatcccttcaatggccatcccagatgcaatgttccacctccgttcctcggtcaatggctactttggcccagccgcacggcaatgggggactggggcaggaatctctggggccagtgctcgtgcacgctggtaagcggcgtgccccccctcgttctgggccacagcgtgattcaccagccccagtacgtgggcttcagttccactcagtcgtcggcccgtgaagatgagctccttcgccagggccacccccagacaacggggcagcctctgagtccctcctgcccccgggaggagccctcgcgtggtctcaatcagtcccatgactgccgaggaagctgccactcggaggtcacaggccagggcaagctctaggcctccgcccaaggcaaacccatccatagccgcaatggtgggtgcagggaaggctgcgatgtcattcatcaggccccggagtcgctggacaaacacccccacctctgcttcactcatctgttcccgctccttcaggtctgcacctgcacagaacacgcccttcactccacttctgaagagcaggacacgcacttgccggtcctcccgcagctgggccagagtttccagcagctcactgacgaagacattccccaaggcattgcgggcagaaggtctgttcatcagaatctcagtgatccctgtaaggagtcagggcagccacgggaaagcagctggctctgccctaatcctgggctgcgggctggggactggaggcaggaggcctgggatctggggagcctctgccctagatgaccagagtgacttgccacaagtcacacactcaggcaggcctcaattttcccaaccataaaatggagagaaaaacccttgctctttctgcctcagagagaaagtggaaggacttgtaaactttcaggtgatgcctctgcactccttcactgcttctcttctgcccaattattttaggtgcgta

SEQ ID NO: 12962 - DNA, 1225 bp, Homo sapiens
atgacatctacatgccgtatgctcagtggctagcagagaacgatcgctttgaggaagcccagaaagcgttccacaaggctgggcgacagagagaagcggtccaggtgctggagcagctcacaaacaatgccgtggcggagagcaggtttaatgatgctgcctattattactggatgctgtccatgcagtgcctcgatatagctcgagatcctgcccagaaggacacaatgcttggcaagttctaccacttccagcgtttggcagagctgtaccatggttaccatgccatccatcgccacacggaagatccgttcagtgtccatcgtcctgaaactcttttcaacatctccaggttcctgctgcacagcctgcccaaggacaccccctcgggcatctctaaagtgaaaatactcttcaccttggccaagcagagcaaggccctcggtgcctacaggctggcccggcacgcctatgacaagctgcgtggcctgtacatccctgccagattccaaaagtccattgagctgggtaccctgaccatccgcgccaagcccttccacgacagtgaggagttggtgcccttgtgctaccgctgctccaccaacaacccgctgctcaacaacctgggcaacgtctgcatcaactgccgccagcccttcatcttctccgcctcttcctacgacgtgctacacctggttgagttctacctggaggaagggatcactgatgaagaagccatctccctcatcgacctggaggtgctgagacccaagcgggatgacagacagctagagattgcaaacaacagctcccagattctgcggctagtggagaccaaggactccatcggagatgaggacccgttcacagctaagctgagctttgagcaaggtggctcagagttcgtgccagtggtggtgagccggctggtcgtgcgctccatgagccgccgggatgtcctcatcaagcgatggcccccacccctgaggtggcaatacttccgctcactgctgcctgacgcctccattaccatgtgcccctcctgcttccagatgttccattctgaggactatgagttgctggtgcttcagcatggctgctgcccctactgccgcaggtgcaaggatgaccctggcccatgaccagcatcctggggacggcctgcaccctctgcccgccttggggtctgctgggctgtgaaggagaataaagagttaaactgtca

SEQ ID NO: 12963 - DNA, 1485 bp, Homo sapiens
ggagctgtcagcaagtgcatgggaaaatggaaagggtagcagtgatgcctgcagggtctcagcaagttagtgtcaggttccaggtccattatgtcacaagcactgatgtgcaattcattgcagtaactggagaccatgagtgtcttgggagatggaacacttacatcccactccactataacaaggatgggttctggtctcattccattttcctgcctgcagatacagtggtggagtggaagtttgtgttggtagagaatgggggagttacccgctgggaagaatgcagcaatagattcctagaaactggccatgaggataaagtggttcacgcatggtgggggattcactgattcagtttgcaaagtaatggagaagctgtagaacaatgtggaagaggctgaggttgtggaacacactgaataaaataaaggcagtgtgactccaaattcagccatctgaattgtttaaatttgctagtggattttgtctactgtgcagaaatatatatgtctaatgtgcagaaatatatatgtgtgtatgtgtgtatatatatgcacacacacacagataatgcttccagtgaatgtgaacttcttttccctgtggcactgattgacagacttgtgctgatccattattactttagggcttgattctcttggggagtgacttggcctaagcttcaggtgtaaactgtggtcacggagcaaaaacattaaccagctgcccagggttcaagcttgagcctttaggtgatctttaaactatggtagtaaaataagcctcactcaaacatagctgacttcctattggtacagcttgaaaagcactttttactacatacacattttatgcttaaaaagttaacatgatacgaaactgtgattagaaaatatctggtctggatgtgattagtaaggatacaagataatgttctaagactgcctaatgctttttgtttgattttcatctgccagggcgttgttatgtgctatgagggtagcaagtacgtctttgtcttaatgatctaaggctggtgtagaaacaaagggcctaatgagaaccaatcatcatggaagtcagttgcgggggcagcccataaggaaagggaaagtgagtggggttgggcataggctgagtgaggtggcctgaatgacacctcttagaggactgtgaagtacaggcacagcccgactgcagggagggatgcacccatcatttacccatgggagcatctgtaggaccatctctctcccacttcttctcccctcccccaccgcatctggccagatggactgtcctacagcaatcgtttccatctgtcaccctcttccctctcctttcataccagtcactatcttgggtaacaaatttatacaggacagtggtacagaaatacatctttgctctgagaatacagcaaatattaacttaaattattataactgaacaaataataaaacctgaattttaatatcttca

SEQ ID NO: 12964 - DNA, 2070 bp, Homo sapiens
cggacgcgtgggcggacgcgtgggtttctgaggaaaacaggctacaactgtttattaaaaccacttgcagtgcattcgtttatcagatgctcagtgcaaagtgtaattgggtcatggtcaaaaacgcttgcaacatctaattggcgttcaagatagtcattcaaaagttcttggcccgctgaagtctgttaacagttgaaacattctacagttaaccattagcatgctagttgtcctaatggaaatttttgaagagtttttcaatatataccctacccttgccaggaagagaagtaaaatcctcaggttgtggggtatttgtttctactccagcctggcaggcaaggctaaaacctgagattatcgatctatgagacatcttgatatgtaaagcacttaatattaaaggcataaaagtgaaactgctaaatatgtatagagaggttgacgtgtgatacgtgggacagttcacatagacatcagagaatttattccagaaaggagcctcctgaatgtgatgaatacggcaaagcctttaatcacatctcagcccttagcatcggaaagcttatactgtaaataaacttgatgaatattatatgtgaggaaaactttcatgtatagcactcattgcttcagacagaaaatgaattccgtcggtatgttccaatcgtgatgaatttgagaaacattgcaagagggagcctggccttgttcttgtttttcaaaaatttctttggtattctcacaagtttattcttccaaattaacttcagaatcagcttaccattttaaataagcaccccccttctaaatctattataacatctcactactttctcttctattcatattagcttaacttaagctaccatcctctcttgagtaagactgttttctaacatacagcaacaagagggttctttttaaaacataaatcagattatgtcatgggattcaaggaaagttttctttggatgaagaagccattcttccagatcaaatagtatgttctcctgttcctatgttaagggatctgacacagaacactgtagtcagtattaattttaaagacccacagtttgctgaagattacatttttaaagctgtaatgcttccaggagcaagaaagccagcagcagtactgaaacctagtgactgggaaaaatccagcaatggacggcagtggaagcctcagcttggctttaaccgtgaccggaggcctgtgcacctggatcaggcagccttcaggactttgggccatgtgatgccaagaggctccaggaactggcatttacagcaatgctgcaccaccacctgtgacttaccagggaaacttatacaggccgcttttgagaggacaagcccagattccaaaacttatgtcaaatatgaggccccaggattcctggcgaggtcctcctccccttttccagcagcaaaggtttgacagaggcgttggggctgaacctctgctcccatggaaccggatgctgcaaacccagaatgcagccttccagccaaaccagtaccagatgctagctgggcctgggtggggtatccacccagacgagatgatcgtggagggagacagggatatcccagagaaggaaggaaataccctttgccaccaccctcaggaagatacaattggaattaagcttttgtaaagctttcccaaatcctttcatcattctacagttttatgctatttgtggaaagatttctttctcaagtagtagtttttaataaaactacagtactttgtgtatttcttttaactgtgtatatttctactgatctgatctcactgtttatgttgctttccaaagatgtatgttgcataatacagtggatctgaatttattaatgcttataaaacacatttgatggaataggagtactggtttttcataatggttaaaaatgaaaccagctgtggatttcaaaacacagtgtattctagatcatctaagatccatgctgatttttattgcacaagaattaggtttgaactcttgagctggaacctcagcaaactagagtatatattgttcagtatttctttgg

SEQ ID NO: 12965 - DNA, 459 bp, Homo sapiens
  misc_feature (1)...(459): n = a,t,c or g
aatcgattccatgattacgaatttaatacgactcnnnnnnnnnnnnnnnnnnnnnnnnnnnnnnnnnnggcacgagctgagatcctgagacaatgaatcatagtgaaagattcgttttcattgcagagtggtatgatccaaatgcttcacttcttcgacgttatgagcttttattttacccaggggatggatctgttgaaatgcatgatgtaaagaatcatcgcacctttttaaagcggaccaaatatgataacctgcacttggaagatttatttataggcaacaaagtgaatgtcttttctcgacaactggtattaattgactatggggatcaatatacagctcgccagctgggcagtaggaaagaaaagaaagaagcattggattttcatgtagatcaccagtcaagaccctttttcaatgagctgatccagtttattacaactggtcctattattg

SEQ ID NO: 12966 - DNA, 406 bp, Homo sapiens
tggtggtgtcttcctgtctcaacgatacctattttctagtgctgagatcctgagacaatgaatcatagtgaaagattcgttttcattgcagagtggtatgatccaaatgcttcacttcttcgacgttatgagcttttattttacccaggggatggatctgttgaaatgcatgatgtaaagaatcatcgcacctttttaaagcggaccaaatatgataacctgcacttggaagatttatttataggcaacaaagtgaatggtcttttctcgacaactggtattaattgactatggggatcaatatacagctcgccagctgggcagtaggaaagaaaaaacgcttagccctaatttaaaccagatgcaatattcaaaggctggagaaataattgaaataattaaacaa

SEQ ID NO: 12967 - DNA, 1185 bp, Homo sapiens
  misc_feature (1)...(1185): n = a,t,c or g
cgcggccgcgtcgaccagaagtggagagagggagaagttcatttgttgacatatttatgtatggtgcacctactgtgtgccaagccatgttagagatacagtgggagcaaaaccagatgtgttttctgccctctgactccagtggttgcagaattagcccaggaactagaattggatggagtcacacaaaccaaggaaggggattgtttgaggggggcactcagtcacatgtggctgaggccaaagagaatgaagatatattttaaaattctggatttggcaaaatttaggctagtctttacttttcataaacctctctcatgttagagcagcaaagaaaaaccagtttgccaagaggtcacgagattgggcagtgaggaatggggagtttagtttaaaagacaacactagatacttttggaagtttacctattctgtggttcccttttattgactaaatggtgcccttcattcatgaagcaagtatctatttagtgactactatgtgtcaaaagctatctaggcccagaaacttttaagtggaaaacaagacaaagaccctgccctgacagatttcaatcatgtatatactgtatgtatgtttgtggaaggtgacataatagacaattgcagatagtgataagtgtgtaagacaaggataccacgagcgtaatagacagtggggatggaggaacctttagaaggttggttaagttgaatgataaggagccattcttttgtctttacctgaatgacttatcattcagccctttttgagttttgggttgcttgcagagtttaaccttgcctgtaattgaaacttaattttgtaatagcataacttcatgtaagaaaagcaaagcaatacattacagaattattttactgaagaacttgtttcagagaaagaggctgtttcacatttattagcacatttggattatatttaggtgttttattttttttttaaacaaaggagtttggatcataatacaagagaagcacagggcaaagacactgcataacctcaagaactaagaatggaaggnnnnnnnnnnnnnnnnnnnnnnnnnnnnnnnnnnnnnnnnnnnnnnnnnnnnnnnnnnnnnnnnnnnnnnnnnnnnnnnnnnnnnnnnnnnnnnnnnnnnnnngaacggcgggcggcagagcgagactccatctcaa

SEQ ID NO: 12968 - DNA, 1529 bp, Homo sapiens
gcggctgttggtttctgctggttgtaggtccttggctggtcgggcctccggtgttctgcttctccccgctgagctgctgcctggtgaagaggaagccatggcgctccgagtcaccaggaactcgaaaattaatgctgaaaataaggcgaagatcaacatggcaggcgcaaagcgcgttcctacggcccctgctgcaacctccaagcccggactgaggccaagaacagctcttggggacattggtaacaaagtcagtgaacaactgcaggccaaaatgcctatgaagaaggaagcaaaaccttcagctactggaaaagtcattgataaaaaactaccaaaacctcttgaaaaggtacctatgctggtgccagtgccagtgtctgagccagtgccagagccagaacctgagccagaacctgagcctgttaaagaagaaaaactttcgcctgagcctattttggttgatactgcctctccaagcccaatggaaacatctggatgtgcccctgcagaagaagacctgtgtcaggctttctctgatgtaattcttgcagtaaatgatgtggatgcagaagatggagctgatccaaacctttgtagtgaatatgtgaaagatatttatgcttatctgagacaacttgaggaagagcaagcagtcagaccaaaatacctactgggtcgggaagtcactggaaacatgagagccatcctaattgactggctagtacaggttcaaatgaaattcaggttgttgcaggagaccatgtacatgactgtctccattattgatcggttcatgcagattaattgtgtgcccaagaagatgctgcagctggttggtgtcactgccatgtttattgcaagcaaatatgaagaaatgtaccctccagaaattggtgactttgcttttgtgactgacaacacttatactaagcaccaaatcagacagatggaaatgaagattctaagagctttaaactttggtctgggtcggcctctacctttgcacattcttcggagagcatctaagattggagaggttgatgtcgagcaacatactttggccaaatacctgatggaactaactatgttggactatgacatggtgcactttcctccttctcaaattgcagcaggagctttttgcttagcactgaaaattctggataatggtgaatggacaccaactctacaacattacctgtcatatactgaagaatctcttcttccagttatgcagcacctggctaagaatgtagtcatggtaaatcaaggacttacaaagcacatgactgtcaagaacaagtatgccacatcgaagcatgctaagatcagcactctaccacagctgaattctgcactagttcaagatttagccaaggctgtggcaaaggtgtaacttgtaaacttgagttggagtactatatttacaaataaagaattgcaccatgtgccatctgtacatattactgttgcatttacttttaataaagcttgtggccccttttaaaaaaaaaaaaaaaaaaaaa

SEQ ID NO: 12969 - DNA, 437 bp, Homo sapiens
ctcgaggccaagaattcggcacgagttctaatctccctacaaatcagtatttttaaaaaccagagtcatcccaaaccaactgaccctctagattgccttacttcttgcagatttagtcttaccgtcttccagatactacagctgcctttgggcttttcatcatcccttatccttagccaccaagtcctgctgagcttcttttgtaatacttctctcctgcctcctccactgcacacttgtaccactgagacagtctcttaattctgcccagcacctccagccccatctacacccctctagtttgtcctccagcatgttgttttaggactgttgctagcctaattatttgaaatgaaatttcagttcttaacttggcatccaaacctttcgtccattgcatttctagctttaccttctaatttctagctttaccttct

SEQ ID NO: 12970 - DNA, 1245 bp, Homo sapiens
  misc_feature (1)...(1245): n = a,t,c or g
gagataatcccacctctgttcagctaccgccttgcccagcagcagttaaaggagatgaaaaagaaaggtctgacggaaactaccaaagtgtatcacgtgtctcagagtcccctgacagacactgccattgatgcggcccccagcgctcccttagatttggaaagcccggaagaagctgcagcaaacaagttccggatcaaatccccatttccggagcagcccgcggtcaagtgccggggaaaggcctccctccaggctggatctaaatgtgactcaggccagttgtgccataagccccagccagactctgatccgcaagtcacaggcaaggcacgtgggcagcagaggggggcccgtccgaaaggagccatgccaggaacgcccatttcaggaggacagcgagtttccatgaagccaggcaggcccggccgttccgagagaggagcatgtccactctgactccacggcaggcccctgcctacagctctaggacgcggacctgcgaagcaggcagaggacagatttaggcctcagagtcgaggtgcccacctgtttcctgaaaaactggagcatttccaagaggcaagtggaacccgtggtccattaaaccctctccctaaatcctacactttggggnaggcctttgaggaaaccagaccttggggatcgccaggcaggattagtggcaggaattgagagaacagagccccacagagctcctcggggaccgtcccccagtcacaagagtatctcaaggaagtagtcttctcccacatcccccaaagataactaccagagggtcagttctctgagcccttctcagtgtagaaaagacaagtgtcaaagcttccccactcaccctgagtttgccttctatgacaatacgtcgtttggcctcactgaggctgagcagaggatgctggacctcccaggatattttgggtcaaatgaagaggatgaaaccacaagtacacttagcgtggagaagctggtgatctagactgagaatcagcctgagcttaacacagctggggtctgctactcgcgttttgtagacttttgtgtaactatttgtaccgtaggacagaatgtgaggaggaagtaacacacacagaggaggatgtgtgtgtgtgcatgtgtttgaattcacaaggaagaaattatttatcttgagctttttcctttgttattcagtttttattggtttattactaataatgataataaaatgtaaacaagagcaaa

SEQ ID NO: 12971 - DNA, 1102 bp, Homo sapiens
tgaccggctgggcacgttctgaggggttgtctgaacgctgacagctgctgccatgggaaccagagcctggaggatgcagaactgagcgctgtagctgctgttgcaccattgccagatgcagaggtgttccaggacgagggtttaagagagggtgactagcagcaggtaaagggtaaaagggctgacccaggatggggccagatattccctgtaaatgactcaagtccatcccaggaggaagcacaccagtttggagcaaacttggaagatgctgtggatgtactccctgggcccagccatcctctgtaccaaccctgggtgaagctggtgagcaggcctaaccatagggacatgggggacaaggggaacttggtggaacagggcggagaaaaggtgttgtaggaactggggatgcccaaggtgggtgtttttctcccagttgctttaggtcgataatcttgttctttggtgtaaacggttggcctgggacagtggggtggaacacgaagacctctgtaatgctgacagtttggaatttgtagtgggagaagagtctcgatcggcactgggtacagagctggatgacaggaggttttcttcactggccttctgagtatcctctttactgtcaccaagagctgcttttccagatgctggctcctccttgcttttctctttgctctcgtacatcttacgaatcactgaggtaggggtaaaggaaggagaaagcatgcttgtgatggaggcagcaggggcaggggaagaggaattccctcgatgcacgggtgctggtgacttggtcactcgctgttgccctgtttctgaatccatctctggttctgtcccacctgtggtttgccaaaacccaggctggtagaagtttgctgcctgtacagcaaggtcatgtggcaaggccagcccttctaaagctgcctgttgcaactccagctggctcatctgggctgtgatggggctcatgggtttgcgcatgccttggaatggatctccgagtagctgctgtggtcctggtgtgaaaccaattggtgatggtattcttgggcgaaggtagtcagctgaggctgctcgagtttgaaacacctgt

SEQ ID NO: 12972 - DNA, 738 bp, Homo sapiens
gggagtcatcattcccttcgacagcattttcctctgctttgaaagccccagaaatcagtgttggccatgatgacaactacagaaaaaccagaggcagcttctttgccaagacctttcaaagccattttaggctgttaggggcagtggaggtagaatgactccttgggtattagagtttcaaccatgaagtctctaacaatgtattttcttcacctctgctactcaagtagcatttactgtgtctttggtttgtgctaggcccccgggtgtgaagcacagaccccttccaggggtttacagtctatttgagactcctcagttcttgccacttttttttttaatctccaccagtcatttttcagaccttttaactcctcaattccaacactgatttccccttttgcattctccctccttcccttccttgtagccttttgactttcattggaaattaggatgtaaatctgctcaggagacctggaggagcagaggataattagcatctcaggttaagtgtgagtaatctgagaaacaatgactaattcttgcatattttgtaacttccatgtgagggttttcagcattgatatttgtgcattttctaaacagagatgaggtggtatcttcacgtagaacattggtattcgcttgagaaaaaaagaatagttgaacctatttctctttctttacaagatgggtccaggattcctcttttctctgccataaatgattaattaa

SEQ ID NO: 12973 - DNA, 2508 bp, Homo sapiens
tggttgggatgtggagttgttgctggactctcaggcgaacgtgaagtcattgaagtgtgtgaagctctgtgcttgcatgagggcaagcaaggaatggctgtgcctgaggctgctctgggaaactccttgccccttgacctcttttgagagcattcacgtggtcttcttgctcatccccttataaatgtgctttgcctgcctcagcctcatggtcagagcagtggagactggagccctgtttgcacgttctagttgttcggagaaagcctaggttctgggctcaggtccagatgcagcggggattctgttctctgactgtggcgaccttgctttggttcttgttgaagtgaaccaagcccggccaccacgcatggcatgctgtgcttggctccccataagacgtcctctttgggtgcacggtgtcaaagtgtgggcaggagtggagagctgggtgccctcaggaggagaccacagcatgtccatcagctcagcagagctcgacagccacaagtcctgagaagctttgaccttgaagggcttctgggagaggaggaatttctgcatggggcgtgaaggcacactgtcccaccacaactgaaccagaaggagagtgaagactcccctcttcccatcctctgtgccaggtgccagactgtgctccttgggaacttatggcccaatcttacctgttctccagggactggtcactgcctcagggacccccaagcctatgccctgaggccatggctgctgactgactccagccaaggtgcaaagacgagattatgagacaggtcctcaggcctgtgttccaagtactcacaggggctctgggtgcccatcgccgggagtatggttcagctgccaccggcactgtccatttgcctgtctgtcaagctcagagcatggataagccacacagcagggcagtgcaccctggcaccatgcacggccagcaagaatcaaggcccgcagatgctaagagggcctattgtcaggggaaggtccccgctcctgcacactctctatggatacttgggttgtgggggctctcttggagagtaagtttgtggtttgtttctggtttacagtggtggctgacaccccttgtaagaaagcattcctgggaagtcttctgtgggtccaaacatgttgctccgatcatcacaggagagcaaaaggccctagataccccctttggaatgtgagagtcttgttgtctgatatttgccactgagctggtgaagcccctctaaagagatctcgaccctggggagcagaattcttgtcatctatgaggggtcctgagaaagacttgtcattttttttcctggagttcttcccattgaggtcctaggatttgcacaccactgtcccacaagagctttcctgcctaatgaaaggaggtcttgtggtgtgtgtctcctctcttctctatagttcccgagttggcccccattgcagcccccaccctgtgggtagtcttccagaagtgatgcagtggtgtgagatgccctacaccttgttatttgggagactttgagagtcattcacttccatggtgactagtgtttgttttgcctgattttatattctgtgttgcatttctccccactccctgcacttctggaaacctccctgcactctgggaaacctccctgaacacctccccaactctgcgctctcagcctccctgcatctctcctggggctccctgcacttcttccagccccccaaattctctggacctccaccctggccgcctcctcccaactttcattgtcttggcatctctcaaccctcagtcctctcttccttcccttctttatcatctcccctttcctctccacgtcccgcccccttcctcttcctgcctcctcatctcccttaagcatcctcttctccaacctcccgtcaccgtttactctgcaaaactgacagcacttagacgaggcttgggggcagggagcagtgttggggagagggctccccaaccccagggctcggactgttctctgctgggaccacccaggggtcggacacccaagggtgcctgggcaggtcgcagagttgggcaagccgggcctcgtatggggactcgggtgagggtggcgagtactggttccgaacgcacgcaggggagaagggagggacgcggcgttgacccttccaggtcagctggagttgacaccgcccacctgggcttttcaaccccagtccgcgagtttctttcttgaaggtgtgggggctagattcattcacgtgcttcgtaatgaaataatccaaaaaataggaccaaagcgcccactggcaggagcgagggcggggcgccgcgctctataattattttctaagatgatgggggaggtttgttgcacgcgacagcccgctgaggaggcggggaccgagctacaacgcggttcggatttggcgggggtttttttccttaaaaaagcaaaaaagaaaaaacaaaagtctgggggaagaaaaaaactaaaattcttaaaa

SEQ ID NO: 12974 - DNA, 2450 bp, Homo sapiens
ccctcgggctgtcaaagtggaggagagtaaggcctgacagtgcctggctgccacctcgcctctccctactgaggacggtgccgccatgcggcctcgacacagccgacactcgggagcctcaccagatccaccgtccaaatgcgtggcccagactgagagacctccctcctctccactcccgaaagctccgttgtcaaccagcttgcacccgtggatatatggcattgacccgcttgctttgatacgaaacaaaaaagcagacgactccttcatcccatctgctcctaccgtgactgtggagtgacgcctcctgtgcagtgcagatttgccctccctgcctcctccctgtcctgccgcgcagccagggcgccttctcagcagtgcttccggcccagccgcccatccctaggcacagtgatttggcagcagggtcattttactttgaggctttttgttttaaaatgtagccaaggtttttacaaaggggaaaggaaaagaaaacaaaaacgcaagctccatgtgtatagctgaacttttatatgtttcttgccagcccctccgctcccttccatctctagcctctgtcctgtttagtttgatacgtcactgcagtaccttaagaggtgactcttaagaatgcatcccctcctgattcctcagctggttcacccttgaggttatttgcaaaaagaaaaggaggttcttgagggcaccgattgcgagcattctggtgcctggctccccgcctgggaagcgatggggtgctcagagcagcaggcaggttgggggagggggggggtcatagttgggttccagctcctggcttgatgagcccagggcgcttacaggcagcccatgaagttgatgacagttttagcatgagaatcacacagggtccctgtcctgggctcctctaaagccagtggatgtgctgggcaccagagacaaatcatggagatggctgctggtggctcccaggttggcccagatggggtgagctgacatactacaggcccatcccagggccccgtgggctctggcttctggggctccataccctgccctgcaggggtgctgtgtttttcacacatttctttccctgaagccttctgtaacctgtcattttccttccttcctcttccggagcctgctgctttctctggacctgtctccacctcccacacagctcatcgtgaacaccacttggtgatggagggagtggacccgtgtgtgggtccccaagtgaggccactggggagtttgtccttttcctcctttgcttcactcccagcagcagacccaggttgtcaggacaggagggcctggagctaagcagtaggcatcagtctcgtttgtcttcagacggcgggggcaggtccagggtgaggctgggtggagggctgaccaaggtccaaagggcctgcgcagcctccgggagggcagcttctccagccagaggcttgtgtgagccatcgtgtgctgggcttgtttttaagtaagaaacaaggaaatcactccagattctgtcattccaaggaaagggaaggggacagttcaggtttctcagctgttcttaggggtcactgagcgtctacctcctcctccagaggaggctggctcagaacacctagaggagggggccggggatgcaccccccaccagaggctgccttcagccgtctcacgggtgcaggacagcgctcaggcttgggctctaagctctgtgtctagtgtagaacatggggaaggagcatcttaggaactgctgaagtaacttcttactgctctcacaattctaaggaagcgggagaacggcctcctaccaacagcgcccaccccagagctgcctgggaaagggcagttttactgaaaggtgctttactgttcacctgcatctttcagcagctcccctcctgccctcacctggtcttttccctctttatcccaagcctttatgcttgagtcccttccccaggggctgcccacccgacagttccaggcattccctacctgagcttcttgtctgcttttccttctcccactgcaagcggctgcttgtggggcctgggatgagccctctctgtccccaccggccctccttgccaagccattcctgggtgagttcaggcctgcgggagccacacattcatctccacctggacacttgagccgcatggccagacccctcccacctgatgcggtggtgcgtgtgatttgtcaaaagaaagccttctggatgctgttaagatgtacccttcaggtgaacctggtatcagacccacagtacttgctgtttgagaaaaaataaaaacaaaaaggtcacctgttctccagcccttttctcttacctggtatttccttcctttctcctcccccaccccaaataaaaaaacaaaaaacactagaatttatttatatgtattgatgttgtaggtctaggtgaaaaaaaaa

SEQ ID NO: 12975 - DNA, 1727 bp, Homo sapiens
  misc_feature (1)...(1727): n = a,t,c or g
tttaatattcaaaatcctcagccataaaaataaaggccttttatttggtttttctatgccagtacagaaacatctggacaacactcttgagcctgcagaggctcacggccacacccacttctgccgcagggactgtctgttgaggagccgaaccgttgaggcacagtagccaggccctcccgagggctccagaagctctaggtttacggggtcaccttcttgtaggtgacgtgaagatgctgagtcattggctgtgtcgtggttgccatggagaccgtctgctcaagtttgccttcagaattcagcctgaacttccgggtgatctgctctacgtggggctccttggcgaaggagatcctggcgatggagtgggatgcgatgcacagctcctgcccgttcacctcgccctcctccacttccaccacgcctgtgttctgggcgctgacaaaggccaccttgttggtgtcgggcttgaggcgaatgaagccacactctctgtgcatcggcttgcgcgtgtccgggtggaaggagttgaacgagaagttcagcatgggctggcccacgtgggagatgtgaacctcctcccaggtactggaagggctgcagtgtggggtaggtcccggctccaggtgggtccgacagccaggtgcccagcatccaggacagtggctccaccactgggttcatcttggggggctcgcggctgggcgacagcaggctacttggataggggacgctcactctcctcagctcatccagcttctcctgtagcttccgcacctggctgtcggagcggctgaccctctgccgcaggctcttcagctcgccgttcttcttctccacctgctcccgcaggcagcacacctggctcttgttctgccgggaggagaagcagtaggagtgcagtgagtcgatgagcttgcaggcccctgacgccgacaggatgacctcgttgatgaacatggggctgccgtcgctgtgcctcgctctgcacggcttccgtggctggctttggggtgacgtcggcaggaggggcagaggggctctgggaaggcttctgcggtgtcgcggtaagtgatgagctgggagggctctgggccaggcccttgtcgggtcccaggctgctcccactgcagcttggttccacatctttcttcagcctcttgcggtcaatgggctctcgggggacagatggcctttctcgggtgtgcttagaggagaaactgtacgaatgaagtgagccgataaatttgcacgccccagatcctgggggcgtaaagtcatccatagaaatgccactcttatctgtcacgcccccttcgatggaggaagtggcgctctcatcgccagcatctgtggcagacgcttctgcttttccctgactgcctgccaccatggtggccagtccatctcctggagtccgttccagagcttgctgggcctgctcctggcttgcggcctcctgggccgccctgggtgtggcttcaccttgcagagcagcttgcttcaacctgcgggactctggcttggccatcgggtttccactcgaggacggtgaccaacctgcagctcctctgctggtggcggcactcgagtgtcccctcacaccccctgtgccttgctggcatcttttctccgggntgcgccatgcctccagcccccctcttcttctcggtcaggtggaagatggaatggcaccgncgtgggcttcagcaggcgatgctggt

SEQ ID NO: 12976 - DNA, 891 bp, Homo sapiens
gggagtcgtgcgcaggcgcggacagcgctgcttccgcggcggttggggtggtggggccccgggcggcgttgaccatgacccagcagggcgcggcgctgcagaactacaacaacgagctggtcaagtgcatagaggagctgtgccagaagcgggaggagctgtgccggcagatccaggaggaggaggacgagaagcagcggctgcagaatgaggtgaggcagctgacagagaagctggcccgcgtcaacgagaacctggcacgcaagattgcctctcgcaacgagttcgaccggaccatcgcggagacggaggccgcctacctcaagatcctggagagctcccagagctttgctcagcgttctcaagagggaagctgggaacctgaccaaggctacagccccagaccagaaaagtagcggcggcagggacagctgaccagaccacgggcagggcctgcctccgtgtgcccctcagctcagccccagcaagtgtgtgctcagagcatctttgttcttcacggcagcagctaccttccctcactgtctcaggtgccgagaggggcaggtgccagcctccactggcatcagtgacaagcccagggcacagcccacccgggggtcctcgcttcatgctcacacaggctatggggatggtgggctccaggtcagctctgcaaggggcttgtctctgtggcacccacactcctgccctgccagggaggctctggttgtctgagcaccatgggggccccctcaccttgtccctcctcagccagcagaggcccagggcaagggacaggaggacaggggttctccttcaccacagaacccaaacctcaggtctcacccctgtggcctgtgattatgaataaagattatctttgtaaagaaa

SEQ ID NO: 12977 - DNA, 940 bp, Homo sapiens
  misc_feature (1)...(940): n = a,t,c or g
ccctcaagtgtaaggaactgcgttccgcccctcaggcccccatgggggcagggatcggcttggaaatcaacgtggttgtccccgccaggccggggaaggttggagcagcccccagggaggggggcactaaggtgtcattgtgcccgatgtctggctcccctgcaggagggaggctccagggtaagacagggctggcaggagcagactgcctcagcccatgtgccctgccggccagggcgtgggctcccctcggctgtggtgcctcctctggccccccaggtccacgtcctttaaattggccctttggctcttgcccttggctcccttgggcagacagcaggcttaggccattgatatcgcagttcttcctatcagcttcagtgacccagggtctgaactgcctccatcctagggcaacctggggcagacaggcctggtggggggtggggaaacctccttccacctgagcttgcttgaagggacccagagtctttgggcccagatctttaaacctttgtgtcgtgttgcagcagagtgacgatgggggttggggggttatttattttgcctgtccttatccctgcttggacacctgagcatctgattcctgtccccctggtgccatctgggcctggctggagccaggaacaggagggacacttccccagaatccgcatgtttccccagtgattacactccactgccaccgtggtgcctggctttaactcccacccctgctatgactcctctctgcagagacgcgactggcggctccagcagggactacctttcttataaacccagggggaccacacacacacacanacacacacactcttgatcccttgcttccctcccccagtgcgttctgtgatcgccaagttcaaagctgtgcacatgtggacactcaataaatgttcattggtgcaaaaaaaaaaaa

SEQ ID NO: 12978 - DNA, 934 bp, Homo sapiens
  misc_feature (1)...(934): n = a,t,c or g
gaactcctactgtcctcacctcacccaccactgtgaaaagtattacgtcgtgcattaaagaccagaaaagacttgcttttacccagggaggggacattcccccaatcctgtgtctgggcagcttgcctggtggatgtttctggccctttttccaccatgggaatttctcacctctagctctaagggcagctgaccacctgccagcccctctctggttccagaagattacccttcgcaccggcacaggagagatcttaaatggtctctgggctgctgggacatgcaggctctgagtggggactgcacccactcatgctgttcctgaggctgccctctccagtcccaggagccgtgtctagagttcctgaccagccaccttctgccagaactgcaggcctgcggctgggtcttaggctcccgctgccatttgggtaagccggtggctggtctcgtctgccgggggaagggtggggaggtgcaatgggatgggaagcaggatgcttgcccaganaggtgctttccttcanacggtgcagggcctgggccagccttacaggtcagtagactagactcgactacttggggtcagtgattcttttgtaacgagtctttcatgatgtgactttgaggccccaacatgacagccactgggccaccgggacccaagaagacagccccctgccccatcttcctggcacaggccatcccgagtgcatgtccctgttgcccactgcactgatcatgaagccaccggccactgccacgcatgttgcacctgtgccatcgtgctccctcctgatgggcaccgtggtggaggaagtcacccagctgtttctcagtcccagaggccggtggctggttttgaacttgtgttgactgttgatacttatttactgtataaatataatttatcatttgtaccatgaaaaaaaaa

SEQ ID NO: 12979 - DNA, 1126 bp, Homo sapiens
agaaggctgcctcgctggtccgaattcggtggcgccacgtccgcccgtctccgccttctgcatcgcggcttcggcggcttccacctagacacctaacagtcgcggagcggccgcgtcgtgagggggtcggcacggggagtcgggcggtcttgtgcatcttggctacctgtgggtcgaagatgtcggacatcggagactggttcaggagcatcccggcgatcacgcgctattggttcgccgccaccgtcgccgtgcccttggtcggcaaactcggcctcatcagcccggcctacctcttcctctggcccgaagccttcctttatcgctttcagatttggaggccaatcactgccaccttttatttccctgtgggtccaggaactggatttctttatttggtcaatttatatttcttatatcagtattctacgcgactttgaaacaggaagcttttgatgggaggccagcagactatttattcatgctcctctttaactggatttgcatcgtgattactggcttagcaatggatatgcagttgctgatgattcctctgatcatgtcagtactttatgtctgggcccagctgaacagagacatgattgtatcattttggtttggaacacgatttaaggcctgctatttaccctgggttatccttggattcaactatatcatcggaggctcggtaatcaatgagcttattggaaatctggttggacatctttattttttcctaatgttcagatacccaatggacttgggaggaagaaattttctatccacacctcagtttttgtaccgctggctgcccagtaggagaggaggagtatcaggatttggtgtgccccctgctagcatgaggcgagctgctgatcagaatggcggaggcgggagacacaactggggccagggcttttcgactttggagaccagtgaaggggcggcctcgggcagccgctcctctcaagccacatttcctcccagtgctgggtgcgcttaacaactgcgttctggctaacactgttggacctgacccacactgaatgtagtctttcagtacaagacaaagtttcttaaatcccgaagaaaaatataagtgttccacaagtttcacaaaaaaaaa

SEQ ID NO: 12980 - DNA, 1424 bp, Homo sapiens
agtccaggacaaccattagtcctgatgagtgagctgacgctggtgctggaacctgctggcacctcactggccacatctttgggaaggggatggtggcctttgcatccaagatgccttgaaaattcagcacgtgcagggcctccctattccagccagcatttttcctttcccagcttgagggcaggttgaagattttcattaagcttcatcacaggggagggaattaggagcagggcagcaggtaattaaacaagataaattatacctgatttccaacaccagctacaaagagttgaagatgatacctatgggtcgcgttaacacagggggcaactgccttgatcggcctgccatgggtcatcagactgcttcctaaattgagagaaactgagcaatctctcagccactgctatagtctaacttcttgtttgctgagtaattgtttctaatgtctctgaactcaaagtgaggtgctccaagacgctgtgaacttctgcaaagacacctccttacctactgggatcacgtgacctgacctcactcccagccaggctcccaaagggctcattccagccattccaatctcttcttctttatgcaaacacttttcccccacaacaagccttgtttgttccgataggaatacgtgtacgtcagtgcacttgtccttacgtcagttccttacaccaccaaagcacttcacctttctggaaataaaacttttaagacactactataagtaaaaatgagagtattcactagacttattgctcaggcacatttgagtggggtcccagctgtgtgattaagaagtcaactgggtggccttttctgggttatcttctgatcatggcctttcaacccaacaagggcccttccctgctcttccaccagtaaaggctcctggcctctcatcaggatctgccccccagagaccccccagacactgcagggccctggtgatgctgtcctctgtaccggaaatggcaggcactgtcagatttccactcttctgcctttaggaaggctgggtgcttcttgctctgacagccagtctggggagatgactcttacgttgcttgagtcttggtggcaggctgctgtccacgggggagaagtctctgctctggactggacagaagagagacttttaccctggggcactcacacggccaagcttctgccaccacttcattagctgtattctccatagtatggtgaaatagcaggtgcgtcttctagtttattcctcctggggacatttcctcaaagcagttttgcgcccccgcaagggaatggtcagcctaagggtaatgtacagcccgtgcttggagaaccatggaagctacacccctacaggtgcatactgttctgcttttcccaataaatacgagcggcgatttcaaccacaaaaaaaaaaaaaa

SEQ ID NO: 12981 - DNA, 1130 bp, Homo sapiens
cttgagccccgccttttacttcggcccgcttcttctggtcactccgccaccgtagaatcgcctaccatttggtgcaagcaaaaagcaatcagcaattggacaggaaaagaatggcattgaagcagatttccagcaacaagtgctttgggggattgcagaaagtttttgaacatgacagtgttgaactaaactgcaaaatgaaatttgctgtctacttaccaccaaaggcagaaacaggaaagtgccctgcactgtattggctctcaggtttaacttgcacagagcaaaattttatatcaaaatctggttatcatcagtctgcttcagaacatggtcttgttgtcattgctccagataccagccctcgtggctgcaaatattaaaggtgaagatgagagctgggactttggcactggtgctggattttatgttgatgccactgaagatccttggaaaaccaactacagaatgtactcttatgtcacagaggagcttccccaactcataaatgccaattttccagtggatccccaaaggatgtctatttttggccactccatgggaggtcatggagctctgatctgtgctttgaaaaatcctggaaaatacaaatctgtgtcagcatttgctccaatttgcaaccctgtactctgtccctggggcaaaaaagcctttagtggatatttgggaacagatcaaagtaaatggaaggcttatgatgctacccaccttgtgaaatcctatccaggatctcagctggacatactaattgatcaagggaaagatgaccagtttcttttagatggacagttactccctgataacttcatagctgcctgtacagaaaagaaaatccccgttgtttttcgattgcaagagggttatgatcatagctactacttcattgcaacctttattactgaccacatcagacatcatgctaaatacctgaatgcatgaaaaaactccaaataagagaatctcttcaggattataaaagttgtaaaatgcaactgtattgctgagcaaaaaaaaaaaaaattcaaaacattggattttatagtgctaaaagggctttattctatagttgaatcacctctgaataaagatataaaacctaaaaaaaaaaa

SEQ ID NO: 12982 - DNA, 1916 bp, Homo sapiens
tcaagtaccttgtaaaaaactggctttatttgtcacttattcaccttatctcagttatgccattttggcgtccacagtgacagtcccctggaagctggggtcagcccccacccacccaccgtgaccatcacccacagggcgtgagtgtgggccttgcagggcccaggccgatggttacaggctgcaggcgggactatggggctcctcctgaggcctggtgccttccagccccctgcccaccagcttgggtacagctgcctgcctgccagagcgcaaagcattcctaagcgtgggctgggggaggccctgcccctctgtagcagcagagcagacagggcagtgggagaaccatgtgggtaggagggcatcaggtctcaagagcctctcccctgctcaggactgggtctagacaaggccacgtgtgatagggtggtaagccctgggccatatggaggagcctggggcccatcttggttctgctgctgagttgctgggtggctttaggcaagtcccttcttgtcccttggtcactctgtttcctggctagcactgccagcaaggtctccagagtgtgcccctctgccgggctgtggcggtggccctgtgctttgcaggctgccgtgtgcccactgtcagagtggggtctccccgacaggctgcacgcacccccaggcccccttcttaggatcagggcatcctgcaaaacatccttggtcccaccaatgtctaaagccagctcgaaacctcgagctcctcaggatcttagcacccaactctgctgcccttgctgctgggcagtgcctgtcctaagaggggactccctaaaggccagagagagggtgctcatctccaggacctaggccacctgtcagcacaaacagaacttattccagacataaacatgagtcttcttatttcaaacactggagcaactgatcaacaccaccacagcccatgcaccccgaacctgacttcactaccaaccttgagcctgtgctgtcctctctctgctgacgacactggtgacgcagaaaggaagtcggtggtgtctgctcacttgcgtgcagtcctaagcacagtaagaaaattctgaacacagctgggtgatcttcagcccagaaggtgtaggggcttgtgagcactaagtcagtttctgtccatgtctgatagctaccacaatgtctccccttgctagggcagctgcgaggagacgtgtccagtgatgactggcagaatctggacaaacggacatcactgcaagggtctgtccacctagcttggccaggctcagcttggcagagctgatgacccaagtggactaaacacggagctagcagaaacaggcagactctaagcccaaccagaagagtcagctagaagagccaataggtgcacagacaaatccacagatggccaggagtgtcttctgggaaagccatccctctcttttggaagaagttctgtccttaaaaaaatcacttttaaaataagggaaaacaatggtgtcttagagagaaacagtcctaagccagatattcccacgcctgattgtgaaggagacatgccaggcaaggtcccacgtctccgggaaatacatgatctgctcccagcttcacaccctactgccaaaatgaaacgtagacatttcagtgtttgtgcttccaaccagagtgagaaattccctttgtggggaaacaggtgagacggctgcagccgcatacagcactgagaaggtgcaaaggttaaaacaaaagttacatggacacttggggacaatcctataccattcccacttctctggcagtcggctgaataaaatttcactttcacagttctttttgccagtgccaggataaaaagcaaaattttaaattggaaaatttctagcactttacacagtggaatgaaagaatacg

SEQ ID NO: 12983 - DNA, 743 bp, Homo sapiens
gcataaggttgtagtagcaggagccctctatcttttgttctctggcatggaaggggtcctcagagttactggggcccagactgatcttgcttccttggcctttatccccttggctttcctagacactgccttgtgctggtggatatttattagcctgactcaaacaatgaagctattaaaacttcggaggaacattgtaaaactctctttgtatcggcatttcaccaacacgcttattttggcagtggcagcatccattgtgtttatcatctggacaaccatgaagttcagaatagtgacatgtcagtcggactggcgggagctgtgggtagacgatgccatctggcgcttgctgttctccatgatcctctttgtcatcatggttctctggcgaccatctgcaaacaaccagaggtttgccttttcaccattgtctgaggaagaggaggaggatgaacaaaaggagcctatgctgaaagaaagctttgaaggaatgaaaatgagaagtaccaaacaagaacccaatggaaatagtaaagttaacaaagcacaggaagatgatttgaagtgggtagaagagaatgttccttcttctgtgacagatgtagcacttccagcccttctggattcagatgaggaacgaatgattcacacactttgaaaggtcccaaaatggagtaaggaatgggaagatttgcagtttaaagatggctacccttcaggggaaggagttcagcttttgt

SEQ ID NO: 12984 - DNA, 330 bp, Homo sapiens
  misc_feature (1)...(330): n = a,t,c or g
caagtgttgatgccatgaagagtcccagccttctccccactaaaataccaggcaacgcttagcagctgctgtcctaacaggctactttctgcaactgctgacgcagtggattccaaagcatgagttgggctgcttttgaatagtgggagacgggagtttaccccgatcacagaaaccataccaactgaaagacaaatcagcatcttgctggacgannnnnnnnnnnnnnnnnnnnnnnnnnnnnnnnnnnnnattttataaatattgttgatctttttgaaaaaccaactgttggcttcattttctttattgtgtaatactaccttagag

SEQ ID NO: 12985 - DNA, 733 bp, Homo sapiens
ggtatgaaagtcatgttgttaagcagttatgatttaagaggttttaagtcagagggatcatctggaggccggctttgtgcaagcttttacagccttctgcagtgtccttaccctggctgtacatggggaagggctatgtgtaaacaagtgctttagaggcctctgagagtttttaaaaatcagacccattaacaaaagagagggtttcttaggaacaaagcaactattttgattactgagatctctgttttgtttctgtgagttactctgtattcctttccccatttcactcttgcccttcacatcttaaatgtccataagaaacccttgcatgtgttggtattctgaggcatcccgtgggaaagtcccctaagtcccattttgtacttcaacaaaaaatgactgtagcagaagataagtggagacttttatggatatactactcattttacttaaaatctacccagttcagacttgaatgtaaacttgtattaggggaaaattctccaaagagggttttctacatacacagaaggcagttcaacttctcaagttaattttggataaggcaggaatctactactgggccagagcgacaggagtggctaggggttgccagccagtccctttctgatgatcaagggccctgcacagcaggatgccacaggatgcccctgccatctagctggaagcatcaaaagtccctctgtatgacccggtgtgggaaagaggg

SEQ ID NO: 12986 - DNA, 737 bp, Homo sapiens
ctgggagcggaggcgcaggcaatgctcagccctggatgtagctgagaggctgggagaagagacgaccgctggagaccgagcggcgtggggaagacctaggggggtgggtgggggaagcagacaggagaacactcgaaatcaagcgctttacagattattttattttgtatagagaacacgtagcgactccgaagatcagccccaatgaacatgtcagtgttgactttacaagaatatgaattcgaaaagcagttcaacgagaatgaagccatccaatggatgcaggaaaactgggtgatgtctgcgcgacagggaaggcgggagagatgccacagtccagatcgcctacctgtgctcccctcccctcccccggttttcatctagatttgggttttctcgcttggcctctcccgcaaccggagtgtgaaaggcagtggagggaggaccttgtctcctgttgcctttaaccctctcccgcccgccgcccttggccctggtcctcgctgtctctccatccctcgtgtccttcctttctccttgcagcgctcctacttcaccgtcctcctctgtctgccgctcctcaggcggatgccccctttttagtacccctttccccacgcggttccctttccggtttcatagagagaccgggtgggagggaggaggggacaatgaaaacagtaataaatgaatgaacccgaaaaaaaaaaaaaaaaaaaagatctttaattaaagcg

SEQ ID NO: 12987 - DNA, 770 bp, Homo sapiens
gcaacgttgataaaatttatctgttcagcaaagagattgaacaaaaaagcacgttagtaatatgaagacaggaaaacgaatgaaagtctaacacataactcatattgatttactttatttctgttagattttacactctgaaaatttcacctcatttagtttgtacaaatactagacatggaaacttaaaatgtgcaggtgtcaaagcttaaaaatcaggtgtgtcctctttaaaggcatgtgcgataagcctgcagtcttaaccagacctggtaccagtttaacagttcattatacttctgtgatgagtggatctgttagtctggtagagattaatgttgaaatttacttaaagcccagctattaattgataatgaacatttttcactatttttttttctatctgaagcttagagatctagagctttggatctttcgggtatatgtcaatggaggtattattttataatactttgcattgacatgaagtgggttcatgggggaaaaccatgagctgtgaacattggtagcaaacaagcatatattcatttcaaaactttccttgcttttagcagagagaagcctgtatatgttacatgtgtgactttcagtagtttaaagagatgtttcaaaaaattgttgcatgtttttgatgcaatttgggaaattgtttacttcacaatgtagtcattcataaaaaaattcatgaaaatactgaacatatgtttgaggatttttcttttcctttttaaatttttttattttttctg

SEQ ID NO: 12988 - DNA, 2679 bp, Homo sapiens
catagaagggtccttcccaccctttgccgtccccactcctgtgcctacgacccaggagcgtgtcagccaaatcatggagaatcaagagaaggcgagtatcgcgggccacatgttcgacgtagtcgtgatcggaggtggcatttcaggactatctgctgccaaactcttgactgaatatggcgttagtgttttggttttagaagctcgggacagggttggaggaagaacatatactataaggaatgagcatgttgattacgtagatgttggtggagcttatgtgggaccaacccaaaacagaatcttacgcttgtctaaggagctgggcatagagacttacaaagtgaatgtcagtgagcgtctcgttcaatatgtcaaggggaaaacatatccatttcggggcgcctttccaccagtatggaatcccattgcatatttggattacaataatctgtggaggacaatagataacatggggaaggagattccaactgatgcaccctgggaggctcaacatgctgacaaatgggacaaaatgaccatgaaagagctcattgacaaaatctgctggacaaagactgctaggcggtttgcttatctttttgtgaatatcaatgtgacctctgagcctcacgaagtgtctgccctgtggttcttgtggtatgtgaagcagtgcgggggcaccactcggatattctctgtcaccaatggtggccaggaacggaagtttgtaggtggatctggtcaagtgagcgaacggataatggacctcctcggagaccaagtgaagctgaaccatcctgtcactcacgttgaccagtcaagtgacaacatcatcatagagacgctgaaccatgaacattatgagtgcaaatacgtaattaatgcgatccctccgaccttgactgccaagattcacttcagaccagagcttccagcagagagaaaccagttaattcagcggcttccaatgggagctgtcattaagtgcatgatgtattacaaggaggccttctggaagaagaaggattactgtggctgcatgatcattgaagatgaagatgctccaatttcaataaccttggatgacaccaagcctgatgggtcactgcctgccatcatgggcttcattcttgcccggaaagctgatcgacttgctaagctacataaggaaataaggaagaagaaaatctgtgagctctatgccaaagtggctggggatcccaagaagctttacatccagtgcattatgaagagaagaactggtgtgaggagcagtactctgggggctgctacacggcctacttccctcctgggatcatgactcaatatggaagggtgattcgtcaacccgtggggcaggattttctttgcggggcacagagactgccacaaagtggagcggctacatggaaggggcagttgaggctggagaacgagcagctagggaggtcttaaatggtctcgggaaggtgaccgagaaagatatctgggtaccaggaacctgaatcaaaggacgttccagcggtagaaatcacccacaccttctgggaaaggaacctgccctctgtttctggccctgcctgaagatcattggattttccacatcagtaactgccctgggggtttgtgctgtacaaatacaagctcctgcccacggtcttgaagttctgttcttatgctctctgctcactggttttcaataccaccaagaggaaaaatattgacaagtttaaaggctgtgtcattgggccatgtttaagtgtactggatttaactacctttggcttaattccaatcattgttaaagtaaaaacaattcaaagaatcacctaattaatttcagtagatcaagctccatcttatttgtcagtgtagatcactcatgttaattgatagaataaagccttgtgatcatttctgaaattcacaaagttaaacgtgatgtgctcatcagaaacaaagtactgtgtcctgtttttattcccttcaatgcaaaatacatgatgatttcagaaacaaagcatttgactttctgtctgtggaggtggagtaggtgaaggcccagcctgtaactgtcctttttcttcccttaggcaatggtgaactgtcattacagagcctagaggctcacagcctctgggaggaagcagcctccactttggatcaggaaatagtaaaggaaagcagtgttgggggtagcggcatgcagaccctcagaccagaatggggacatcttgtggtctgctgcctcaggaatctcctgaccacttgtagtccctccgacttctctagacatctagtctcagtgctagcttatttgtatttttcctctttcacttcttatggaggagagtgtttaactgagttagaatgttgaaactgacttgctgtgacttatgtgcagctttccagttgagcagaggaaaatagtggcaggactgtcccccaggaggactccctgcttagctctgtgggagaccaactacggactggcatcttctcttccccctggaaggcagctagacaccaatggatccttgtcaagttgtaacattctatttcaacttcaggaaagcagcagttttcttttaatttttcctatgaccataaaattagacatacctctcaacttacatatgtcttcaacatggttacctctgcataaatattagcaaa

SEQ ID NO: 12989 - DNA, 7015 bp, Homo sapiens
gtgtgggaggtcgttcagtgtcatctcagaatttgttgagcaccagatcatgcatactagagagaacctctatgagtatggtgagtcctttatccacagtgtggctgtcagtgaagttcagaaaagtcaggttggagggaaacgttttgaatgtaaggactgtggagagaccttcaataagagtgccgccttggctgaacatcggaagattcatgctagaggttatcttgtggaatgtaagaatcaggaatgtgaggaagccttcatgcctagccccacctttagtgagcttcagaaaatatatggcaaagacaaattctacgagtgcagggtgtgtaaggaaaccttccttcatagttctgccctgattgagcaccagaaaatccactttggggatgacaaagataatgagcgtgaacatgaacgtgaacgtgaacgtgagcgcggggaaacctttaggcccagcccagcccttaatgagtttcagaaaatgtatggtaaagagaaaatgtacgaatgtaaggtgtgtggggagactttccttcatagctcatccctgaaagaacatcagaaaatccatactagagggaacccatttgaaaacaagggtaaagtgtgtgaggaaacctttattcctggtcagtcccttaaaaggcgtcagaaaacttacaataaggagaagctctgtgactttacagatggccgggatgccttcatgcaaagctcagagctcagtgagcatcagaaaattcattctcgaaagaacctctttgaaggcagagggtatgagaaatctgtcattcatagtgggccattcactgaatctcagaagagtcatactataacaagacctcttgaaagtgatgaggacgaaaaggcgttcaccattagctctaacccctatgaaaaccagaagattcccactaaggaaaatgtctatgaggcaaaatcatatgagaggtctgttattcatagcttagcctctgtggaagctcagaaaagtcacagtgtagcagggcccagtaaaccaaaagtaatggcagagtctaccattcagagcttcgatgctatcaaccatcagagagttcgtgctggagggaacacctctgaaggaagggaatacagtaggtctgttatccatagcttagtggcttccaaacctccaagaagtcacaatggaaatgaattggtggaatctaatgagaagggagaatcctccatttatatctcagaccttaatgataagcgacagaagattcctgccagagagaacccttgtgaagggggcagtaagaatcgcaactatgaagactctgtcatacagagtgtattccgtgccaaacctcagaaaagtgttcctggagagggatctggtgagtttaagaaggatggcgaattctctgttcccagctcaaatgtccgtgaataccagaaggctcgtgctaaaaagaaatacattgagcataggagcaatgagacctctgtaattcactctctgccttttggtgaacaaacatttcgccctcgagggatgctctatgaatgtcaggagtgtggggagtgctttgctcatagctctgacctcactgagcaccagaagattcatgatagggagaagccctctggaagcagaaactatgaatggtctgtcattcgcagcttggcccctactgaccctcaaacaagttacgcccaagagcagtatgctaaagagcaagcgcggaacaaatgtaaggacttcagacaattttttgctaccagcgaagacctcaacacaaaccagaaaatctatgaccaagagaagtctcatggcgaggagtctcaaggcgagaatactgatggggaggagacccacagcgaggagacccatggtcaggagacaattgaagaccctgtcattcaaggctcagacatggaagaccctcagaaggatgaccctgatgacaaaatctatgaatgtgaggactgtggcctgggctttgtggatctcacagacctcacagaccatcagaaagtccacagcaggaagtgcctggttgacagtcgggagtacacacattctgtaattcacacccattccatcagcgagtatcagagagattacactggagagcagctgtatgaatgtccaaagtgtggggaatcttttattcatagctcattccttttcgagcatcagagaatccatgaacaagaccagttgtattccatgaaggggtgtgatgatggttttattgccctcttgcccatgaagccacggaggaatcgtgctgcagagaggaatcctgctcttgctgggtcggccattcgatgccttttgtgtggacaaggcttcattcatagctctgcccttaatgagcatatgagacttcatagggaagatgatttactggagcagagccagatggctgaggaagctatcattccaggcttagccctcactgagtttcagagaagtcagaccgaagagagactctttgaatgtgcagtctgtggagaatctttcgtcaacccagcagaacttgcagatcacgtaactgttcataagaatgagccctatgagtacgggtcctcctatactcacacctcatttcttactgagcccctcaaaggagctataccattctatgaatgcaaggattgtggtaagtcctttattcatagcacagtcctcactaaacataaggagcttcatctggaagaagaagaagaagatgaagcagcagcagctgcagcagcagcagcccaggaagttgaagccaatgtccatgttccacaagtagttctgaggattcagggcttaaacgtagaggctgctgagccagaagtggaggctgccgagccagaagtggaggctgctgagccagaagtggaggctgctgagccaaacggagaggctgaagggccagatggagaggctgcagagcccattggagaggctggacagccaaatggagaggccgagcagccaaatggggatgctgatgagccagatggtgcaggtattgaagacccagaagaaagagctgaagagccagagggcaaaagctgaagagccagagggagatgccgacgagccctgacggtgtgggaattgaagacccagaagaaggtgaagatcaagagattcaggtagaagaaccatactatgactgccatgaatgcacagaaaccttcacttccagcacagcattcagtgaacacctgaaaactcatgccagcatgatcatatttgagcctgcaaatgcctttggggagtgctcaggctacatcgaacgtgccagcaccagcacaggtggtgccaatcaagctgatgagaagtacttcaaatgtgacgtctgtgggcagctcttcaatgaccgcctgtccctcgccagacaccagaatacccacactggctgagggcatggggtaaaggttagaaaaccttcacctaggacttgacccttaccaaaccacagagaatccaaaccaatccatgataatgtcagtaggagacttaaccttagtgtgttacacacctgacttaacatctctaaactcagattgaaaagagaccgaatgtgcagattccacagtcttaagctttccccttcagatgtcagtgtctgcatgtgggaaagccatagcacacatcttacctttccaagtaatcagattgagaaaaccctatgagtattccagactacagagtttgcccaaatcaactgtaaatgacacttgtgtaacgtatatatagtgtttcatgaggtgtatataaaatagcaaattatgacagaacagtgatcacatatatttggatttatatgatatacagttacagtttactctgcagaggtaccttacctgggtattctttgaattttttttttttttggaggaggaagagagcaacaaatttgattatatttttaagtgtcttagatcctgagaaagatttattgtgcattatttgaaccctgtcaatatctttttgagtaattgttttgtttcttacccttaaatagtcttgtgaagctgtaggcatgatagataacatggcttttactccttactgtttgaaaagataagtactttagcttctttctgcagccatttcatctgcgccaacactttggaacctaatactgtgtaaggctttacaatatacggattgggctttttgtgacccagattgaatgggtgccacatggtaaggttggttgaagtggttctcatgcaaaaatattacacatttgtgttctgggttttttttttttttaaccaactcaatatgtgtttgatgatagtgaattgataaaacccgaagcttttccctgtaaatcttacatctttgcctttaaagaatgggttacaacccatcactagatcacagtagtgcctaatgaaggttgagaaccgtaggagaggctctcatgctgtaaataatgttgcaggctaataacctttcatcacttcctttgtgcgcttcctgccttaagtgacaagtagcaacatggcttgggtcccctgtgcagcatcagcttatgctgccacaagtcagtttcgaccctaggtgcccaggagctagtatccttagatctttctatcgctaacttaattctcttcgttatttatctgaccctctaactccatgtctaacttgcattaaaaaaaaaaaaattcctttacagtcaaccccaagcttaacatggacctcaggttccccagcagccttaatttgttttgttaacatctgttccttctttttcagctctcctagagtatttctgagtgttgtgttcatctaatcttagtattcttttaattacaaattgacctcacagcttgaggtttcttgtgtcctattctgtggactacctgtgctcctttgcttcccctcccctcgcataataactatattaagaaattttttttggccttgagttggctggaaaaaaaatataaaatttaaaaaatttaaaaaaaaaggtttgcaaaatgtaagtgtagatcatttgaacaagcaaaattaaagtacccactgggggaaatgtgtctgaatcttactcttctggatctgcaggattagggcttggaagtatgtcaaagatggagggagtgtcaaagtttaggaagattgtagagctgagagcaagaagcagaaatgagtgagtcaaagaagggagtcctaatacatcaccagatctaggaggggagaggagacagacagaagaaaacaccagaggcaagaactgtagaaggccaggtttctgagaatgaattgagcggggtgtcctgagcagtttggaaaaggagtttttgatggtatggtgtaggtgagggctggctgcataggaaggactgaggttggaacggacatcgggaaagctgaggggcagtgaggtttactacatgggaaaaggactcttgaaacgagaatcagtgttgatgtcagggtgaactttgtgggtacattacttggtgttaacattgttggcagtggtagccccttttcagaaagcaacttgctgtaagtcagggtgtccgttccaaccttcagctagtgaaaaggtagtaacaaatggtaaacaagagaatgattgtttaaacctatctgtggacacttaatgcaactgtttaaaaatgataatcacgagttatgtagcaacgtggaaatatatttacagaacattaagtggagaaagcaggacacgaaagtatatttatactacagttataactcaacagttcatttatatgctgttcatttaacagttcatttaaacagttcattataactgtttaaaaatatatatgcttatagtcaaaagctgttgtggtgttgttgttgtaggcttatagttgagcattattttcttaaatttcttgaatgttctttatggtagtgttactaaaaagtttatgatcacattttcattgtgaacataatttgaactcattatcacacacttgggaaatacaggaaagtggaggaaaaaaaatcatatccccaccatccaaagacatatactctcctcttatcttgttcattcttgtttctgtgcacaggtttatgattataactgtgtcaaaatgtatattcaaaatagctgttacattacctttgtggaattatggttaaatactttcactttaattttttcaaatgttccctataataatgtcctgataacagtgtattatgtgtgtctccattggtgtgcataatacatacccagaggaaaaattagaaaataaagtaaattattttaaaaaattacctatattcccaacacctaacaactactgctaacatcttgatctgtttcctctatcttgtttcagtgcacacgcttgtgataacagtgttaaatatgtgtgcataaagtcttaaatgaaaagatgtggaaaataactaaaatagtgttgtcattgtgggaatttggttaaatattttgtctcaaattccttaaataatctttggtgttttggtaataaaattttatgtatgtattttcccattacaaatataatacatactcatacaaaactttggaaattcagtaaagaaattcacacatattcccaacacccaacaacaattaactgttaacatcttgatctgtgcactagtctgtgattattagggtgttagtgataagtatgcataaatgtcaaagatgggaagaaagatgaaaaacaagaaatagttgtgtggttgttgtgggattatggttattttgtttcggtttccttgaaaggtcatcattctagtgttttggtagtccacctttactacatatatttccattatatatgaaatgtgttcattatagaaactttgaagttacagaaatgtagaagagaaactcacccatgttttcaccatccaaagagtgtggttaacatcttgatatattttcttcatcttgtttctgtgcacaggtttttggtttgttaatatggttgtggtcattctatctgtaatagtgtcaacaataaaaataaagttaaaaataaaaaaaaagtcgac

SEQ ID NO: 12990 - DNA, 2465 bp, Homo sapiens
ttttttttttgggctttgcctttttattattctttattggtcctaccaatgtgactctttacccaggcccactgttcctatgcgcactggctttgtaggcattcacatcatatgtctgtgtcctgaaaatctcaattaatttctccttcctattccttttccatgctctgcctcattttctcagaaattgaaggcatttgattattatttttttgtttgggtctgtgtaaaggttccttggcaggagaacatgcatatgactttaaaataaagaccaacattctgacactaaggtaatgcacagaaaaaatacagtactcagacatcattgcaaataaataccccatacagatgaagttatctcaaatgttaacaatatttccttatgaatcaacactgtaacggaaggtaaaaataggagtccctacaactaggaataagaatgcttattccaggaaacagaattcttttatttttgtcatttatattattataatttttccttttttggagaaggaaggacagtttttcttcctccaagagtaccaatttgaccactcccactaacctcactcagcaaacaaaacaggatgtagacctggtttgctaaggagttttaatgagttctgtttcctgaaattaacagtgattagttacaccaagcaagagaagatataatgtctcgctttcacatttgcaaagaatactatggctaaccctcatcccctactgcgcatgccaacacagcgtcggccctcctgataccctcagctcttcacaaacgtggcgttcatacagcttgctcagcttgtcccagaaggtccatttggttcccaaagcacactcaaggttttgtgtttgctttcattttctaagcccctgaatttgcaagtaaagaatcactgactaacagaattttgcacaatgactgttttctttccctcaatgaagatgcccaggtctgggtgtgaggagcacctgcctcacctgctgtccacgctggccttcagcatgcccactagctcttccctgctcggcttttgagaatgatctgtgctgggacacctcccttaactgatgaaggcactactggcaatgattactaacaaaaaggtgttgaaagagaacaccctaaaaatcgacgactgtagaattttctaagtgtaccacaatttggcacaacaaccagagtaacaaaacaattccaatttggaattttattggtacagttgtataaaattctgttaatcagtcatgcttcacaacgtcctaaaacccagaaaattctggaatttgtaggtaatactactcattcaataatttatcttgttttctcaagtgcctattactgttttaaccagagcaaaggtcaagttttcttcttgttacattgaactattcctaagaataataataatacaatatgaaaaaccccagaatctgaataccctggatttcttaatgaacatggcatttaaaatctgtaatttcaaacatgaaccacaatgccgtatgatctaaaggctgctgaaccacagcgtggatacacttagctgagctcctcgctgggtcaaagcactcatctccgagtctaaagctacacgctatggagcacacagctctgcctcgtgctgacaccagacaaacacggtgggagctgaggcggacagctacaggaccacgagcatagaccacggcacctgagaccgtctctacgcgaggaattaaggaagcaaatataatatcaaaatatcaaaagtgcacaggttgatcggataaaaaaagaacatgtgtaacaaggagcccccgtggtgggcgtttccagtgggctcctggcgagcctggcagccagggaagaagggtcttcggcccatacagaggcctttccacgcagcagctcgcagcatgctcaacattaaagctttttttcctcccattaaaaacctggggaatgctattttgaaaagaattgcagtggcatatccaaaaagtttctaagtgggcttttaggttgcccttccttcctccttgtgggccacgagagggaaggggaaggggctgcagtgtgacagggccgggtggccaagtcctcctggcagctactctacaggctcggtgtggctggcttggtcttcggggcggctttggcacggccacgccgggtctgctcatggtccagctcgagcagctccagccgctgggtcagcgccagcttctgctggatggccatgcgcagcagcgagttcagcgtcttcttctcgtcctcagcagccgccagctgccgctgcatctcatccagctgtgtaatgtactcgtcacacctggtggcaaacatagcacgcagcgaggagaaggtggctgcgtcctccttgagggccttgagctcattgcgcagcttcatcatggtctcggtaaccatggccttctcattctcatacttgctcttcaggttggcaagggccacc

SEQ ID NO: 12991 - DNA, 1511 bp, Homo sapiens
ttttttttttttttggtttcaaagttataatgcatggtttaaaagagagaaaaggaaaaaagacacaaagctggttacaggtctgagggagtctaaggagagaaaaatagagggagagtaaaggggggacaaatttagggaaaatcccagtggcccaaaatcccagtatcccacccacagcccagcccttggagcaggagtgaagaattagatcagttttgtacaagagttttttaaaaaaaatcaaatcacaacaaagctgacttggcttctctttgagcctcctggatcaccgtatgtctgtcactctggccagtcctgcctcttcacaaacactgattcggctctcctaggcttcccgcctgtgtcccagtctggggtttccatggagtgtgaacacgaagttaagagtgaggctgcttcagagcccctggcccatgtgtccatccagactcccaagtggagtgtagggctcccagggcagagaggggtgggaggggcagaccctgcccaggcagtcctcacattggacagggcatcagacggcatcccaagggctcgccctccctttcccccccaccccaactcaggtggagggggagcagctgtcaccagagccgatgttggtgaaggtttcggctcagcacggaacgaacatcagcggtgaacctgagggcatccagcattgggagcaggttgagaagggctgtgtcgctggggtcactgaaccaggatttgatggggatggcattgtctggatggctcctgtaagcccctggggagttatccaggatcacaatgctggagaggtcactgtggaccacagagaggtccttgatgtagctgcccaactccaaagtgcagtgctgtctgtaatatctcctcttaagaatgcttctgctattgtccagtttatctgccacagcagagccatagatctccatgcttgctgtaaacaccaccagctcgtaccactggctcaccacttcccaggaagaaatccacatggggcctcttatgtacaaaaaaccggacaggatgtttgtctattaccaccttgaggatgaagtcaggaggcgtaccaggccggactgtgggcctcaggaccccatcatggtgggagtgaataagtgtctcatccagatccagcaccaggatcttcctcttcacctgggctagccgattccgggacacaggagataaggggaggatatcatatcgaacagtttggtactgaattaccggacagggcgagcaccgagtcgtacattttgcagctcatcatccccgtgctctgcgtgacgcagtccatccacagccccttgtacatggcctgggccgtgatgatgttgtcacccgcataggagctcatctgccactgcgggatggcggtgcaggccaccagacccacccacgccagcagggccatggagaagcccagcaactgcaggcccgaattggccatttccgccctcagaaaacactgggggcgccgggcggggagaccctac

SEQ ID NO: 12992 - DNA, 382 bp, Homo sapiens
tcccctatgtgtgtttacctaatgttgagtaggaacagaagcaaaaataccctaaaccctattttttttaacccttcacactcctaacccagtattatatatttcagctacctaagataatgcaattaatcatatatccaacctaagcttctgccaataaggatttcagataagcttttaaatttatggaggattttctttgtgtctttggaagttcacttaccataaagtattttatagtctactttaaataacagattttgttacacagggtaagccaaaggctgtacaagatttagtgtcattgggtctcatatttgtgttagaccatgaaatattccattaaaatttatctgtaaatacaaggcaaaaaaaaaaaaaa

SEQ ID NO: 12993 - DNA, 875 bp, Homo sapiens
tttttttttttttttttttactgcaggatatctcagagtctttaatatgcaaatgttaagaaaaggatacagtatgccacatttcccaaatttatttgtccatagacacttctatttacagaactgtgttaatgtctcttgaaacaatggtcatagaacagtttgggttaaagctatttaaaaatgaacaggctgtcttctaaaggagtagggtcaggttcacatcaagatatctggaaaaactggttggtctggctgccgctcttatatttctgaaatgcttgtcattaaaactgaagtatataaagtttgggcacttagagcaatttctcttacctgttaacagtaacattatctgttaatattaacaggtgcctgttaacatgaacattgttacgtattaacattaacagtatgagacccaacactgttctacatgagaataatgttttaaaaccaatggaaatgaagctctctagaacagtgattctgaacttttttcctagtaacacactgcacagtcgtgccattcccgtgtctgtcctctgattcattcattgtgtatgaggtaatgtttctcaattttttttcatgaccatacacatacacaaacaaaaccctcatgctctaccatccctactcccacaaattttgataggaacctcacataggaccatgctcctctattgacatttccattttagaacctcaaacctagagcattaatgtaactttttttgaataaaaagaaaatttctaggcttcaaggcagaaatggtatttaaaacttatgggaaaagtaaatcaggaaaacaacatcaaaaaggaactactttgatatttttgaggctaaatggaaacattaataaaggaag

SEQ ID NO: 12994 - DNA, 1490 bp, Homo sapiens
tttttttttttaacaacatatcttagaggtagtcctatttcaatttagctagacccatttcattctgtttaatggctacatttgtttttcattgtgagactgtgccataatttatttaatcagtgccatattgaaagacatttggatcgtttcccagcatttgcaactataatcaaggttacattaaatatcctgttacatgcaggaagatactttattcacatgcatgggtatatcagtaggttaaaactcaaatacagaaactgccaggtcaagagatacacatcttaaagtttaatagatattgaccctgtttctaaaaagaaagattccttccagcatgtctacacacatttgtctgctcctctgtcttctgattcgtgtcccatgggtgttattttaggctgaaataatggaatatggtggctcaaaaaacttattcccataggatctctggggaagctttgggtcttgccacatggtccccagttgaacacaggaagtacttggcactgttgttgcaacccaaatcatcactttaatgagccgtgctggcggagcgtggaatgtttccacaagcatgtgtactgaagaattccatgctgcaggcgaaatgatttatatccctgggagttcccagtaaaaaaatgtgcacagtaccctttaatttgatctgctttccctgtagcatctaaatatttagggcaaatagaaaatagttctgatttacaatctctataaaaattttaaacaacctaataagacatttgatcatgaaattgcctgaaataatgttggcactagtcagccatatttcttcaaaatggcctgtaacttcagtgcaaactcccaaacatggatttttttttcctgctaataacagtcttattaataaaagaatgattttctttactgatcctcagcagctgtgttccgggtgtctttgttcaataaaggtagagataataactgtcagtggaaagaaaatgtgctgaggttcccaggagaagtggtggaaacaaatcttttattaaatcatatcaaattgtgtttctcgtttactttttccattttgtaagtcacagtcatatctgctagtttttcggaaaccttggctcacatttgtcaaaaaaacttggcttggcgttcttgaggttaatgctgcgtgatcaatcagggtgataaatttgacataattaactgttgtaatggcatttctgagtctgtttctcttctttactcctgctgaaatcatctgagattagttaacttctgaatatttcttcagatatgctgtggatgcctttctgtacaccaggccagtgatggccgaccgcagcctcatctacagcaccttgagcctgtacatgttctgctgctcaaacagcgtttgcaggcaggccgagaggaacatcagcacggcgaggaggtagccgttccaggctggaggcttgggatcaccaataaactccaggaaaaggctttgcagg

SEQ ID NO: 12995 - DNA, 1515 bp, Homo sapiens
ttttttttttttttttagaatgttaagtaaacagattttattcaatctttcctagagtttataatgaacatttgttatttaatatggtagttatattacagttttaccttacgagcgatagaacatttggtgaataagattaacaaaccggaaatgatgataccctcgaagacactctctggaagcacaccagtcccactgactcatgttacaaatttaagttggcatccagctgatttgtagaatgtgttatcctgatgtttctgcaattataccacctgaagagggtccctgtcagtctctgataggataatatttatcttattctccaagtgagaatccagcatatctcgaaggtcagaaagaaagcctcgttcagtgttgctgtgttcacagaggatgacatttattccttgggaagcagcatccaaagtatcatgatgggacatctcacctgtgaggtaaaggtcagcctcaacaccctgcagaacgctgctcccagaaccagcacacagggccacgactttgacttgagactctaaggttctccccaccccaagggctaagcgaatatgagatagttttaggtgtctttttattcgatcaatcatggttgccagggagacagattcatccagtgtgcataaccgtcccattccagtatgtagaagcaaaggcttctccagtgacagaatttccgtcttctgataaagttgtttgttccgggaaagaaaatctaccacctgcatcaaagccttctgagtacaattcagattaatccgtgtttgttcctcattaccagtcctagcagaaaaagaagtgacagaaacaccgtcaattcctttcactgcagacatgactttgtccaggtcttgggtgtagttaacgttgaattctactcggtggtttccctctgtagggtagttgggagctttggaaggatgtatgggcctggaggtacaagctccaagccctttagccaaccagttgttgacgccctggggcgcagcatcataggctgtatgaggagagtagataccgactctgttctccagagcccggatcaccaggcgctccttccatgtgttccaggttatgcgcttcatgggtcggaagataggcggatggtaggagagaatgaggtctgccttcttttgcagcacctcctccatcacttcctcagtcaggtcattggtcaggaagagtgtatttacagtatgtggtgggcttggttccaccagtaatccaacattgtcccaactctcagcaaacgagagggatgcaaagtcattcaaggaagaaaggagagccttcaaatccatgaaggaacgggaagaattgcagatcagggaatctacaaaccggactgtcgtggggactcatctatgcctcatttcagtgccacttcaggccttttccaggacagtgaaaaaccacgagacacagccagttaagtctgagtcaggacccctgtcccactagtgcgctgtgctctggtgcggcagggcagttttc

SEQ ID NO: 12996 - DNA, 429 bp, Homo sapiens
  misc_feature (1)...(429): n = a,t,c or g
gacattcagaatccatttgaaacttctctcaacataagcaaaaatgtaagtcaaagccagctgcaaaaatttgtagatttggcccgagaaagtgcctggattttacaacaggaagatacagatcgaccttccatatcaagtaatcggccctgggggctggtatccctattgctaccatctgctccaaacagaaagtcctttaccaagaagaaaagcaataagtttgcaattgaaacagtcaaaaacttgctagaatctttaaaaggtaacagaccagaaaatttcacaaaaccagntnagnactcaacatganggngngntacnttgngtaaaaaacngggnttaccntatnaaangggtgngggncttcctttggaaaaagngtttgganattttcccaaanaaantttttttttngggggngttttt

SEQ ID NO: 12997 - DNA, 402 bp, Homo sapiens
  misc_feature (1)...(402): n = a,t,c or g
gggatcctgccctccctgtggcttctcctgcttggggggcctgcctgcctgaagacccaggaacaccccagctgcccaggacccagggaactggaagccagcaaagttgtcctcctgcccagttgtcccggagctccaggaagtcctggggagaagggagccccaggtcctcaagggccacctggaccaccaggcaagatgggccccaagggtgagccaggccccagaaactgccgggagctgttgagccagggcgccaccttgagcggctggtaccatctgtgcctacctgagggcagggccctcccagtcttttgtgacatggacaccgaggggggcggctggctggtgtttcagaggccgccaggatggttctgtggatttcttncgtcttggtcctct

SEQ ID NO: 12998 - DNA, 1010 bp, Homo sapiens
  misc_feature (1)...(1010): n = a,t,c or g
ctactgtggatcctgccctccctgtggcttctcctgcttggggggcctgcctgcctgaagacccaggaacaccccagctgcccaggacccagggaactggaagccagcaaagttgtcctcctgcccagttgtcccggagctccaggaagtcctggggagaagggagccccaggtcctcaagggccacctggaccaccaggcaagatgggccccaagggtgagccaggagatccagtgaacctgctccggtgccaggaaggccccagaaactgccgggagctgttgagccagggcgccaccttgagcggctggtaccatctgtgcctacctgaggggcagggcctctccagtcttttgtgacatggacaccgaggggggcggctggctggtgtttcagaggcgccaggatggttctgtggatttcttccgctcttggtcctcctacagagcaggttttgggaaccaagagtctgaattctggctgggaaatgagaatttgcaccgcttaatcttcaggtaactgggagctgcgggtagagctggaagactttaatggtaaccgtactttcgcccactatgcgaccttccgcctcctcggtgaggtagaccactaccatctggcactgggcaagttctcagagggcactgcaggggattcccctgagcctccacagtgggaggccctttaccacctatgacgctgaccacgattcaagcaacagcaactgtgcagtgattgtccacggtgcctggtggtatgcatcctgttaccgatcaaatctcaatggtcgctatgcagtgtctgagggccgcccanaaatatggcattgacttggctcaggccgtggtgtgggccacccctaccgcagggttcggatgatgcttcgatagggactctgcagccagtgcccttatctctcctgtacagcttccggatcgtcagccaccttnctttgccaaccacctctgcttgcctgtccacatttaaaaataaaatcatttntgccctt

SEQ ID NO: 12999 - DNA, 813 bp, Homo sapiens
acttttttttatagaaaaatataactttaataaggaaattcaactaagggtaggagtactccaggaacaatggtaatccccacatgatgatctgattctcttctgggagcaaaacattgcaaccagacaggatggacaaggcatctaaaaacccagtatccttcaccttccgaaaggagggagggactgcagagttgcccaggaaaaaggtcaagagtcttccttctcctggaacttgcagttggtacaggtgtagaagacagtttgcccttcatcggctgaacgcatctgtctggtgtggtatgccattccttcatgaccacatcgagggcagcgcctgtcaaccacaggtccctggcactcaggcccttcctccaccgacataggcatggctgtccccagttggtggaacacaaccgaagtcttcacaaccttcccctcaaagtcccgaacgttgatgttgaagccacagcgaatacaggtgaccgtatcctgagccccgggcagaggcaggaccgagccgcaatctgaacagaaatccaggtccgactgaaagctggagcaagtattggcgaggtccatgacagacatgcggtcgggtctgaggagggagttggaagtttattaacaaaagagagaagagttcctgtcccagaggtcgtaactattctgtcccaggacctaggagtatataacccgaaccctcctgccacgcacgcctcctgcctctgcgaccaaggagccgaaacgcccggaattcccagacagcgtcgggtactaaaggacttggaaccctttccaggggccggtgag

SEQ ID NO: 13000 - DNA, 438 bp, Homo sapiens
  misc_feature (1)...(438): n = a,t,c or g
ggtgaaataagggcattttagatggacaaacacacagacagaagcagaaatgtgggtggtgtgactggggtatagtgaggggctgctgtggctggaatggagggctgccacaataatggaaatggtaaatgaggcaaataaggttggactggtggcatagcgtcaaggttgccagctttattaaatcactcttccaatatgctagcactggcctgttgggaaaagtaatatatcatgtaatcgaacaaaagacaaacagaggcaagctccaggaatgggcactgtaaacaggacttgccccagagtagccagatgtaggctttagataagttgatgcaggctgagcatctctaatctgagggggaatgtctcatatggtgtccaagaaatggtgacacatctcacagagggtctaggctcaagaaggctanagtatga

SEQ ID NO: 13001 - DNA, 1909 bp, Homo sapiens
  misc_feature (1)...(1909): n = a,t,c or g
gaggtttgtctccgctgtttcatctctatggctgtcagaggtgggcggctttgaccgagaggctgctggagctcgtgtttggacgcgatgtttcgtctgaactcactttctgctttggcagaactggctgtgggttctcgatggtaccatggaggatcacagcccatccagatccggcgaagactaatgatggtggctttcctgggagcatctgcagtaaccagtatgggtatgcgccacagagatcgtccaactactggcaacaccctcaagtctggcttgtgttcagccctcacaacctacttttttggagctgatctgaagggaaagctgacaatcaaaaacttcctcgaatttcagcgtaaactgcagcatgatgttctgaagcttgagtttgaacgccatgaccctgtggatgggagaattactgagaggcagtttggtggcatgctacttgcctacagtggggtgcagtccaagaagctgaccgccatgcagaggcagctcaagaagcacttcaaagaaggaaagggtctgacatttcaggaggtggagaacttctttactttcctaaagaacattaatgatgtggacactgcattgagtttttaccatatggctgggagcatctcttgataaagtgaccatgcagcaggtggccaggacagtggctaaagtggagctctcagaccacgtgtgtgatgtggtgtttgcactctttgactgtgatggcaatggcgaactgagcaataaggaatttgtttccatcatgaagcaacggctgatgagaggcctggaaaagcccaaagacatgggtttcactcgcctcatgcaggccatgtggaaatgtgcacaggaaactgcctgggacttcgctttacccaaacagtaaccccacactgcaagaggggacccctccacccccagtaccctggaccccctccgcagagtctcggcagagccctttgtgctgctgcttctggaagtagtctcccttcctcccgggatgacctcaggactctgtcggtttcccctctttacccttccccgtccccgtgttctgctgggctctgattctgcccaatgagtatccccataggttctcaaaaacatgaacaagtctgtaaagctcagacatttgtcagcctcaacagcaccacccattcaagcatcctgtggataaagaattcagggaaccatccacacacctgccaaccctgggaagcatccagttctcaaatcgtttttgctatggatttatactaacaagaacattccttgacttccctcctgctggtgttttaaagccacaagtagggaagatatctggcaggcagaaagaagtctgtgatgataaacaatgatgaggatgacctaggcaccctacgctagtgtgagaagcctgcgccccaggaaggatctgtgttagtccctgggatggctccaaggcctgcctctaggaaggcagcatgctcagtgggaacacagcaagattcagaatttaaagtagttgcttcatggctctgtgcactcccttttcttcctcgcagcctccctaagatgactccagtgtgaccctgtgcttagtgagcaatagtgattgagctcatgttccctgcaagtgccatttcctctccaggatgggcctctaaagctgaggcctggctcagagcctgtttgccctctgtcttaaacaattgtaaatatcacttaaattataaccatttgcaataaacatccccaaagttccctgtctcctttattttagggtcctctaggcccttttcattttatgtccccactggatttgagatcttgctggaagcagacctgttttctttctaccagagtctggttctttctgatgaagagcagctttaggcacanacaaaaagtgagggcttttgga

SEQ ID NO: 13002 - DNA, 1432 bp, Homo sapiens
ttatgatgtgttccctgatgcctgcaaagagtttcaagatgcaggtgaacaggtagtatcttccccagcagatgttgctgaaaaagctgacagaattattacaatgctgcccaccagtatcaatgcaatagaagcttattccggagcaaatgggattctaaaaaaagtgaagaagggctcattattaatagattccagcactattgatcctgcagtttcaaaagaattggccaaagaagttgagaaaatgggagcagttttcatggatgcccctgtttctggtggtgtaggagctgcacgatctgggaacctcacgtttatggtgggaggagttgaagatgaatttgctgctgcccaagagttgctggggtgcatgggctccaacgtggtgtactgtggagctgttgggactgggcaggcggcaaagatctgcaacaacatgctgttagctattagtatgattggaactgctgaagctatgaatcttggaatcaggttagggcttgacccaaaactactggctaaaatcctaaatatgagctcaggacggtgttggtcaagtgacacttataatcctgtacctggagtgatggatggcgttccctcggctaataactatcagggtggatttggaacaacactcatggctaaggatctgggattggcacaagactctgctaccagcacaaagagcccaatccttcttggcagtctggcccatcagatctacaggatgatgtgtgcaaagggctactcaaagaaagacttctcatccgtgttccagttcctacgagaggaggagaccttctgagtgtgccctttggccacggacactgttgggaaccaaactctgtcttggagcctccttttagctcactccacaagtaaatggatttaatcaaaggtcacctatctgcttttggattgtctagggtcacagtaatccctagggatttttcaccgcttattctttttgtctttttaacaaacatattatccgaattttttttctgcaagccactgatagtctctgctaactagcttaattgacctttttacaaagtttgatccccaagcatcctcaactaaatcattgaatacttcaatcaggatattatctgctttactttacaaataaaaccaaatcttttgtcaacaggatgaaacccatcttaaaggaaagaaaaggaattggtgtgaagagagaagttagagaagggaaatgcagtgaattactatctgtgtccatcaggaagtttgtcctgttaaccaaatggttactgcactaccagggttactggtttattttccagggagctgataaagcaggagaactgttgctgcatgttttctatttggactccgtcacaatatggtaggatatccctcaccaactcccgacactcagcagacttgtttttatatttttttc

SEQ ID NO: 13003 - DNA, 1802 bp, Homo sapiens
  misc_feature (1)...(1802): n = a,t,c or g
tggttctacgcttctgtgagaagaactgtgaaaagagcatggttgaacagctggacaagtttttaaatgacaccaccaagcctgtggnccttctcctaagtgaaagattcattaatgtccctccacagatcgctctgcccatgtaccagcagcttcagaaagaactggcgggggcacacagaaccaataagccatgtgggaagtgctacttttaccttctgattagtaagacatttgtggaagcaggaaaaaacaattccaaaaagaaacctagcaacaaaaagaaagctgcgttaatgtttgcaaatgcagaggaagaatttttctatgagaaggcaattctcaagttcaactactcagtgcaggaggagagcgacacttgtctgggaggcaaatggtcttttgatgacgtaccaatgacgcccttgcgaactgtgatgttaattccaggcgacaagatgaacgaaatcatggataaactgaaagaatatctatctgtctaacccatttccaatggacagtgatgggcttgtttttgtaaaattaccagaaaactcagtggagatttactgaaaaactcagactttattcagattaagttcctctacaaaaagtagggttctgtcccatgtgtctctgacacatttacaaaataccagttttttaaaattttggtcaaattatgagtggttgatttaaaaacttttccaagaagaagaaaagcatggagtcgtaatttaaagaactcaataaaaacttctattttttattttaaaataatatacacagtgttattttcttcacatccacaggacggtcttgaagaaaataacactgtggatgtgaaatccgtcttcgcgtcatgtatctcccatatccagcagttcagccatccagctacctttgggaccctgctgcaccttgtgtttgctggggagtcactggagagtgcatctctgttcagtttcagggcacgtctcacacatttgctgttccttattcattgttgacacaggggataggtgatccactacttgctgtagaatgtccttactttcactaggaggcagattactgaaatagtattgtggtaccagctgcataaatagttcaggagagatttctgaggtaatcctgatgtagttgttctcagaaatgctgaatttatggaagaggacccactctgggcatcttcttggtgattgagtaaccagacaggggatgccagctgagcaacctgcttatgtgtcagcattaagtagttacctgatccatcaacatcccgagcaatctgcataaagtaaccggacagaagagctttctttatgtttagagtgttttccttggagccaaaagcaggttctgcatagggaagctcgattcgcttgataatttctaagagttcagctcgaataacatctgccattctgagtgctgaacagttgaggaagtaatcacgacaccacttttccacacagtactcactgctagaattcagagttgtgtcttggtaagccttgtaaatgctgatgagggtaaagtgatctccttcgggatgtaaaaatgtcttccaacaagtcaaggcagcctcttcagctccatgtggcacatgtgaaaagcaatttggagctgttaccatggctgcgattgttagcacttcatctacacagtcaaattcacaggacgctaagatagacttcgagagttgtggatcaagaggaaactctgacatgatgattccaaattcagaaagatttccatcattatccagtgctgccagataatctaagtcttccaatgcc

SEQ ID NO: 13004 - DNA, 459 bp, Homo sapiens
ggctggaaaaacgtgtctggccaggtgctcattgtagctttgacagggaagggatctgctcccaagcactctcaggttgttggcagaatttgtttccttatggctgtaggattcatggcaagttgcttcttcctaaaccagcattggagacagactagcaagatgggcactacactcttagataatcaaataaatgcaatcatgtgcctcgtgtcaccttttttgcattccattcattaagaacaagttgcagtacctacctacactcaaggaagggaggaattacacagaagtgtgaccacaggatgcagggctcatggaggcctccttaaagtcccccagccaaacctgaaaagtcaatcctggaccttatcatagtggctgtatagtttagaaggtttcttcagattggcattcctttgcctcatatcatcacttcaaaaccctataagggtttgt

SEQ ID NO: 13005 - DNA, 1167 bp, Homo sapiens
gacagtggaccagcacatgaagctggccttctccaaggtcttgcgacagacaaagaagaacccctctaatcccaaggataaaagcacgagtatccggtacttgaaggcccttggaatacaccagactggccagaaagttacagatgacatgtatgcagaacagacggaaaatccagagaatccattgagatgtcccatcaagctctatgatttctacctcttcaaatgcccccagagtgtgaaaggccggaatgacaccttttacctgacacctgagccagtggtggcccccaacagcccaatctggtactcagtccagcctatcagcagagagcagatgggacaaatgctgacgcggatcctggtgataagagaaattcaggaggccatcgcagtggccaatgcaagcactatgcactgagatgccttgggccatggcacaagagaaaccagccaggaaaaaccagacagactttcacactaaagaagaggcctccatttttttttttcttttttttattggtgtagttacgaagcctttcaggctgcttctgtttaaaatataaaagaaaactttgccccctttgcatcttcataaacctggctgcggcagactcctcagccgatggtggctctgggtttccttgagtgtcatatgtcctagaaagttgctggctgactcttttttgtctggggcctggggaaagggcttggactgtgaaaagaaatgtggcccctttccatcttcaagagagatggaattaatgatggatggaccctggagggaatctccccagccgacttccactgggctgacagactttgctgaccacaggggaacgatgttcttttctttcttcatgatcagacataaacttagcatcttaatggaagaaaaatgaggggaacttcaattatgatttattaaagacaatttctattacaccctcctttatgacaagtgacattttagatgtaaaagtaaaaactttaccatgccttttttttttttgttggcctaacattgaggccttaaaacctgaggctcctgtgcctgatggaattcttgtaacatacacttgtgtatcatataaagataccactctgtttctcttatgtattcttactctagttgtttattaagaatgacaagcacgtcttttcaac

SEQ ID NO: 13006 - DNA, 3212 bp, Homo sapiens
tttttccaaaacagtttaattaaaaaaaggtaaagaaatctgaaaaaactgggggggtgggggaaggaacgggcaaacccaaaaaagcatatagtgtgagtctactggctcagtcacaaagaaacaccaccatcaaaaagatatttaagtttaatacaaattttatacaaagaaaatgtgaaaaaatacttccatatgctaaaagcaattatgcttcacaaataaggccagctaggctatttttttttttgacaactgcaattcacaaatgttctttctctcctgttttcttctaatactctcttatttcttctctaatatgggtaactagctggaaactgtacagttcgcatcctcttaacaatgaagagaaagtaaacaagactaaaatgtacaacaaaacgtactggaatgatatcgtacaattaattttctcatatacatacatcaccttttgctttttcatcaatgctttttgttttacacaacatacaaaatggctctacagcatacgtagtgtacggacagcatgacgggccttgctttctctcatactgcctgtgtttcatgcttacataaaaacgtgaaattccatcatataaataatacgtacatgcttcatcccagactcaaacgtcctctgcgtgcaccttgcctttgagtccttgcttccaagaagcacagcatctctgaccaagtgtgtgtgagtgtgtttaaaggaaccacaaagcaaagataaggtttctctttttttcagagttcatgatcctaagactttctgtgttctctcctgtgactgagctgagtggggcttgtttgtttctcttctgtaaacaaggatattgttttttcccttttaggagtagagtcatcatttcaatcacatgaaagaaactagcttctccctgtgtccgtctggtccggagagcttgcgttttaggaacgtggtaacgtagtagctgaaaggagccaacggcttgatgggatagtctgtgccgaaactcccgatcccaacatgctgcgtacagacacacgagcgaaaacggttcgccctcccctgggtatccaaggatgaggacgtgagtatgaaagtggtccccgggcccagtatccattccgtcgtgtgacagacaggctaactgaccatcccttctccaataccaaaacattcttttttgttgttggggttggttgctttttttttttttttttaaattgtttttctttttctttttttttttttaataagttaaagttaatacaaatataaaaaggggaaagtcctctagattcaatgacatccacaaattgtacattatttacaccaaaagcacagggctcgtgtgggtgaacagtctgcagtcaaagccgatgctgggtgtcctgtagtgtagcagcccccgcgccgcgtgcaaggctccaactgagggttttgtcattttcaagtctgaaagtggctgttctcctgcctttgttgtttcttcttttcctggcgtctgggtttttctcccaatggggtgggtggtttgtgtcccgattcactgctagtcccagaaggtgtccagccgagactctttcgggaggaggctcttcgtgctggtactggtgttgtgatcggaacgtgtcgatcccctcttctcatcactgctgctccaactggatttattactccgggaatggtcagagccttggttggagcctaagagaatggaggagggcgtctctctggagccagaaaggtcaagggtcgagccactctccttgcttttctcagctgacgtctccttctctttggaggcgctggccgtttctgaaggtgctgattgtgtgctcgaggagctcccctgggaggacttatttagtgtttctgtgttcacctcagcatccgcttcctgctgaggagcagtagctgactgggtgcaggacttcatgtgctcaggccagtgggcttgctggcaggggtagtcacagtagctggtgttccaacagcagtaaaagatggcctccttcttgcagttggcgcaccactgcttcttcttggtctcatccaccgcctgctgcttctccaactccagctgcttcttcacctcggcgatgagccggtcccgctcctgctccaggctctgccgcatctccgccatggtcagctctaagttgtgtttcatttcggagagctcttgctggtgcagccactggagcttctctatctcgatcctcagcctgcgaatctcagctattgtgcttccagtagtgtttttagaaagatcgttgtatatttctgtcattgttccttttattgcatccatcattttgctagtgtacttggcaatatcagcggcgacatcagctgaggcagtggcgatgggcaggtcagcgttgactgaggacacaagggtgctcatggaccccgagctggtgaccaggggcgatgactgtgtgctggtcaccagggtgatggtggacgtggatgggctctgtgtgatctccttctgctggacagttgatgaagttccacacggacccgctgcacgggccggggcagtcctccttcggtaaaagcggcctctgctttttcactgggcttcctgtggcggcgggggccggggccgtgacggtgaccgtggaggacgtgctggtggtggctgtggcgccagccgcggaagtttgggcggaagagcgggtgagcaccggtgtttccgggggagaatggctgcccaccgtcgtggatggtggagttttacctacaacatcctgtttgggagatggttctttgggttccttcttattttttcgaccctcccgcccagaatggtcttctcctaaatctatgacaagttcgctctctgaatcagagtccaggcccaaatggactgttggggaatccgtctcatcttttcccttcagtttatcctttatggggtgaggtgaaggttttgccttttcggaaaagtccttctcaggctcagggctggccttgtccttgactgctccagggtctgccttctcgctggctggtgacgtgcttttcagctcctctttaatctccactgggtttgtaggcttgggcttttttttaacagcagatggctctttgtccatctgacaaccttctttgtcctctgtgtcttctggctcgttcttagacttctgctcatcatcactgatatactcactatcgctactatctgacttctcagaatcctccgaatcgc

SEQ ID NO: 13007 - DNA, 1351 bp, Homo sapiens
tgtttttattttatattattattatagaaggtggtaccattatcaattatgtgaagggacatgcagacaccccagcttttgagggtgctgggggtaggactgaggcagccccactgggaaccagactgcagcctggcccatggctgttttcccaaggatcagttcctggagggaagggctctggccctgactccgctgtgtcccgagcacacgtgctgaccgcagcccgccgccctgtagttcttggctgggtctggaggtgtctgtggagcaccctgccctcaccacaggagcgtgagccacttctgcagtccacgctgaacatgggaaacaacctgaaaagcaggcaggcctcccggtcagggagcctctgctgtgctggcttcccatgaccacctcctcttgctgaaatattactgcttgaatctggagcagattgcgggtttataaaactgctttttatctgagaacaaacgggtttggaaattagtcgtcttttttccccactcccagagctgctcaagtcattccaccgggccccctcggcttgggacagggtagtgtaaactcccgatcccagggcctagccctgacacaggtggcttcccgtatcccggtgggaaaacgccctgccaccagcgggcttgagctgggcctgtgtccctccactgcctgcaccacccacctccagagtgcagtgctggggcaagggcagctcaagaggacaggaccaggcgcttggcaagacatcagacacacccaacccaaaggcgtgggaccccagggcccggcccgtggtacccagcaggtggcactgcagctccccgctcctgcaggtccagcgtcctcacaggaacaccagggcctgtgctccggagccttccttcagacccttcctccacgtgcccacttgggatgcagaatgcagcaggagctaggaccccctccacggcctggacctcggctgcagtaaagttacgtgaggcctgtctctcggggcctggaagtggcagccatcagttgctcttgctgacccctcggagcaagcgccgcacaggtggtggctgagacagctggcgtggggggcccccaagctgcgccggcctccagcccacccacagctgttgcctgaagtcaggcctccctccccagcactggtatctgagtaacggctaagaacctccttcctctggttttgaaaagcagttcgggttgtccaattctgtaacattcatctccattttttaaaaaggtttctctgcacggccccacggcccgagccgccgggtgaggtccgtgttgcatgagcctgggccccgggcttcccgttgcgcctctgccgcaggtgctt

SEQ ID NO: 13008 - DNA, 4971 bp, Homo sapiens
  misc_feature (1)...(4971): n = a,t,c or g
gaaaaagtgtaaaatccaaacatacaaaacctgtaattcattctaagcaaaacatgaccacagatgctccgaagaaaattgttgcagcaaagtatgaagtaatacatagcaaaactaaagttaatgtcaaaagtgtgaaacgaaatactgatgtaccagaatctcagcaaaattttcataggccagtcaaagtcagaaaaaaacaaattgataaggagccaaagattcagagttgcaattctggggttaaatctgtgaaaaaccaagctcattctgtactgaaaaaaacattacaggatcaaactttagtacaaattttcaagcccttaactcattctttgagtgataagtcacacgctcatcctggttgcttgaaagaacctcatcatcctgcacaaactggacatgtatcacattctagccagaaacagtgtcataagcctcagcaacaggccccagcaatgaaaaccaatagtcacgtgaaggaagagcttgaacacccaggcgttgagcattttaaggaagaggataaactgaaactgaaaaaacctgagaaggaacctacaaccccgccaaagaagaagcagcaaaagtttttctttagatgagccaccattgttcattccagataacatagctaccataagaagagaaggctctgatcatagctcctcatttgaaagcaaatatatgtggactcccagcaagcagtgtgggttttgcaaaaaaccacatggcaacaggtttatggttggctgtgggagatgtgatgactggtttcatggtgattgtgttgggttaagtctttctcaagcacagcagatgggcgaggaagacaaagaatatgtctgtgtaaaatgttgtgctgaagaagacaaaaagactgaaatactagatccagatactttggaaaaccaagctacagttgaattccatagtggagataaaacaatggagtgtgaaaagcttggattatcaaaacacacaacaaatgatagaaccaaatatatagatgatacagtgaagcacaaggtcaaaattttaaaacgggagtctggtgaaggcagaaattcatcagactgtagagataatgaaattaaaaaatggcagctagctcctcttcgtaagatgggacaaccagttttacctcggagatcctcagaagaaaaaagtgaaaaaataccgaaagagtctacaactgttacttgcacaggagaaaaagcttcaaaaccaggtactcatgagaagcaagagatgaaaaagaagaaagttgaaaaaggagtgcttaatgtacatcctgctgcttctgcttccaagccttctgcagatcagatcaggcaaagtgtcagacattctctcaaagacattcttatgaagagacttacagactcaaatttgaaggtaccagaggaaaaggcagcaaaagttgccacaaaaattgagaaagagcttttctctttttttcgggacacagatgctaaatataagaacaaatatagaagtttgatgtttaatttgaaagatcctaaaaacaatatattatttaaaaaagtactgaaaggagaagtaactcctgatcatcttatcagaatgagtccagaagaactagcttctaaagagttagctgcttggagacgaagagaaaacagacataccatagaaatgattgagaaagagcagagagaagtggaacgacggccaatcaccaaaataactcataaaggtgaaatagaaattgagagtgatgccccaatgaaagaacaggaagcagccatggagattcaggaaccagccgccaataagtcattggagaagccagaaggatctgaaaaacaaaaagaggaggttgactctatgtctaaagataccactagtcaacacagacagcatctttttgatctcaactgcaaaatctgcataggtcgaatggcaccacctgtagatgatctttctccaaaaaaagtaaaagttgttgtaggagtagctcgcaaacattcagacaatgaagcagaaagtatagcagatgcattatcttcaacctcaaatattttggcttctgaattctttgaggaggagaaacaggagtctccaaagtcaacgttctctcctgctccacgtccagagatgcctggaactgttgaagttgagtctacctttctggctcgattgaacttcatctggaaaggttttatcaacatgccttctgtggcaaaatttgttaccaaagcctatccagtatctgggctncccagaatacctgacagaggacctaccagatagtattcaagtaggtggcaggatatcacctcagacagtttgggattatgtggaaaaaataaaagcatcaggaaccaaggaaatttgtgtggttcgcttcacaccagtaactgaagaagatcaaatttcttatactttgctctttgcatacttcagtagcagaaagcgctatggagtagctgctaacaacatgaagcaggttaaagatatgtaccttattcctttgggtgccacagataaaattccacaccctcttgtgccttttgatggacctgggcttgaactgcatagacctaatctattgttgggcttaattattcgtcagaaactgaagcgacagcacagtgcctgtgctagtactagtcatatagctgagactcctgaaagtgcaccaccaatagcattgccacctgataaaaaaagtaaaatagaagtttctacagaagaagcaccagaggaagaaaatgacttttttaattcttttacaactgtattacacaagcagagaaataaacctcagcagaatcttcaggaagaccttccaacagcagttgaacctttaatggaagtcaccaaacaggagccaccaaaacctttaagatttcttcctggcgtgttgattggctgggagaatcaacctactactctggaattagcaaataaacctcttcctgtggatgatatacttcaaagccttttgggcaccactggtcaagtatatgaccaggcccagtcagtgatggaacaaaacactgttaaagaaattccatttttaaatgagcagaccaactcaagaaatagagaaaacagataatgtggaagtaactgatggtgaaaacaaggagataaaagttaaagtagataatatttcagaatctacagataagtcagcagaaatagaaacatcagtagtagggtcctcttccatttctgcagggtctttgacgagtcttagtctcagaggtaagccaccagatgtttctacagaagcatttttaacaaatttatcaattcagtcaaaacaagaggaaactgtggagagtaaagagaaaacattaaaaagacagcttcaggaagatcaagagaataatttgcaagataaccagacttcaaatagttctccatgcagatctaatgtaggaaaaggaaacatagatggtaatgtgagctgtagtgaaaaccttgttgctaatacagcgaggtctccacagtttatcaacctgaaaagggatcctaggcaagcagcaggacgaagtcagcctgtaactacttcagaaagcaaagatggagatagttgccggaatggagaaaaacacatgctgcctggcctgtcacacaacaaggagcacttaacagaacaaatcaatgtagaggaaaagttgtgttctgcagagaaaaactcgtgtgttcagcagagtgacaatttaaaagttgcacaaaactcaccatcagtagaaaacatacagacttctcaagcagaacaagcaaaacccttacaggaggatattttaatgcaaaatattgaaactgtgcacccatttcgaagaggatcagcagtagcgacatctcattttgaagttggaaacacatgtccatcagaatttccttctaaaagcatcacctttacttccagaaggcaccagccccagaacaagtacaaacttttcacccatgagggccacagcagcccaaccttcagcatctcaagtctagcccacctggatttccatttccagggcctcctaattttcccccacaaagcatgtttggatttccaccacatttgccacctccattacttccccctccaggctttggctttgctcaaaatcccatggttccctggccacctgttgttcatctcccaggtcagccacagcgtatgatgggtcctctctcacaagcatcaaggtatataggcccgcagaatttttaccaggttaaagacattcggaggccagaaaggcgccatagtgacccttggggtaggcaagaccaacagcaactggataggccatttaataggggtaaaggggaccgccagagattttatagtgattcacaccatttgaaaagagagcgacatgaaaaggaatgggagcaagaatctgaaaggcatagacgcagagacagaagccaagacaaggacagagacagaaaaagcagggaggaagggcacaaagataaagagagggcacggttatcacatggtgatcgaggaacagatggaaaagcaagcagagatagtaggaatgtagacaagaagccagataaacctaaaagtgaagactatgagaaggacaaagaacgagagaaaagtaaacacagagaaggagaaaaggacagggataggtaccacaaagatagggaccacactgacagaactaaaagcaaaaggtaaaatttgcaggctgcttcaggattacatttaaataactgttaaaatgttgtatcttgtaaacaaaagaaagattgcctgctaggattgtgccatctttaaaatttttactattggtcatttgcagaacagtaaattctgtgtgttggtacagagtgctctgtaccagtgctcatcatcccttcttcataccaacggtccctagttataggaatttaatatttttaaaagttttacattgctgtatattcaaagatttgttttattaatatgcaataaaggcttagaaattttaa

SEQ ID NO: 13009 - DNA, 2842 bp, Homo sapiens
  misc_feature (1)...(2842): n = a,t,c or g
acagggcagcaggagccttagagcatggacggtgccatggggcctcgggggctgctgttgtgcatgtacctggtatctctcctcatcctgcaggccatgcctgccctgggctcggctacaggcaggtccaagagcagcgagaagcgacaggctgtggacaccgctgtcgatggcgtgttcatccggagtttgaaagtcaactgcaaagtcacctctcgcttcgcccactatgttgtcaccagccaagtggtcaacactgccaatgaagccagggaagtggccttcgacctggaaatccccaagacagcattcatcagtgactttgccgttacagcagatggaaacgcatttatcggagacataaaggacaaggtgactgcatggaagcagtaccggaaagcagctatctcaggagagaatgccggccttgtcagggcctcggggagaactatggagcaattcaccatccacctcaccgtcaatccccagagcaaggtcacgtttcagctgacttatgaggaagtgctgaagagaaaccatatgcagtatgaaattgtcatcaaagtcaagcccaagcagctggtgcatcattttgagattgatgtggacatcttcgagccccaggggatcagcaagctggatgcccaggcctctttcctgccgaaggaactggcagcccaaactatcaagaagtccttctcaggaaaaaagggtcatgtgctgttccgtcccaccgtgagccagcagcagtcctgccccacatgctctacatccttactgaacgggcacttcaaggtgacctacgatgtcactcgagacgagatctgcgacctcctggtggccaataaccactttgcccacttctttgccccccaaaacctgacaaacatgaacaagaacgtggtttttgtgattgacatcagtggctccatgagaggccagaaagtgaagcagaccaaggaggcactccttaaaattctgggggacatgcagccaggggactactttgacctggttctttttgggactcgagtacaatcgtggaagggctcgctggtgcaagcatctgaggccaacctacaagcagctcaagactttgtgcggggcttttccctggatgaggccacaaacctgaatggaggtttgctccggggaattgagatcttgaaccaagttcaggaaagcctcccagaactcagcaaccatgcctcaatactcatcatgttgacagatggcgatcccacagagggggtgacgggaccgttcccaaatcctcaagaacgtccgcaacgccatccggggcaggttcccgctctacaacctgggtttcggccacaatgtggactttaactttctggaggtcatgtccatggagaacaacggacgggcccagagaatctacgaggaccatgatgccacccagcagctgcagggtttctacagccaggtagccaaacccctgctggtggatgtggatttgcagtacccccaggatgctgtcttggccctgacccagaaccaccataaacagtactacgaaggctcagagattgtggtggccgggcgcattgctgacaacaaacagagcagcttcaaggctgatgtgcaggcccatggggagggacaagaattcagtataacctgcctagtggatgaggaggagatgaagaaactgctccgagagcgtggccacatgctggagaaccacgtcgagcgcctctgggcctacctcaccatccaggagctgctggccaagcggatgaaggtggacagggaggtgagggccaacctgtcatcccaggccctgcggatgtcgctggactatgggtttgtgaccccactgacctccatgagcatcaggggcatggcggaccaggacggcctgaagcccaccatcgacaagccctcagaggattctccgcctttggagatgctgggacccagaaggacgttcgtgctgtcagccttgcagccttctcctactcattccagctccaatacccagcggctgccagaccgagtgaccggcgtggacacagaccctcacttcatcatccacgtgccccagaaagaggacaccctgtgcttcaacatcaatgaggagcctggtgttatcctgagcctggtacagggaccccaacacaggcttctcagtgaatggacagctcattggcaacaaggccaggagccctggggcagcatgacggcacgtacttcgggcggctgggaatcgcaaaccctgccacggactttcagttggaagtgactcctcagaacattacgctgaaaccccggctttggtgggcctgtgttttcctggagggaccaagctgtgctgcggcaggacgggtaacctgccagggcctgggcaagatgcagggggaggtgtggcctgggcccaggactctgctgagtctgcagggccctcgtccctgagccatgtctgtgggtgacacccatgtggcctgtgcagacatgtcagactccatggcccacccagccctccatttcccttggttactggatatgtcctctgggcccagctgcatggcaactgtgctcccaccgcaccttagctctgaatgccacccctgtctctaccaaacaaagccagctcatcctcccaggcccagcaaagaggccacctcttcccctcagccctcctgctctcttcctctgctgaactccagatgacaagggcagctgaatggataagggatgcattgcaaccgcacctgccctctcgggcaactggctctgcaaggtgggtggtgaccatcaacaanaagaggaactggtggtgtctgtggacgacggtggaacttttaaggtgttttgaacc

SEQ ID NO: 13010 - DNA, 1001 bp, Homo sapiens
  misc_feature (1)...(1001): n = a,t,c or g
tttaacaggagaaaaagcaaacaaatttatttgatcataattgtatgtgagccctcagaatgaagaccccaagatacaggggaattgtccatttttatgtttaggttcaacagattatggactgtgtagaaatatgattggacaagaagggtatgatctaatagtaatagactgagaggggaaacccaggcaaggnnnnnnnnnnnnnnnnnnnnnnnnnnnnnnnnnnnnnnnnnnnnnnnnnnnnnnnnnnnnnnnnnnnnnnnnnnnnnnnnnnnnnnnnagtcaaacacggtaggtcagatcatttctttccaaccagtttttacacagaaaggggaatggggagtgagaggactatttttaggttttatggcctggcctttggggtaaaaccggttctggtttctatgacccaccttggggaagagggattctagtttctatggggtagccttgggggggagaatgaaaagccagaaacaagaggggcaggagaaggtcagagagaactttttgcttctggggctgcttctgaggtcttcattttggggtattgttttctgagccccaacaagcccatactttattgagtgtctactgtactcctggaaccgtgctgtatggctgttttctctcatttaatttccagaagaagcctgtgatatactgattattatnctcatttgttcgagatcaggaaaccgaattccagaaaatcgagcagctggatcgtgtaacttttggtagcaaaagtttttgtctactctgtcccatacaaactactggaatagaaatgaacaggattgtgatatttttgtcatgctaatgtaaaaaggaaaaagaaatactgactctgttaattttaagctataactattgcataacaatgatagatacaactattatctaccaatggtggtgctcattctagactctaggctctttgaaaatagtaatttgtctttttcatctttgtgtcttcccttcttttctttccc

SEQ ID NO: 13011 - DNA, 1391 bp, Homo sapiens
ttttttttttttggctgttgcatgttcctttacattttatttgccataaacattaagataatacagaaaatactggagaaaaaaagctttttaataatttcttgatgcaaagcttcacacttaaaaattatgcttgctccccccatccaccccaattcaacatgcagatatcatttattttcttatatgctgattctagagcattgtaatctcgacggttttttaagagttatctttgcccttgcaacaatttcacaaactgtatacaatcatggtataataccatcattcaaatgaatccctaaggtgagtacatttacacaatattaacactaaaaatctgtgtttttttaaaacaccatagaagtcaaaccacaaaaacccaggatcttgttttaaatgtgtttatgaagactgctgctgagctcaaagcatgcaggtaatcatgaccacctagatgaagctggatgttgaaactccttcatggtccaatgatgtaatttttcactcatcccaagtatctccatacttgtttactttgacttctttttttggcactctttcatgcataggcctgactgaggggtcagtcttttgtgttaaagatacttcatatgactctctgttcttattccttaattcctcatatgtaatattttttcttttaggactttcttcaaggttgggatcaggtccttggacaatatgatcagtaataccagtgggagcagattcattcatagaagaactgaatggaattggctcataatgaggaagcatttctatgttgtctgctgctggggatgtcacaaaagatgattgaccactcacacttgagtcatattttgacttttgataatagtgcccaggtggtgaagatcgtcgtgcttgtcctgatcgtaaagcttctccaaggggggaattttcaagtttcttgaatttctcttggcaagttttcacataagaaagttttccagcaaagtatcccatgatacaagcaagtataagtttagggatggaaccatatttgggatgacttgaaagtattcctttactaattaatccttgagtaatcaacatacttgttgcagccaaaggcacagatctgaaccagaagctttcatcattgcattctgcgaagactctcctttcttcctctgttggaatgtaatcaggccctatgtggggaattggtcttggaacctctgcattcggctctcgaaaatcagccctcccattcatctttcctcccgacgacagcagcaggcgactgcaaggaaaaccaagcgatcaggggcagaaggcccggagggtggactcgagagggggcagggagggagaaaagtgcaaggtaccgcggggagggggaggggtagaacagccgcaagaag

SEQ ID NO: 13012 - DNA, 966 bp, Homo sapiens
gctcctggatgccagtgagcggctgagagctgaagctccctggacactcaaggctcttgtggtgacagtctgacgtaaaggcgtgcagggaggcctagctctgtctcctggacttagagatttcagacacagaagtctgtccatggctccttgtcacatccgcaaataccaggagagcgaccgccagtgggttgtgggcttgctctcccgggggatgggccgagcatgccccagccaccttccgggcaattgctgaagctgcctcgaaccctcatactcttacttgggggggcccctcgccctactcctggtctctggatcctgggcttctagcccttcgtgttcaggcatcagcctcttccctgccctgtggttccttgccaaaaaaccctgggacggagtatgtggacatgacattgtgcacagacatgtctgacattaccaaatcctacctgagtgagcgtggctcctgcttctgggtggctgagtctgaagagaaggtggtgggcatggtaggagctctgcctgttgatgatcccaccttgagggagaagcggttgcagctgtttcatctctctgtggacagtgagcaccgtcgtcaggggatagcaaaagcccctggtcaggactgtcctcccagtttgcccgggaccagggctacagtgaagttatcctggacaccggcaccatccagctctctgctatggccctctaccagagcatgggcttcaagaagacgggccagtccttcttctgtgtgtgggccaggctagtggctcttcatacagttcatttcatctaccacctcccttcttctaaggtagggagtctgtgatctctttctgtgtgtattggtcagaatagaatccattcagctgtagcagcaagcaatccccaacctttcactgcaatgacctttcaatgcaataaaagcttattgtccattcaaaaaaaaaaaaaaaaaaa

SEQ ID NO: 13013 - DNA, 1227 bp, Homo sapiens
ggctaaccgcacccggttcagctcgcctttcttggccagaggcgccggttggactcacgggcggggcatgatggtggtgggtacgggcacctcgctggcgctctcctccctcctgtccctgctgctctttgctgggatgcagatgtacagccgtcagctggcctccaccgagtggctcaccatccagggcggcctgcttggttcgggtctcttcgtgttctcgctcactgccttcaataatctggagaatcttgtctttggcaaaggattccaagcaaagatcttccctgagattctcctgtgcctcctgttggctctctttgcatctggcctcatccaccgagtctgtgtcaccacctggtatcttcatcttctccatggttggtctgtactacatcaacaagatctcctccaccctgtaccaggcagcagctccagtcctcacaccagccaaggtcacaggcaagagcaagaagagaaactgaccctgaatgttcaataaagaatcaactttattgaacattcagggtcagtttctcttcttgctcttgcctgtgaccttggctggtgtgaggactggagctgctgcctggtacagggtggaggagatcttgttgatgtagtacagaccaaccatggagaagatgaagcaggtggtgacacagactcggtggatgaggccagatgcaaagagagccaacaggaggcacaggagaatctcagggaagatctttgcttggaatcctttgccaaagacaagattctccagattattgaaggcagtgagcgagaacacgaagagacccgaaccaagcaggccgccctggatggtgagccactcggtggaggccagctgacggctgtacatctgcatcccagcaaagagcagcagggacaggagggaggagagcgccagcgaggtgcccgtacccaccactggaggggatgggagaagggacggagagtcaggctccgccctccctccggcaagctacgggcagatcagccggtccggaagctcggtgggccgaccccctccaagaactcccgggactgcagccacacgccccaactccccacaccgcgcggcaacccctacgtattccccagccccggacaccccgaaccctcccgtccggtggaaatgcccgctcccggtggaacccaggacacgtcagctctgtcgggagaggacgaggaaagcttgtccacccaaaccccgacccc

SEQ ID NO: 13014 - DNA, 1803 bp, Homo sapiens
cccgcctggggccggctgagtggcacttaagcgggccatgccatgcaaccttgggcgctgccaaccgtgggcgagctctgggtgtgcgggcggcctggcgcggcgctccgctgtgtcagcgtgttatgatgccgtcccgtaccaacctggctactggaatccccagtagtaaagtgaaatattcaaggctctccagcacagacgatggctacattgaccttcagtttaagaaaacccctcctaagatcccttataagggccatcgcacttgccactgtgctgtttttgattggcgcctttctcattattatagggctccctcctgctgtcagggctacatcagcaaagggggggcagaccgggccgttccagtgctgatcattgggcattctggtgttcctacccggattttaccacctgcgcatcgctttactatgcatccaaaggctaccgtggttactcctatgatgacattccagactttgatgactagcacccaccccatagctgaggaggagtcacagtggaactgtcccagctttaagatatctagcagaaactatagctgaggactaaggaattctgcagcttgcagatgtttaagaaaataatggccagattttttgggtccttcccaaagatgttaagtgaacctacagttagctaattagggacaagctctatttttcatccctgggccctgacaagtttttccacaggaatatgtatcatggaagaatagaggttattctgtaatggaaaagtgttgcctgccaccaccctctgtagagctgagcatttcttttaaatagtcttcattgccaatttgttcttgtagcaaatggaacaatgtggtatggctaatttcttattattaagtaatttattttaaaaatatctgagtatattatcctgtacacttatccctaccttcatgttccagtggaagaccttagtaaaatcaaagatcagtgagttcatctgtaatattttttttacttgctttcttactgacagcaaccaggaatttttttatcctgcagagcaagttttcaaaatgtaaatacttcctctgtttaacagtccttggaccattctgatccagttcaccagtaggttggacagcatataatttgcatcattttgtcccttgtaaatcaagatgttctgcagattattcctttaacggccggacttttggctgtttcctaatgaaacatgtagtggttattatttagagtttatagccgtattgctagcaccttgtagtatgtcatcattctgctcatgattccaaggatcagcctggatgcctagaggactagatcaccttagtttgattctattttttagcttgcaaaaagtgacttatattccaaagaaattaaaatgttgaaatccaaatcctagaaataaaatgagttaacttcaaacatttcagaaaacattttaatgattttatgatatctttaatcccagtacctaggatctaccttagtttctaggtagcctggcattgtgggtcacactcaactttccctaactctgaggtttatggacttgggcaactggaagcctggacatgccatcagctgagttgcaaggctgtgggaagagcaagttttagatgtctactcaatatccaagtggagctgttgaggaggcagttgcgatgcatgtgtgtgtctagagtttaagagtgggtcttggatggaaatagaaatttgggagtcagcatttggacagtatcttaaaagctagagggctgtttgagatcaccagtagagtgagtatagttggagg

SEQ ID NO: 13015 - DNA, 1931 bp, Homo sapiens
cgggctgtcagagttggtctgttactcggtggtggcggagtctacggaagccgttttcgcttcacttttcctggctgtagagccgctttccccctggcgggtgagagtgcagagacgaaggtgcgagatgagcactatgttcgcggacactctcctcatcgtttttatctctgtgtgcacggctctgctcgcagaggggcataacctgggtcctggtttacaggacagacaagtacaagagactgaaggcagaagtggaaaaacagagtaaaaaattggaaaagaagaaggaaacaataacagagtcagctggtcgacaacagaaaaagaaaatagagagacaagaagagaaacttgaagaataacaacagagatctatcaatggttcgaatgaaatccatgtttgctattggcttttgttttactgccctaatgggaatgttcaattccatatttgatggtagagtggtggccaaagcttccttttacccctctttcttacatccaaggactgtctcatcgaaatctgctggggagatgacaccacagactgttccttcattttcctgtatattctctgtactatgtcgattcgacagaacattcagaagattctcggccttgcccccttcacgagccgccaccaagcaggcaggtggatttcttggcccaccacctccttctgggaagttctcttgaactcaagaactctttattttctatcattctttctagacacacacacatcagactggcaactgttttgtagcaagagccataggtagccttactacttgggcctctttctagttttgaattatttctaagccttttgggtatgattagagtgaaaatggcagccagcaaacttgatagtgcttttggtcctagatgatttttatcaaataagtggattgattagttaagttcaggtaatgtttatgtaatgaaaaacaaatagcatccttcttgtttcatttacataagtattttctgtgggaccgactctcaaggcactgtgtatgccctgcaagttggctgtctatgagcatttagagatttagaagaaaaatttagtttgtttaacccttgtaactgtttgttttgttgttgtttttttttcaagccaaatacatgacataagatcaataaagaggccaaatttttagctgttttatgtacaaggagagatctgtttcattttgttttgccgtatttctagatataagttttagcatgggccaggaaggactaaaataaaagtttttaaggtactgtactttttgccatacttgactcatatactcaaaatacagagttgtcttggtgtaggaattggaaagcaagagtggaaaggaacgtaataactcgttggagtttaaaaatgagggtcttggcaagtaacactgatgtctgaaaaaaaattaaatataaataaataaataaaaatgagggtcctcagctgttctcttcatatcctattacagtctctcagattcttgtgggggcactcttagatctcccttggagacaaggttatagttatatgttgttaatctcgcagagcttccttttagtcacaatagccttcattttctgccatgccccttcataagggagaaggatgtttgtaccatgatcctccccgcataatctatggaattaggagtcctgtgtggagtcttatcaataaatatgcacattcatcaaatgtctacttaaatgtgagtattctaccagtgagaaaaaacacataattttcaaggtaatcattgttaaaccaacagcaaacttctttcttatcagcaccataaagtccagaagacagtagaaaagtatcttcaaagtgctgaggaaaataagtatcaacttagaattttatgtacaatattggaggcaaaataaagacatgtttagacataaaaaaaaaa

SEQ ID NO: 13016 - DNA, 972 bp, Homo sapiens
tcatgcacccaaagcaatgggtccccaagcactgatgaaaactaatatgcatttcccaaagacccacactatgtatcaggagcctgcaccatgccatttgaatgaccctcagcaatgtgcctccctgccctcaaattcccagttgataacagtgtttgattaaatttccactcaagccaaacatggttactaagaagagaaaaacctgatgtttgcataatacttttctcccctcgagattccatctcaaaaaaaaaaggtgggtaaagggccatgagcccaaaccactaggttgttcaccttttcatctgaaaatgctttactctgactatgtgctattgggttttatttccagaaaatatagttctccttttttctgcatgaaggatacatcgtggtgccacatgctttaagcaatttaaacaagagagataagaggaaaatgcaaccaccacatctgacttgcccaatgtagactttcctttattagattgaagtacacaacctaatatgatatattattttgtagtatctcagactttgtaaataaatgccattatttttatatggaaattttatagaagagctatttctgtatacgtaattactcctgattttctgaaattgcttctggtagataacagacaagtcctaagcagtgttccactaagggtggttccaggcctgcctgccgtggagttgactgggggaattttacagttttgcgatcctaggatgcgtcccagacgctcagtcagaagtgctggaggtggggcctgggaagctgtatttgtaatgaactctggtgttttttgtccattaaagtgtatctttgtccatcctataagattaaaggaaagaaaaagcatctcaaatgagtgtaagttgttcttgagaaaaaaatgtatcagacttttatgatttgaatgaaatgtattatagaaaaaaataaacactttaaaataaaaaaaa

SEQ ID NO: 13017 - DNA, 556 bp, Homo sapiens
gctctgtctcaaaaaaaataaaaaactgaccatctagtccttgtcatctgggcaccctcacacatctccttaaccacacttaatctccaaataagtacgataacatagtcatagtcccacccaacatgatgcagttatcttgcatacaactgaagacaactaaccctttccccaacagagcccaccagcagtggtggagatgtcggtccatgagcgcacacacaagactgagggactgtcggccctcccaggtggtgtcaacacaacatcacacacaggtgggggggcctgatagcccagcacccatgatacagggcctaccaatgcttaaaccacacccagggagcccacagaggcactcagtgggtggtggggtgatggatacacatctatcaggcacagggcggaggtgggcaccactgagttgcactcagcaaacacattgggtatcttgtgcccaaggcctgtatttgtggagctgatgttctagtgagagacagtaaatgtgacaaaagtaaaatatatcagatggtgagaaaacagaaaaatgagatca

SEQ ID NO: 13018 - DNA, 644 bp, Homo sapiens
  misc_feature (1)...(644): n = a,t,c or g
gaaaccacattaaaataagtaaaacactgctcagcctaacnnnnnnnnnnnnnnnnnnnnnnnnnnnnnnnnnnnnnnnnnnnnnnnnnnnnnnnnnnnntacttatttctcacagtcctggagactggaagtccaggatcaaggtgccagctgattttggctcctgccagggttgccttcctggcttanagatagtanccctctcgttgtgtcctcacatgggggaggcggggagtgagtggtttcgtgggctctgggtctcnccttcttcttgtaaaggcatcacccctattggacctcatttaaccttaggacctttagtcccacccttaggacctcatttatccttgtaacctcctgacaggcccgtcccatatacagtcacattggaggctaaagcttcaacatatgaatttggcaaggggaataaatgtttaatccccaaatctaaccctgggaaaaanggccaaaaaagcacanatttcaaangaaaggaaaaaaggatctttattaangggccgcaanctaatccctttaatgaggggtaattttaacttggantggccgtcttttaaacttccggacnggaaaaanagggccnnntngnccggannnccccccngggggnnaannctnggggggt

SEQ ID NO: 13019 - DNA, 927 bp, Homo sapiens
tttttttttttttttttacttctctgagggatttattggttcctgtgaaatctgtgaaggccacaaacactccatagccagagaatgacaacatacgattttcttttcagtcttgtagtatccacagtagtgatgtctgtccatgtacaagtgtctgtccagaacacccattaaattccatgcctgctctgtgtgtcacggggaaagggacagagacagaagacagattcactggtggtactttcaaacaacgcggtaggccttccctttggggtctgccatgacaacgataccccaggtggcaatgccttgattctcactgaggccgatgaccatctgcgtaattggtccatggactcggggggtatcccatcttcatgggcttccgtgccacccagtacacgtacccgcccgcccccatcagccccaacccagaaagcacgcgacagctccagcaggtcttcaaaaggcggtgttctgctggggaggtcggcgctccgggtgtagctgggggcgcaggtttggcgggcgcggcggcggtaccgggaggcgcagtgatataggactcaaaaggctgggacaaccgagaccccatgctctggaactcggcctcaaccttgggcgtctttggttcaaactgcgtaaacgacgcaccggaaggcagagcgccggaaagcagaatgccggagacgctacgcagtgcgcggaggaatcttaagggctgctgggaaatgaagttctcctccgcttcagaggcggaaaaggtgaaagaatgctgctctttcctgctggatttctctggcagcaacaaccttgtatgcgctggaggacaattccagccctcctccccgccgccccccccgcccccactgttttagaaattctgtaatcgctactcactaaatgaatcacctttcagtctcctta

SEQ ID NO: 13020 - DNA, 1141 bp, Homo sapiens
tttttttcaagtgtcattctttttattcttagtttggacagatactccattcttctacactggtcccacggtttctgaagcttcctgtaatgatcagtggttaccttgttgcccaagtaactgcaaatccctcctctacaaagtgtgcttgctccaaggcagtgcaaactagaagttgttacaaatggttccagtaacaaatttgtttggcggccttttcccatgaatgagacagtggttatttttgctaaagcagaaaggaaatgtgatactattgggctgtgttttgccctctggagtaatcctgcttggggaaaatggaggcttgttccagaatgcagaaatccctgttaaattaggcagtcttgggctggaggacgtgtgcctgcctccccagtgcctcacaactcacatctctaaaggccactcaggtgggacaccatcaagacattgaaaatcgacagaaggaaggcaggaaggggagaggatcgaacctgtcaaaatagatattcagaaaatctgtgctctaaaataaggcagcccttccctcacagcacacttattcctaatttcaacaggactcctagtcttgccccacagcgtcacagcctacagcaaattagaaactggggtggggggcggatattattccaccagtaatacccttgggacggggcacacaagatgtttgcccctccctacctctctgtcaccttccccaagaaagggtccaagatgaaaacagtgtgccgtttatggtattgcgaagagttaagtgagctgcggtgtattagaaccttagcctcgcgcagcgtcagccgtgtggtaagtgttccataaatcttcgtttagaaaaagtggcaaattcccaggctgctagtaaacaaaggagggaagacagacaaaacggaacagcaacaacagaaaacccaagaactagatgcccaacaatctgggtctgtatcttgaaggaatgtgcatcctgtcctctgactgcaaacccaggccttctgtggccccacgatgctgcctcctagccctcctaaggtgggaatggagctttaccccttggtggcaaacagacctggctccatggatctcaacctggggtgattgtgtccccaccccaggggacatctgc

SEQ ID NO: 13021 - DNA, 665 bp, Homo sapiens
tggagtttcccggaggaaatgacaattacctgacgatcacagggccttcgcaccccttcctgtcaggggccgagacattccatacaccaagcttgggtgatgaggaatttgaaatcccacctatctccttggattctgatccctcattggctgtctcagatgtggttggccactttgatgacctggcagacccttcctcttcacaggatggcagtttttcagcccagtatggggtccagacattggacatgcctgtgggcatgacccatggcttgatggagcagggcgggggggctcctgagtgggggcttgaccatggacttggaccactctataggaactcagtatagtgccaacccacctgttacaattgatgtaccaatgacagacatgacatctggcttgatggggcatagccagttgaccaccattgatcagtcagaactgagttcccagctgggtttgagcctagggggtggcaccatcctgccacctgcccagtcacctgaagatcgtctttcaaccaccccttcacctactagttcacttcacgaggatggtgttgaggatttccggaggcaacttcccagccagaagacagtcgtggtggaagcagggaaaaagcagaaggccccaaagaagagaaaaaagaaagatcctaatga

SEQ ID NO: 13022 - DNA, 5446 bp, Homo sapiens
  misc_feature (1)...(5446): n = a,t,c or g
tagccaggctcactgtggcagccccaccttcaggaggccccgggtttctgtctattgagcggccggattctcgacctcctcgtgttggggacactctgaacctgaacttgcgagccgtgggcagtggggccaccttttctcattactactacatgatcctatcccgagggcagatcgtgttcatgaatcgagagcccaagaggaccctgacctcggtctcggtgtttgtggaccatcacctggcaccctccttctactttgtggccttctactaccatggagaccacccagtggccaactccctgcgagtggatgtccaggctggggcctgcgagggcaaggtgaccggggtcaggagagatggcacttgtgccgaagggggttgaggacagggtgattgccaacagggcatggatttagcttgggggcagtgaggataccgggactgaaggaagctctcccactctgaccgcccccacctgccgcccctgccagctggagctcagcgtggacggtgccaagcagtaccggaacggggagtccgtgaagctccacttagaaaccgactccctagccctggtggcgctgggagccttggacacagctctgtatgctgcaggcagcaagtcccacaagcccctcaacatgggcaaggtttgtccagaccctctccacagctctctcacccctccatggctcatccccctgcttccctgagccttgggcgcagcccctggatcccactgaggctccccacagtctcttccccacttggccctgtggtctccatctcctggctctgtatcctttcctatccccccatgtgctgccctctcacctgtgccgagtgctcagtcctgcccctcagccacacttggctcctagcatttcctgcctttcttgcaggtctttgaagctatgaacagctatgacctcggctgtggtcctgggggtggggacagtgcccttcaggtgttccaggcagcgggcctggccttttctgatggagaccagtggaccttatccagaaagagtgagaacagagaaggaaggggagtgggtggcgggaagataagggaaggaggaaggggcctgaggggaccagctggaagagtccgggcaggaagggctgggcaggggaaggggaggaggggaggaggccgagtgcctgacggctggactgcagcctttctctctaccaggactaagctgtcccaaggagaagacaacccggaaaaagagaaacgtgaacttccaaaaggcgattaatgagaaatgtgagttgcgggtgcctaggcagtagcttgggctctccacctgggatccgggttgggggtctgcctctctgcccctcggctccttgctgaacccacgtgtggtatttggggccagagatccgaattccgggattacgagtggaaggtgggcagctctctccagcagcctctcttatgttgctggtctcaaggggtcggggcgggggctgaggtgtatgtcctttttgtcctctcatgctcacccccacctggccctgcagtgggtcagtatgcttccccgacagccaagcgctgctgccaggatggggtgacacgtctgcccatgatgcgttcctgcgagcagcgggcagcccgcgtgcagcagctggactgccgggagcccttcctgtcctgctgccaatttgctgagagtctgcgcaagaagagcagggacaagggccaggcgggcctccaacgaggtaggggctgggtggggctagggcacaggtggcggcgcttggaaaggcagaacggtcccctcctcactcccgtccaccgtggtcccccagccctggagatcctgcaggaggaggacctgattgatgaggatgacattcccgtgcgcagcttcttcccagagaactggctctggagagtggaaacagtggaccgctttcaaatgtgagagtgtgtgccggcccggccttttctctgtgctgtgtctcggggccagccggggtagacgggccttctctgcctttccctacacagattgacactgtggctccccgactctctgaccacgtgggagatccatggcctgagcctgtccaaaaccaaaggtgatgtcaccctgtctgggcctcaggtgaccctgcttccatttccctgtaccccagctccctgttccctttgctcttagtgtaggaagagggtccagtgatctggggaggtctgtgccagcgtgcagctggcgtgggccagagggcagaggcggactgagacagagctgggtcacccccacccctccctcctgtggccctgaagctttgatggcccctctgatctctgcccctgtgcccacgcttcctttccctcaggcctatgtgtggccaccccagtccagctccgggtgttccgcgagttccacctgcacctccgcctgcccatgtctgtccgccgctttgagcagctggagctgcggcctgtcctctataactacctggataaaaacctgactgtgaggccccataggagcctgagcatacaggagttgggggagccagggcccagtgaggggtggggaggctaaccgggccaggactctggccatcctcgttttcctgccctcaggtgagcgtccacgtgtccccagtggaggggctgtgcctggctgggggcggagggctggcccagcaggtgctggtgcctgcgggctctgcccggcctgttgccttctctgtggtgcccacggcagccgccgctgtgtctctgaaggtggtggctcgagggtccttcgaattccctgtgggagatgcggtgtccaaggttctgcagattgaggtgaatggagcacccctgaatataagtccccgggcccccagctttgtcctccaccctcagcactctctctgctggccaggccaggggcccaacacccaaaccaatgccttggtctgttccccatcttctacaattctgatccaactctgtccctggagttgaaactcaaagttctgggggagtctgtgctagcagggcaggctgtagtcctgtgtgacctcacaaccatgttttccctgagacagaaggaaggggccatccatagagaggagctggtctatgaactcaaccccttgggtgagtgaccctctacctccagccattggtttcctaagtgggtacaggtggtgggggatgtggacagcaggacaggctgccaacttcccccatttccccagaccaccgaggccggaccttggaaatacctggcaactctgatcccaatatgatccctgatggggactttaacagctacgtcagggttacaggtgggagtgccctttagtcccttcccagtggccaccttcggattcatgtgggacctgtggatccctgcttggtcccactccccgtgagcctctgacacagagtcctcagacctccaccctctccctcccatgtagcctcagatccattggacactttaggctctgagggggccttgtcaccaggaggcgtggcctccctcttgaggcttcctcgaggctgtggggagcaaaccatgatctacttggctccgacactggctgcttcccgctacctggacaagacagagcagtggagcacactgcctcccgagaccaaggaccacgccgtggatctgatccagaaaggttctgggtgcaagggcaagcaggaggggggccaggaaaggacagttctggaagatggacagcccaggaggcttacagagggaaagaaagggggcccctgatgaggatggggagcatggccttgggctcaaacagcagaagggtgagtgtcacctgagcggccacctctcctctccaaggctacatgcggatccagcagtttcggaaggcggatggttcctatgcggcttggttgtcacgggacagcagcacctggtgagcttgggagagtggttccagggttctgagggggtcagggctggggcaggggtgggacagagctggtatgatgggagggtggataaccaggcacctgggggcgtgggcataatgagaagcaagtccttatccccaaccctcctttcctgccctccaggctcacagcctttgtgttgaaggtcctgagtttggcccaggagcaggtaggaggctcgcctgagaaactgcaggagacatctaactggcttctgtcccagcagcaggctgacggctcgttccaggacctctctccagtgatacataggagcatgcaggtgcgggcatgctggggctggcccgagaagcgcctgtcggaggactctctttgccccttccccctcctgtttgacatcttttctccccttactaggggggtttggtgggcaatgatgagactgtggcactcacagcctttgtgaccatcgcccttcatcatgggctggccgtcttccaggatgagggtgcagagccattgaagcagagagtggtaagttcagtggcgtttctgccctctgctggctcacagctctctccctttttcctcaggaacccaggggtccaggcccaagaccctcctcccgttttcttccaggaagcctccatctcaaaggcaagctcatttttgggggagaaagcaagtgctgggctcctgggtgcccacgcagctgccatcacggcctatgccctgacactgaccaaggcccctgcggacctgcggggtgttgcccacaacaacctcatggcaatggcccaggagactggaggtgaggggtgaggggctctggcagtgagcctgaggcccaggggaccttaggatccctgagtgtgcccagagggagaggctggatgaagactcagaggaggaatgaagttataagcaggggtgggttgggggagactcaggagagcccagcagggggtggctaagggccaggggaccaggctcttctccctgccttcctgtttactcgtggtctcccttcactttcagataacctgtactggggctcagtcactggttctcagagcaatgccgtgtcgcccaccccggcttccttcgcaacccatccgaccccatggcccccaggggccccagccctgttggatttgaaaccacagccttacgccctgcttgcacctccttgttttcacggaggggcaaagcagagatgggccagaccagggttgcggcctggcttcacccgtcaggcaagcttccaagggggattccgcagtacccaagacacggtgattgccctggatgccctgtctgcctactggattgcctcccacaccactgaggagaggggtctcaatgtgactctcagctccacaggccggaatgggttcaagtcccacgcgctgcagcttgaacaaccgccagatttcgcggcctgggaggaggagttgcagtttttccttgggcagcaagatcaatnttgaaggttgggaggaaacagcaaaggaaccttgaaggtnttttnttacttacatttt

SEQ ID NO: 13023 - DNA, 388 bp, Homo sapiens
gtgcttcctcattgcaaaaccagcattcctctcacggtcagctatgcacaaaatatccttctgttctcctggtcacatcaaagcaccttcacgctatgcagacaggtcattgagggaacggagaaaattaacaaacgcacctaggttatttctattaaaattagcccctcagccggtaggctctgtcagtttccattgaacacaaactctgacaagtctgttgaaaacttttaacctttccaggttgtgtcaacagcttgcaaacacaacaggaggatgggtgcctctgagttctgccttttccttttgggaataggagggaggtatcagggatttgttaccaccaagctttcatgtttatcttcactgctctgctcactccccgctg

SEQ ID NO: 13024 - DNA, 1750 bp, Homo sapiens
  misc_feature (1)...(1750): n = a,t,c or g
ttttttttttttttggaagatcaaaaacaggcttgttttatttatacacagaacaacttatgtacagcactcaggtatggactatgtacataacaatacaagaggcgtttgtttccacggtggtcactatataaacaaaaaaaaaatggcggccgcattntttttttttttctttttaaagttttattaaagtttaatggtacaatattttatctctttttttgttaatgccagtacaaaaatacagttgatgacttgacaaaatggctacacctagggcttgaaggtttgagtttctccaacagtaacaagggaaagcatgcttccacctggagccgagtccaagcacacagccagtcctgcacacgcatgcgtgcaaacagggaagctcaagcatgagaagaggaaagaggctgtagaaatttgggaagaagcccacaattattcccaggagaaaaaagggaaaaaacaggctgatatccttggtagggggtagaataactgatttacacttaggatttattgttattgttgttgttgttgttttttaatgataagctacttctgcaattttaacgttgtagaaaagatgctactagtctcctttcaccactaaggtgagtaaagtgggaggaaatgggaaaagactcaaatacttaagtgcgaggagtaaacatccaagtggctcaagttttgtgtcagaaggtttcattctttacattcaatgacaagttgacatttaggtgagagggaaaaggagaagaaagtctgccactctccgctggatccacaaacatgcagaccagcttctgttagcagaactcttccacagtgagagcgctccttccagtgtaggtaggaatgaggtttcctggtcggcttaattgttctagatgattcctcaatattcccttccctgctgctttccttccagaacactaactctgatgaaagaaggggcacattcatgttacaattcatcttcaagatgtttctttctgaaggcatcacccgtcagcctttcctgagcttccttcatcccctgaacaacttgctcggcactgacataaaaatacttgtagctggggtttccattctcattgatgatttcaggatgcaccttgccactgggatccagaaaaaggattcgtggaatataacccccgtcagggctgaaatcttcatctttgggttcctcttcatcctcaagatttaccataacaaaattatgggagagttctgaaatttccgtagattctgcaaatttgggctttagagctttgcaagctccacaccaggatttatgaataatcaccatcaggggcagtccactggcagctgcttctttcttcccatcttccagtgtcctccaatgaatatgatctccaaaaccctttccaagcccattatgtccatcagaagagatgacgaggagcaggaaactgaagcccagcaaacaggtggccccgagacgaggccgcgtctccatggcagtaggtgcgcggggccaccggggctgagcggacgcagggccggagtcccagcagacggtccacacagttcgccgagcgccgctcagcacaacacctctacttcccagatttttttttttcaaactctgaaggaagtgatgttagacggatgtgggtggtgcctccggggtccggtttgggatggagtgagcttaaaggtgcagatcacgtagaagggtacgagagctgttctcgagcgcgagttgcttttcgtggat

SEQ ID NO: 13025 - DNA, 1691 bp, Homo sapiens
cgtcgactttttttttttttttttttggttcttgaatatgtattttttactgaaaaaatcattcataaattaacatacaaaaatgtacaaacacatgagtaaataatgtaatgacaaaggactatttttgtgaaaagttgttttttaaaccatctttagatttcagtgcaaaaatgtacccctgggcacctcttaaaacgtaagagcaagctcaaaaacacgtagtgatggaaataagctaggctacgctcaatgccatcgtcaatggtgagtggatacaatcaatccatgtggctcctgctcagctattaatgtctgtggtaaggatctctgacaagaggacctattatgtcaaaatgagtattcttgcaaatacccccccaccccccaaaacagcatgaacaaacggggacacctttccctgcacacagcaatcaaagacaagattaaggggccacccatcagtagccttgaagattttcagctaccaatatatgcacaaggtcacatttggttcctgttttgtttttttttttaacatgacaatttcacactattaacagcacacgggcctggctgtacgtttttaactatgacatttcccatatgatattcgaggcctggtggacacatgactgacagtgcacatccagagattctacactcatcagacacagacatgaccgcaaaggtatcaaagtgaccccactttaagcagtgaaaaaagacctttccttttgttctcaaatcagcattttctaaagtcaggtgttagccttttgccaacagtgtgtacttgatggtaattatggcaacatagagcttcaaacaagatcgcctgacaacactgccgcatacacatacggcacccaggactcagaatcagtctgtcctggcaaatccttccaaatgacatcatagtgttgtcacattgaaagcaactcacagccttcagtgaggaaaggggagaggagaatgagaaggggagaaaagccaaggcagggacaaaggcccggtgggggatgggggttgcagggtggaggggggtctttattgctatatgcaccataaaacaaaggaaaaccaaatgaacttctgtgtgtaatgttcacttgtgaaggtattttaaagcatgaaatgcttaagtcttaaaaaacatatgctatagcttaccggcattttcaagggcaggaacctgctctctcatatgagccgataagagctttgcaatgcaatttattttctaaataccactctattcttcaaaagaacaaaaacacaaacaaacaaacaaacaaaacaaggcctggccaatcactcccacagtttgtggggatcatatgtccacagaaccatcacatgcaacgaaaaaagccctaacccacacacatacacacacacacccctacacacacccatgtaaactatgaaaatcaaggaagttgaaggcaaacaaggcaattaaaaaaaaatacgaagtactcttcagaaagtactcctcatcacaatatataaatatgttttatggaaaacaagggcgggggaggaaaactggcattttccagaattctgcagaagccgacagagactacaatttgagggctttggtttggggaaaaacaaagaggcacaaattcaaatacaatttagaacatgacttcaaggctgggcgcaatggctcacacccgccc

SEQ ID NO: 13026 - DNA, 884 bp, Homo sapiens
ccgctgcgctcctcctccctccttccgtcctccgcgccttccgtcggtcggtccttgcttcctgcttcgcctccgcgcctcgcgctatgggacagagcccccgatccgccagcaccacctgaggatccagaaaccgccccagcgatggaagaggatcaggagctggagaggaaagcaatagaagaactgcttaaggaggcaaaacgtgggaaaactagagctgaaacaatgggacccatgggttggatgaagtgtcctcttgctagcaccaataaaagatttctaattaacacaattaaaaacacattgccctctcataaagagcaagaccatgaacaaaaagagggcgataaggaaccagcgaagagccaggcccagaaagaagaaaacccgaagaaacacagaagccatccttacaagcacagcttccgcgctcgaggttccgccagttactccccgccacgaaagcggagcagccaggacaagtacgaaaagcggtccaaccggcggtgaggctggaaccagggccagccagccctgcgggcctccgtgctccttcggggtgcggtgtgcggagaaggcctgagctggcagggcaaacacctgagagtgactttgacattaggtcctttgttgtttttaaagaggctgctggccacaggcaaaaaaaatgacctagcaactcttgaggaaacaagtgcaaaggaggatgtcttggcaagtttaagctacttctgcagtgtagtagacttacatattgttgtttatcttgtttggaagtgtgtttcaaaataaacatgtctagaatttaaagttttcagagattgttaaaactggttccaattttttggtcatttctcagaaaaataaaatacttataaatc

SEQ ID NO: 13027 - DNA, 919 bp, Homo sapiens
gacctgtttatgaagagaatagtagaggatcctgaatccctaaacatgaaaaacattctatctattcttcatacttactcttctctcaatcatgtctacaaatgccagaacaaagaacagttcgtggaagttatggctagtgctctgactggttatcttcacactatttcttctgaaaacttattggatgcagtatattcattttgcttgatgaattactttcccctgggctccttttaatcagcttctgcaaaaagacatcatcagtgagctgctgacatcagatgacatgaagaatgcttacaagctgcatactttggatacttgtctaaaacttgatgatactgtctatctgagggacatagccttgtcactcccacagctgccgcgggagctgccatcgtcacatacaaatgcaaaggtggcagaggtgctgagcagccttctgggaggtgaaggacacttctcaaaggatgtgcacttgccacacaattatcatattgattttgaaatcagaatggacactaacaggaatcaagtgctaccactttctgatgtggatacaacttctgctacagatattcaaagagtagctgtgctatgtgtttccagatctgcttattgtttgggttcaagccaccccagaggattccttgctatgaaaatgcggcatttgaatgcaatgggttttcatgtgatcttggtcaataactgggagatggacaaactagagatggaagatgcagtcacatttttgaagactaaaatctattcagtagaagctcttcctgttgctgctgtaaatgtgcaaagcacacaataaagtgaaaatcaaccttttcatattaggagacatgcatttgtaaaaattaataaagatgacaagtcagttgtcaatggaattgaaaaaaaaaaaaaa

SEQ ID NO: 13028 - DNA, 771 bp, Homo sapiens
gaccggcccacgcttcccgccagtcccctaaccctgaggctgccgcgcggcggtcactgcgccggggtagtgggccccagtgttgcgctctctggccgttccttacactttgcttcaggctccagtgcaggggccgtagtgggatatggccaactcgggctgcaaggacgtcacgggtccagatgaggagagttttctgtactttgcctacggcagcaacctgctgacagagaggatccacctccgaaacccctcggcggcgttcttctgtgtggcccgcctgcaggattttaagcttgactttggcaattcccaagggcaaaacaagtcaaacttggcatggagggatagccaccatttttcagagtcctggcgatgaagtgtggggagtagtatggaaaatgaacaaaagcaatttaaattctctggatgagcaagaaggggttaaaagtggaatgtatgttgtaatagaagttaaagttgcaactcaagaaggaaaagaaataacctgtcgaagttatctgatgacaaattacgaaagtgctcccccatccccacagtataaaaagattatttgcatgggtgcaaaagaaaatggttttgcggttgaagtatcaagagaagttaaaagcaatagaaccaaatgactatacaggaaaggtctcagaagaaattgaagacatcatcaaaaagggggaaacacaaactctttagaacataacagaatatatctaagggtattctatgtgctaatataaaatatttttaaca

SEQ ID NO: 13029 - DNA, 2087 bp, Homo sapiens
  misc_feature (1)...(2087): n = a,t,c or g
gaattcgggggtgcctcctgcagcccgcctgctgggcaggccggcgcggcccggccatggagtcctacgacatcatcgccaaccagcctgtggtcatcgacaacggttcgggggtgattaaagctggctttgcaggagaccagattcccaaatactgtttcccaaactatgtcgggcggccgaagcacatgcgggtgatggctggagccctggagggggacctcttcatcggaccaaaagcagaggagcaccgggggctgctgaccatccgctaccccatggagcacggcgtggtgcgagactggaacgacatggaacgcatctggcagtacgtctactccaaggatcagctgcagaccttctcggaggagcatcctgtgctcctcacggaggccccgctcaacccgagtaagaaccgggagaaggcggcagaggtgttctttgagaccttcaacgtgccggccctgttcatctccatgcaggctgtgctcagtctgtacgcaacaggacgcacgacaggagtggttctagactcaggggacggggtcactcatgctgtgcccatctatgagggctttgccatgcctcactccatcatgcgggtggacattgccggccgcgacgtctcccgctacctccgactcctgctgcgcaaggaaggggttgacttccatacctcggctgagtttgaggttgtccggacaatcaaagagcgagcgtgctacctgtccatcaacccacagaaggatgaggctctggagacggagaaggtgcagtacacgttgccagacggcagccacgcttgatgtggggcctgcacgattccgggcccccgagctgctgttccagccggaccttgtcggggatgagagtgaggggctccatgaggtggtggccttcgccatacacaagtccgacatggacctgcgccggacgctgttcgccaacatcgtgctctcaggtggctcaacgcttttcaaaggcttcggagaccgattactcagtgaagtgaagaagcttgccccaaaggatatcaaaatcaagatctcagccccgcaggaacggctgtactccacatggattggcggctccatcctgggcttngttggacacttttaagaagatgtgggtgtccaaaaaggagtatgaagaggatggctcccgtgctattcatcgcaaaactttctagtgcccaaggagggcggggcatgttgggagagggggagggaggggagacagagcctttaaccctttttggtcttggctcgtatactaggcttagggtcccctgcatgccctgaacccctgggtgggtggcacagcagtgcccccctgcagccttcccctctacacaggacatgcacacacaagtaacattgagctgcatggacaggagccttgagctggcgtgtgggaattgagcgccatgtcaggctgttgtgggtatccccctggcagggccagcttaggcctgtggttccctgctccgactctcagggctgcctccctgagctccagggccagaatgcctggatgcctgggtagcccagtttggggagtgggctgcaaggggcagccagcagctcccactggtgtgtcactgcatccattgccacctcctgttcgtgacctgacagggtgacacagcccctttcacactctgtcctcctatcttcctgggtagatgccctggtgtagggctgagtactgaatggtcttccatccccagcaagggggtgcagcccagggtcaggcccttcagagccagggcagaggacgcacggtggctagagccgctgcactatccttttcagagcacttcatccacttgctcctccctctaccctcggcaccctgggtgggaaagggttgatgctcatcatttattgaggggaagccacttaataaggagtcagacctaaaagggggtgggggacattttcttacctcacccaagaaagaggtcgtcacttttggctgtggccagggccccacctccctctctcagatatgtacaataatttaacacggttgcctgaaaaaaacttttgtaaatcattatagtaataattatggacaaggaaaaa

SEQ ID NO: 13030 - DNA, 975 bp, Homo sapiens
gttaagtaaagtcaattcacagaagcacaattttgccctttgcgagacattgttgcctctatctagtcctacaagtagggttttgcatactgtgtttgcccctagggttgtcagtgcatcagaaatacttctaaatagtggtaaaaatgcacatggttaatgcacatgttacttttaaatcattaggatatccctcacctgttcctgatgaataaaaagtgtgttaaagaccaaaattcttggcataataatcagctacatacaaatcacatatagtttaatcttttttaatgaaaaaaaatcatgtttaaaatgggcaaaagcccatcttatacacttttatatagctgcaaaaaatttatatctgtacagatctaacactacgacactcagtattcattttattgaagcatgcaagtaaagcactttttctaatttatatagaggtatctaattaacacagcacattgtactaatgactaggagtagcagctttttcttctctccctctatgaattcttataatgtccctttttctgtaagtttttgagaggcaattggcaatttaggaggcagcagggtctgttttggtcaaatcttgaatttcgttggttgcactctagtgactgatctttgggaatgtcttgtctttgcatggggctcatagagatgtgtgcagacttgcttattgtggttagtgtgtatcaggaacacacacacaggtgttctgaccagctcaggcttgccacagtgagcaactctgtggctagcaaaagagaagtttatttgtgcccagccaaggtggaacaccctaacattatgcccctcctgatgtgacttaagaattttacctatttagttttcttgcacaaagtgttaaactggaatttaatcatgaggaaattattagacaaatcctgaatgtagtcattctataagatgattgacttgggcttctcaaaaagtcagtgtcat

SEQ ID NO: 13031 - DNA, 1416 bp, Homo sapiens
  misc_feature (1)...(1416): n = a,t,c or g
ggacacgcaggaccaccagaaactctgttactctgccctcatcctggccatggtcttctccatgggagaggcagtgccctatgcacactatgagcacctgggcacgcctttcgcccagttcctactgaacatcgtcgaggatgggctgcccttggacaccacagagcagctgccggacctctgcgtgaacctgcttctggctctcaacctgcacctgccagctgctgaccagaatgtcatcatggctgccctgagcaaacacgccaatgtcaagatcttctccgagaagctgttgttgctcctgaacagaggggatgaccctgtgcgcatcttcaaacatgagccacagccaccacactctgtcctcaagttcctgcaggacgtgtttggcagcccggccacagctgccatcttctaccacacagacatgatggctctcattgacatcactgtgcggcacatcgcagacctgtcaccagggngacaagctgcgcatgggagtacctctcccttgatgcatgctattagtccgcaccacaccctacctgcaggcaccgccaccgggttacccgacctgcaggccatactgcgacgcatcctgaatgaggaggagacctcaccccagtgccagatggaccgcatgattgtccgagagatgtgcaaggaattcctggtgctgggggaggctcccagctagcaccttgctgtcctcccttccctgcagctccagtcagtgtgcaggggactcaggggcttggccctaagaatgttttgcactgacagtgtggaggggaataaggtggcagaaggaacctgagcaggacccccacctgaagtagaacttaagagaggggccaagtgtaggattggggaccatggtctgggagctgttctggggcagggggaatatgcaagctaaagcccctctataccctggtaggcttcctcttcagcatgcccccctcttcaccccacacccatgtgtacactcagagtcctgctgccgctccaggctggaccagacccccatccccacccctcctggtctgtatcctgggcctcagcaagccatgcccctggggtgaggggaggcatctcccaccagctctattctttgcccttagctttgcagtgagtgctgctcatgtcctcccctccacccgcacatgggggtcgctgcccttcactcctacccccagaggccttggccaagctgctgctttgaaagcgggatcttggagacaggccgatccatcctggagcctcatggaacaggatgatggcactgagaaagccaatgaccgaatctcttttctctgtaaaaatgtagactgaaaagccatgtgtattttcctatgtgctgtagctctcctttggaaataaatcacaggcatctggaaaaaaaaaaaaaaaaaa

SEQ ID NO: 13032 - DNA, 634 bp, Homo sapiens
ttttttctgctaatatccaaagtttatcatagctatgacaatatcagtcccaaccaggttacaagtttgttacaaattacaaactacttaaaaacagttttgaaaaaaaatatatcccaaatattaacactaaacactaccctggagttagaaaaactgtaaatgggatgaggaaactgaggtaccagtggtgacataaggcctttttgtctgacagactgttttctgaagtcagtgtaggatgtagtctaacagacctccagaagaataattcttccaactaccaaatcagcacactgagacattaaaatactcaaatcagaataaggaccgaccctaagtttaaatgtgtatttggattaacatttttcagcaggagtgtatgaagaggggagaggatacaagtcaaagactgggtagtcaggccccctgtcccttgcagaatcccttacactcaccaaacagaatattaaagcaagagctacccaataagaagagactaaagaccccaactcactccttttgtgttgggcagaagaacctgggctgtgagtcaagaaaagcttcccagggaaactaagaaaaatgttttaattatgtagcttgcacataatggtactcaaggcacctccca

SEQ ID NO: 13033 - DNA, 3670 bp, Homo sapiens
ggggtcacgggcgaactagaacactgggaaaggggctgcaggttccggaccggaccggccctgacccggaataatgagcaaggagggtgtggtgggttgaaagccatcctactttactcccgagttagagcatggattcagttttagtcttaagggggaagtgagattggagatttttatttttaattttgggcagaagcaggttgactctagggatctccagagcgagaggatttaacttcatgttgctcccgtgtttgaaggaggacaataaaagtcccaccgggcaaaattttcgtaacctctgcggtagaaaacgtcaggtatcttttaaatcgcgatagttttcgctgtgtcaggctttcttcggtggagctccgagggtagctaggttctaggtttgaaacagatgcagaatccaaaggcagcgcaaaaaacagccaccgattttgctatgtctctgagctgcgagataatcagacagctaaatggagtctgagcagctgttccatagaggctactatagaaacagctacaacagtataacaagtgcaagtagtgatgaggaacttttagatggagcaggtgttattatggactttcaaacatctgaagatgacaatttattagatggtgacactgcagttggaactcattatacaatgacaaatggaggcagcattaacagttctacacatttactggatcttttggatgaaccaattccaggtgttggtacatatgatgatttccatactattgattgggtgcgagaaaaatgtaaagacagagaaaggcatagacggatcaacagcaaaaagaaagaatcagcatgggaaatgacaaaaagtttgtatgatgcgtggtcaggatggctagtagtaacactaacaggattggcatcaggggcactggccggattaatagacattgctgccgattggatgactgacctaaaggagggcatttgccttagtgcgttgtggtacaaccacgaacagtgctgttggggatctaatgaaacaacatttgaagagagggataaatgtccacagtggaaaacatgggcagaattaatcataggtcaagcagagggtcctggttcttatatcatgaactacataatgtacatcttctgggccttgagttttgcctttcttgcagtttccctggtaaaggtatttgctccatatgcctgtggctctggaattccagagattaaaactattttaagtggattcatcatcagaggttacttgggaaaatggactttaatgattaaaaccatcacattagtcctggctgtggcatcaggtttgagtttaggaaaagaaggtcccctggtacatgttgcctgttgctgcggaaatatcttttcctacctctttccaaagtatagcacaaacgaagctaaaaaaagggaggtgctatcagctgcctcagctgcaggggtttctgtagcttttggtgcaccaattggaggagttctttttagcctggaagaggttagctattattttcctctcaaaactttatggagatcattttttgctgctttagtggctgcatttgttttgaggtccatcaatccatttggtaacagccgtctggtccttttttatgtggagtatcatacaccatggtacctttttgaactgtttccttttattcttctaggggtatttggagggctttggggagcctttttcattaggggcaaatattgcctggtgtcgtcggacgcaagtccacgaaatttggaaagtatcccgttctggaagtcattattgttgcagccattactgctgtgatagccttccctaatccatacactaggctaaacaccagtgaactgatcaaagagctttttacagactgtggtcccctggaatcctcttctctttgtgactacagaaatgacatgaatgccagtaaaattgtcgatgacattcctgatcgtccagcaggcattggagtatattcagctatatggcagttatgcctggcactcatatttaaaatcataatgacagtattcacttttggcatcaaggttccatcaggcttgttcatccccagcatggccattggagcgatcgcaggaaggattgtggggattgcggtggagcagcttgcctactatcaccacgactggtttatctttaaggagtggtgtgaggtcggggctgattgcattacacctggcctttatgccatggttggtgctgctgcatgcttaggtggtgtgacaagaatgactgtctccctggtggttattgtttttgagcttactggaggcttggaatatattgttccccttatggctgcagtcatgaccagtaaatgggttggagatgcctttggcaggcgaaggcatttatgaagcacacatccgattaaatggataccctttcttggatgcaaaagaagaattcactcataccaccctggctgctgacgttatgagacctcgaaggaatgatcctcccttagctgtcctgacacaggacaatatgacagtggatgatatagaaaacatgattaatgaaaccagctacaatggatttcctgtcataatgtcaaaagaatctcagagattagtgggatttgccctcagaagagacctgacaattgcaatagaaagtgccaggaaaaaacaagaaggtatcgttggcagttctcgggtgtgttttgcacagcacaccccatctcttccagcagaaagtcctcggccattgaagcttcgaagcattcttgacatgagcccttttacagtgacagaccacaccccaatggagattgtggtggatattttccgaaagctgggactgaggcagtgccttgtaactcacaatgggcgcctccttggcattataacaaaaaaagatatcctccggcatatggcccagacggcaaaccaagaccccgcttcaataatgttcaactgaatctcacagatgaggagagagaagaaacggaagaggaagtttatttgttgaatagcacaactctttaacctgagggagtcatctacttttttttcctcctttacaaaaaaagaaaggaaatataaaagccgggtttttgcaacatggtttgcaaataatgctggtggaatggaggagttgtttggggagggaaaggagagagaaggaaaggagtgaggtatttcccgtctaacagaaagcagcgtatcaactcctattgttctgcactggatgcattcagctgaggatgtgcctgatagtgcaggcttgcgcctcaacagagatgacagcagagtcctcgagcacctggcctgttgctccaacattgcaaagacacattatcagtccctatttctagagggattactttgaattgagccatctataaaactgcaaggtcttgcccttttttttaatcaaaactgttctgtttaattcatgaattgtatagttaagcattacctttctacattccagaagagccttttaattctctctctctctctctctctctctctctctctaactggagctgtaacaaagcctctttaaatcggtgtatccttttgaagcagtcctttctcatattgagatgtactgtgattttactgaggtttcatcacaagaagggagtgtttcttgtgccattaaccatgtagtttgtaccatcactaaatgcttgg

SEQ ID NO: 13034 - DNA, 1820 bp, Homo sapiens
cagcgtggaccctgccagcagccaggccatggagctctctgatgtcaccctcattgagggtgtgggtaatgaggtgatggtggtggcaggtgtggtggtgctgattctagccttggtcctagcttggctctctacctacgtagcagacagcggtagcaaccagctcctgggcgctattgtgtcagcaggcgacacatccgtcctccacctggggcatgtggaccacctggtggcaggccaaggcaaccccgagccaactgaactcccccatccatcagagggtaatgatgagaaggctgaagaggcgggtgaaggtcggggagactccacttggggaggctggagctgggggtggtgttgagcccagccttgagcatctccttgacatccaaggcctgcccaaaagacaagcaggtgcaggcagcagcagtccagaggcccccctgagatctgaggatagcacctgcctccctcccagccctggcctcatcactgtgcggctcaaattcctcaatgataccgaggagctggctgtggctaggccagaggataccgtgggtgccctgaagagcaaatacttccctggacaagaaagccagatgaaactgatctaccagggccgcctgctacaagacccagcccgcacactgcgttctctgaacattaccgacaactgtgtgattcactgccaccgctcacccccagggtcagctgttccaggcccctcagcctccttggccccctcggccactgagccacccagccttggtgtcaatgtgggcagcctcatggtgcctgtctttgtggtgctgttgggtgtggtctggtacttccgaatcaattaccgccaattcttcacaggcacctgccactgtctccctggtgggagtcaccgtcttcttcagcttcctagtatttgggatgtatggacgataaggacataggaagaaaatgaaaggcatggtctttctcctttatggcctccccacttttcctgggccagagctgggcccaagggccggggagggaggggtggaaaggatgtgatggaaatctcctccataggacacaggaggcaagtatgcggcctccccttctcatccacaggagtacagatgtccctcccgtgcgagcacaactcaggtagaaatgaggatgtcatcttccttcacttttagggtcctctgaaggagttcaaagctgctggccaagctcagtgggggagcctgggctcttgagattccctcccacctgtggttctgactcttcccagtgtcctgcatgtctgcccccagcacccagggctgcttgcaagggcagctcagcatggccccagcacaactccgtagggagcctggagtatccttccatttctcagccaaatactcatcttttgagactgaaatcacactggcgggaatgaagattgtgccagccttctcttatgggcacctagccgccttcaccttcttcctctaccccttagcaggaatagggtgtcctcccttctttcaaagcactttgcttgcattttattttatttttttaagagtccttcatagagctcagtcaggaaggggatggggcacccaagccaagcccccagcattgggagcggccaggccacagctgctgctcccgtagtcctcaggctgtaagcaagagacagcactggcccttggccagcgtcctaccctgcccaactccaaggactgggtatggattgctgggccctaggctcttgcttctggggctattggagggtcagtgtctgtgactgaataaagttccattttgtggtcctgcaaaaaaaaaaaaaa

SEQ ID NO: 13035 - DNA, 629 bp, Homo sapiens
ttttttttttctccgagtttttgcattttaaaatttatttaaagtcttggttgttcaggtcctaggggttccaagtccccagtcaccttgaggactcagacatcaggaattcagtccccagcccagagatcaacgaaagaaagacaacttttcttggagccaggcctcagtgaggtcatcagtggtgcggatttcgaacacctttgtgagctctgctgtctgcaccagcctgtttttactccctgcatacatcatctgttgttccggcttgcagcccacagggctggagaagatgaaacacaaagggtaggacactcggccatcgtcatgcacgtacttgtagctgtaaaccacgaacctgggctgtctctccggcaactccattttgagctcctctggggaaatgttctgaaattcttcctccagcaccaccatctgccggtctttgtccaccttcattatgatggctgcattgtctgtctcttttcggaagcggaatttcctcagcttttctgttagctctgggtctacctcgcacaccaccagggagtcagacatgattgttctgtccacaggcctcttcttttcttagttccgctgtcttctaggcgtggggaccggggctgtag

SEQ ID NO: 13036 - DNA, 371 bp, Homo sapiens
cggacgcgtggggtttactggacaataatattcctggtaacagcactcttattactgcagttgaactggagcgatttgtgaatctgcactcacttgccttggatttttgtgactttacagctgagatggcaagagtcttaactgatagcaaccatgtgcctttgcaacgactgtctcttctggttcacaatgtttctgtaatgcacaagtctctggacaacatgccaaatgatgagcattggaaagccctgtcacgaaagagcaccagctttcgggtctatataatggcttttgatatcaagagtgaagatatgttaaagattctgaaacccagtataccactagagaggattcattttgatagctatatt

SEQ ID NO: 13037 - DNA, 5488 bp, Homo sapiens
ggtagctgggtgcagacgccgtggcgctggagacccaaacatggcaaacctggaagaaagcttcccccgaggaggtacaagaaagatccacaaaccagagaaagctttccagcagtcagttgaacaagacaacttatttgatatttctactgaagagggatccaccaaaagaaaaaagagccagaaggggccagcaaaaacaaaaaagttgaaaatcgaaaagagagaaagcagcaagtccgcaagagagaagtttgaaatccttagtgttgagtccctgtgtgagggaatgcgtattttgggttgcgtgaaagaggtgaatgaactggaactggtgattagtctccccaatggcctccagggctttgtgcaagtcactgaaatctgtgatgcctacaccaaaaagctgaatgagcaggtgacacaagaacaacctctgaaggacctacttcacttgcctgaacttttctcacctggaatgctggtaagatgtgtggtgagcagtctgggcatcacagacaggggcaagaagagtgtcaagctgtctctgaaccccaaaaatgtcaacagagtgctgagtgctgaggccctgaagcctggcatgctacttacaggtaccgtatccagcctggaagaccatggctacctagtggacattggtgttgatgggaccagagcttttctgccactgctgaaagcccaggagtacatcagacagaagaacaaaggtgctaaactaaaggtgggtcagtacctgaactgcattgttgaaaaggtgaaaggcaacggaggagttgttagtctgtctgttggtcactcagaggtttctacggccattgctactgaacagcagagctggaaccttaataacttgctaccaggactggtggtcaaagctcaggtacagaaggtgactccatttggccttacgctaaacttcctcacattcttcacgggcgtggttgactttatgcacctggatcccaagaaagctggaacatatttctcaaatcaggcagtgagggcctgcatcctttgcgtccatcctcgaaccagagttgtgcacctgagcctgcgccccatcttcctacagcctggacgcccactcacccgactctcttgccagaaccttggagcagtgctggatgatgttcctgtccagggttttttcaaaaaggctggggccacctttaggctgaaggatggggttctggcctatgcccggctcagccatctctctgattctaagaacgtcttcaatcctgaggccttcaagccagggaacactcacaagtgtagaattattgactacagccaaatggatgaactggccttgctctctctacgaacgtctattattgaagctcagtaccttagatatcatgacatcgaacctggggcagtggtaaagggcacagtgctaaccataaagtcatatgggatgctggtgaaggtgggcgagcagatgaggggcctggtacctcccatgcacctggctgacatcctgatgaagaatccggagaagaagtaccacatcggggatgaggtcaagtgccgggttttgctttgtgaccctgaagccaagaagctgatgatgaccctgaaaaaaaccctgattgagtccaaactacctgtcattacctgctatgccgatgccaagcctggtctgcagacacatggcttcatcatcagggtcaaggactatggctgcattgtgaagttctacaacaatgtgcagggactggtgcccaagcatgagctcagtactgagtatatccctgacccggagagagttttttacactggccaggtggtgaaggttgtcgtattgaactgtgagccatccaaagagaggatgctcttatccttcaagctgtcgagtgatccagagccaaagaaagagcctgcaggacacagtcagaagaaaggaaaagccattaacattgggcagttggtagatgtgaaggttttagagaagaccaaagatgggctggaggtggctgtcctgccccacaacatccgtgctttcctccccacatctcatctgtcggaccacgttgccaacggcccattgttacatcattggctccaggcaggtgacatccttcaccgagtcctgtgtctgagccagagcgaggggcgtgttcttctttgcaggaagccagccttggtctccacagtagaaggtggccaggatcccaagaacttctcagaaatccatcctggaatgctgctcattggttttgtgaagagcatcaaggactatggcgtgttcatccagttcccctcaggtcttagcggactggccccaaaagctatcatgagtgacaaatttgtgacctccacaagtgaccactttgttgagggccagacagtagcggcaaaggtgaccaatgtggatgaggagaagcagcggatgctgctgtcactgcggctgtcggactgtggtctgggggacttggctatcaccagcctcctcctcctgaatcagtgcctggaggagctgcagggcgtgcgcagccttatgagcaaccgagactctgtgttgatccagacgctggccgagatgaccccaggaatgttccttgacctagtggtgcaggaggtgttggaagatggctctgtggtattcagtgggggtccagtgcccgacctggtcctgaaagccagcagataccatcgcgcagggcaggaggtggaatctgggcagaaaaagaaggttgttatcttaaatgttgatcttttgaagttggaagtgcacgtttcccttcaccaggacttggtgaatagaaaagctagaaagctgaggaaaggcagcgaacaccaggcgattgtgcagcacttggagaagtcctttgccattgcctccttggtagagacgggccacctggcagctttctccctgacctctcacctcaacgacaccttccgctttgactcagagaaattgcaggtgggacagggtgtctccctaaccctcaagaccacagaaccaggagtgactggccttcttttggctgtggaggggccggctgccaagaggaccatgaggccgacccagaaggactctgagacagttgatgaggatgaagaagtggatccagctctgactgtagggaccataaagaagcacaccctctccatcggggacatggtcacagggactgtcaagtccattaagcctacccatgtggttgtgactctggaagatggcattattggctgtatccatgcctcccacattctagatgatgttccagagggcacctctcctactaccaagctgaaggttgggaagacggtcactgcccgagtgattggcgggcgagacatgaagacattcaagtatctcccaataagtcaccccagattcgttcgaaccatcccggagctgagtgttcggccaagtgagctggaggatggccacactgctcttaacactcactctgttagccccatggagaagattaaacagtaccaggccggccagactgttacttgcttcttaaagaaatacaatgtggtgaagaaatggcttgaggtggagattgccccagacatccgggggagaattcccttattgctcacttctctgagcttcaaggttctgaagcatccagataagaagttccgggttggccaggccctgagggccaccgttgttggcccagattcctccaagaccttcttatgtctgtccctcacaggtcctcacaagcttgaggaaggggaagtggccatgggccgagtggtgaaggtgactcccaacgaggggctgaccgtctccttcccctttgggaagataggaacagtcagtatatttcacatgagtgactcctactccgagacgcccctggaagacttcgtcccccagaaggttgtcagatgttacatcctgtccactgcagacaacgtattgactttgtcgctgcgatcatccagaacaaacccggagacgaaaagcaaagtagaagatccagagattaactccatccaggacattaaggaagggcagcttctgaggggctatgtagggtccatccagccacacggtgtgttctttcgccttggcccctccgttgtgggtttggctcggtactcccatgtctcccagcacagcccgtccaagaaagccctttataacaaacacctccctgaagggaagctgctcacagccagggtcctacgccttaaccaccagaagaacctggtagagctgtctttcctccccggagacactgggaagccagacgtgctttctgcttccttggaagggcaacttacaaagcaagaggagaggaaaacagaggctgaggagagagaccaaaaaggggaaaagaaaaatcagaaaaggaacgagaagaagaaccagaaggggcaggaggaggtggagatgcccagcaaggagaagcaacagccccagaagccacaggcgcagaagcggggcgggcgggagtgccgggagtctgggagtgagcaggaaagagtgagcaagaagccaaagaaagccggcctgtcagaggaggacgacagccttgtggacgtgtactatcgggagggaaaagaggaggcagaagagacgaatgtgctgcccaaggagaagcaaaccaagccagcagaagcgccccggctgcagctgtcttcaggcttcgcttggaatgtgggactagactctctgaccccggccttgccacctctagcagagagctcagacagcgaggaggatgagaagccacaccaagccacgataaagaaaagcaagaaagaaagggagttggagaagcagaaggcagagaaggaactgtcccgcattgaggaggcgctgatggatcctgggcggcagccagagtccgcggatgattttgaccgactggtgctgagctcccccaacagctccattctgtggctgcagtacatggctttccacctgcaggccacggagatcgagaaggcccgtgccgtggctgagagggcccttaagaccatctccttcagagaggagcaggagaagctgaacgtgtgggtggctctgctgaacctggagaacatgtacggctctcaggagtccctgaccaaggtctttgagcgagccgtgcagtacaacgagcctctcaaagtctttctccacctggctgacatctacgccaagtcagagaaattccaggaagctggtgaactctacaaccggatgctgaagcgtttccggcaggagaaagctgtgtggatcaaatacggcgccttccttctgcggaggagccaggctgcagccagtcaccgcgtgctgcagcgagccctggagtgcctgcctagcaaggagcatgtggatgtcattgccaagtttgcccagcttgagtttcagctgggggatgcagagcgggccaaagccatttttgagaacacgctgagcacctacccaaagcgcacagatgtctggtcggtctatatcgacatgaccatcaagcacggcagccagaaggacgtccgggac

SEQ ID NO: 13038 - DNA, 1715 bp, Homo sapiens
cggacgcgtgggttacttattagcagagctctttgtagaccttccacatctggctgtcagatcttaaggttgtgaatttaggctccagttatattcactggagagcataatcccacacgggttatttataaatacagagcctctgattggacggtctcctgccaagaactagtaatacccttgttttaaaatcttcacaaggtaaaacttaaaaagccaaccaaacaaattgctctccattctacttttaattgggccaaacagcatatgctacagtagtaacatgtttttcggagagtgtaaaaaactctgtttacatttgcctcctccgtgggttgatcgaaaatgtataaaactgactgcttctcgccagcctcagacaagaagagtgagttgctggtactcgctactcttttacttcttttgtaaagtattgactcttgggaaggctacagtatacaaagtctcaacatgttttttaaaagaaataaggagcaagcgactggccctggctagaaatcacaaaccgatttttgtagaatattttgtgccccaggcattaatttcactgactccagaacctgcagttcagagaatgatttcttatgatgataaaaatcgaatgggatcagacgatgtttgcatttttttaatacttgaataggacacctcaagtttgagatttcattttcttttagaacacagtcacaagattaatctggtgaatccttttgtcacagttctcgtgtgtgtgtgcgcgtctccgtgtgtgtgtgtgtgcatgtgtgtaaaactgaatggtcacatttaattgctttttggaccattgaatagttgggaagtaagaattttttaattggcatgagacggttcctcaactgttaaattaaccaactttgacctgtctttagaaaaaggcttatttgtatgattttgggctaactccccggggaccatattaaatgacaaaaatgctcctttggggtgacacaccctacaaagtatttgctgttacgaacataaacgcccacattcttaatatctaatatttttgaccagtgatgttttatgctgtcatctgaaccctagagaagcagtgtcagaggaaaccttggtgtcacatgtgtcttagcaaaagggttaccatgatcgggggtcatgtgaccaaaagatgctccagagaagcttgagaatttgtttcaagttgggaggagggttggagatacaaaaatcactctgctctacaggactcttcagctgtctatgcaagaaattccgttttctctttcagcacctggaaagacacagcagcccaccgaggcgataggtgattcactaagcacaagaggaatgttttctaagcaaggcgtcccttgcctctcaaacaaatgccctccaagtttgttagggtttctattcctgcaacttgtagtatcaaaaccacttcctggaattgtcaaagcactgcccaaaataaatgtttttcccccttcgaagaaaaaaaaaatgacagtgctcatatttgacacttgtgtattggactctcttttgaatgaataaaaaggaaaaggggtttggtgtaattcctgatggggtgcgtgttttttttcatgccatggtttgtgaattttaattgtggtttcccatttcgttgttgtaactgggcagaaattaaaaaagaaaaatcaataaaaatacaaagaaatggttaaaaa

SEQ ID NO: 13039 - DNA, 668 bp, Homo sapiens
gtgaaccaggatgtgaggggaacacaacagaccatgccgacggagctcccgggcccaggccggggcctcttcccatcgcactctgacccgccgtcgggagtgcccaggcccgggtcgggcctgcctctccgctcgcaccgcactctgacccatcaggagtgtggggaagaccgtcgaccaaaggtgggaaagacaggaaagatactgtactctaagtagtaaatttgttttttgcgtggacgattctgaagctgtattctgagatggaaaaaactagaaatacatcgtggatgatgagagccaggtgtattgagctcctgcttttctaacgtacaaaggtaactggatagagaaacggagtgatcgccctcacctggccagggtgtgctccgagaccccagcaggtgccgaagccgcggatagtcccgaatcctgtccaggcggtgttttttcctgtacgtacctgtgatcaagtctgagatgtgacagcaaaactgacagaacttcgtgcttccctcttcaaaatgtcacagatgggcactgtgttcttaccggagatcttagcaacctcggcatctggctgtttttcttataggtcaggagtttccaccttttcccttaaaggaagcgcttggcagcttctctggtgtgtctgagtcgccagcatc

SEQ ID NO: 13040 - DNA, 2339 bp, Homo sapiens
ggagaagagctcagaaactgaagcacagaaacgttaggtaggagtctgagaggcgtggagaattttgcttgtgcaagattatttcagagcaaggtcgtgcggtgtgtgtagaagatgaacagactagccactttgcattgactggaaacaatggcatttacagaaagagtcaacagcagtggcaacaggaacttagtgatttggcccgtgaccctccagcacaatgttctgcaggtccagttggggatgatatgtttcattggcaagccacaattatgggacctaatgacagcccatatcaaggcggtgtattctttttgacaattcattttcctacagactaccccttcaaaccacctaaggttgcattttacaacaagaatttatcatccaaatattaacagtaatgggcagcatttgtctcgatattctaagatcacagtggtcgcctgctttaacaatttctaaagttcttttatccatttgttcactgctatgtgatccaaacccagatgaccccctagtgccagagattgcacggatctataaaacagacagagataagtacaacagaatatctcgggaatggactcagaagtatgccatgtgatgctaccttaaagtcagaataacctgcattatagctggaataaactttaaattactgttccttttttgattttcttatccggctgctcccctatcagacctcatcttttttaattttattttttgtttacctccctccattcattcacatgctcatctgagaagacttaagttcttccagctttggacaataactgcttttagaaactgtaaagtagttacaagagaacagttgcccaagactcagaatttttaaaaaaaaaatggagcatgtgtattatgtggccaatgtcttcactctaacttggttatgagactaaaaccattcctcactgctctaacatgctgaagaaatcatctgagggggagggagatggatgctcagttgtcacatcaaaggatacagcattattctagcagcatccattcttgtttaagccttccactgttagagatttgaggttacatgatatgctttatgctcataactgatgtggctggagaattggtattgaatttatagcatcagcagaacagaaaatgtgatgtattttatgcatgtcaataaaggaatgacctgttcttgttctacagagaatggaaattggaagtcaaacaccctttgtattccaaaatagggtctcaaacattttgtaattttcatttaaattgttaggaggcttggagctattagttaatctatcttccaatacactgtttaatatagcactgaataaatgatgcaagttgtcaatggatgagtgatcaactaatagctctgctagtaattgatttatttttcttcaataaagttgcataaaccaatgagttagctgcctggattaatcagtatgggaaacaatcttttgtaaatgcaaagctgttttttgtatatactgttgggatttgcttcattgtttgacatcaaatgatgatgtaaagttcgaaagagtgaatattttgccatgttcagttaaagtgcacagtctgttacaggttgacacattgcttgacctgatttatgcagaattaataagctatttggatagtgtagctttaatgtgctgcacatgatactggcagccctagagttcatagatggacttttgggacccagcagttttgaaatgtgtttatggagtttaagaaatttattttccaggtgcagcccctgtctaactgaaatttctcttcaccttgtacacttgacagctgaaaaaaaacaacatgggagtaataatgggtcaaaatttgcaaaataaagtactgttttggtgtgggagttgtcatgaggctgtgttgaagtgacttatctatgtgggatattgagtatccattgaaatggatttgttcagccatttacattaatgagcatttaaatgcaacagatatcatttcaggtgacttaacatgaatgaataaaagtcaatgctattggattgttttttgtttgacaagtgctatctgtgccactgatttaacttctgtagtaacaagggcattaccattcttcacctttcctaattctgatcccatagttttacatttttcctgtttattttgattttgttcactgctttatttcttaaagttctagcacatctgtgactcctccacttccacatttttgcactgcttacacttacgtgcaatcttattccttgtctgcacacacatgtggaaagctagaaataaatgttaaaacttactttttataaacattttaaaaa

SEQ ID NO: 13041 - DNA, 771 bp, Homo sapiens
ggtgatattgatagcttttattttctaatttttaaaaaatggtcatattatgagtcaaagagtatcaaatcagtgttggatggaccacccaagggtgaggagaggggctggaagccctgggcattaggagaagggagtgggtgctggcatggacatgactggatagaattttctcaggagggagcttggtggattttgaaggtaaaactttctgggtttatcatgttttaattttagagacagggagtgatgaatcatcaccggttgtccccttatctaactccataaaagtgggaatttcaaaagaacacctcatccaaggagctggggcagacttcattgattctagagagacctgtttcagtgcctactcatccctgccctctggtgccagcctccttaccatcacggcttcactgaggtgtaggtgggtttttcttaaacaggagacagtctctcccctcttacctcaacttcttggggtgggaatcagtgatactggagatggctagttgctgtgttacgggtttgagttacatttggctataaaacaatcttgttgggaaaaatgtgggggagaggacttcttcctacacgcgcattgagacagattccaactggttaatgatattgtttgtaagaaagagattctgttggttgactgcctaaagagaaaggtgggatggccttcagattataccagcttagctagcattactaaccaactgatggaagctctgaaaataaaagatcttgaacccaaaaaaaaaa

SEQ ID NO: 13042 - DNA, 986 bp, Homo sapiens
agagagtcttaatcgtacagtggaaagtaaaggatccattaccattaattccggtggggaaaaaaaaccagggacctgacattccccaagcttatttggcttttgataaacctagtatcttgagagatcttagccatctgtggaataatttaataaatactgctctcacgtgagaggctgtttaaagcgtctgcaggtctgcattctaccttgctgtcatttacatctttctctcaaacccatggaatttgtgctgtctgtgcaccacagtcagcagcacattctcacttagaacgggcgtttcatcctgacccaggatggcaatttcctctaagcttagttctgaaaagaccctgccctttgatgttacatttggtcttacaacttttcacatatggtaagacaagtgtctagtttttctcacatagtcatcaccaccaaacagtgaagcaacgtttgtagcccaaagcttacctttcctcccatgctctgagagactcggcatctctcgtccttggctcactaacattggtgggctctgtttattgaggtcagacattcctctctgcatcttcctttaaacaaggctgactgtatcgggtgtacaaataccccagctccctctctccttgggtgggataaccctgaggtgtacgttctaccagtttccccatggagcttgcctgcagaggtaaccagcttgatgacaaatcttttattggcttccttccctgctctccaacagtttttcctgagatcaccttccaaataaatgacttgccctcaaatcattgtttcaatccccttgaatagaggaaatcaaacagagacacacacttgacctggtgctggtaggcttgccacactgcaggttgtggtaccatggtatcatcagcttgcaattcccaagtcatactggaaaacccttaagactctctgcagtctgctgccaacagtgcatgcacatataagacgtgtcctacaca

SEQ ID NO: 13043 - DNA, 692 bp, Homo sapiens
gttgtgcttctccaagagcaggtagcgtgggctgtccgggagaaagggaaggctcagcagctggacaacggcagggaccacaatcactccaaacaggtatggccaggtactctcctttcccagcagctcgggcaggcccagaagctgcccagtgaacacgccaatgcagataaagatggcagtcacctgccccagagagccacggatctccttgggtgagatctcactgaggtacatggggagcacactgagggcgacgccttaagtgccctcgagttcttctctctgctttgagagggttggtgagaatacatgacatgaagtctccaagtcctggcgtgactccaacaggccacgtgccacaagtcggaaagaccgaagttttttctttccttcttgttcttctttctttcctgcttctttttgaaagctcataggaaaaagggtctaaaagacatttgttctctctgtggttttgtaaaaggtccatcttggaatgcagcttatttttagttaaggaaattcagagatcaattagttatatgttcgaagggtcaactccccagattagtcaaagcaacaagaaaggggataatggataaaatataaaactgccaaacagagaatctcagttgcctccactaggaaaggacttcccagaagatccactgcaacctcatccaggctttctc

SEQ ID NO: 13044 - DNA, 1107 bp, Homo sapiens
  misc_feature (1)...(1107): n = a,t,c or g
gagccctggagaccacgtaccaatacccctccgagagttcggtactggaggagctgggcccggagcctgaggtccccagtgcccccaaccctccagcagcccaacccgacgacgaagaggatgaggaagagctgctgctgctgcagcgagnagctccagggcgggctgcgcaccaaggccctgattgtggatgagtcctgccggcggtgaccatcttccaacatagggatatacctccctccttcttataactgaagatcctggagcccggaagattcagggcagacagaccctgataatgagcctggcagggaagggcaaccaacatcttgtaacttgctttccccaccctgtttctgggggcagagccaattgcccaatttctaccctaatccaaagtccctggtgtgggtggggttaaacgtggctggtgcatcctaggtcatccaagagtgagcgccaagtcctgagaagggggcacagaactccctggagggtggagatggagcacctgccccccatgggcagggtacactctccccacagccttcctccccaccatcccgtgggggacttttcgggatttaagcactcgtctctctgggaggcccagaccccactccatttattagggcacatcttcctttcatttcctaggtcaattgcccctttgtttttacagttcctggcctcctccctttgaccacagcctgggtttacaaattccatcagctcccagccccacctgccaaagtcccaggtttacaagccacgcttacttgctgtgtctgcgtggaattctctcctctgtcccctccagtctcctcattggagtgacctgaaggtgtggcttcctccactttttctcagtattactttgccttagttttccccaagagggaaggctggaactcttaactctgtaccccttgatagttatttaattctgtttctcctagtggttcacaattgaactgaattgagatggtgtcgggtggctaaggagacacctcacctctccttccccattgtgccgcctttatcaattgcctgttttgttttgtttgttttttaactttccataataaaatggagttctcttcaaaa

SEQ ID NO: 13045 - DNA, 476 bp, Homo sapiens
gaactaagaagcaaacctacattcttcttcccaaagtccatgtttctccccctcgccatcctcttcaccaaaaactacattcattgtattcagctcctgcaaagagcacacattaagaaacaggtttaaggaagtgttagacactgaatgtattcgacccccaaaattcatgtgttgaaatcctgactcctaggactaactgttaggaggtagggcctttgggagatgattgggttttgagggtggagcccctcatgaatgggattagtgcccttataaaagaggccctggggagctgtctcccttttccaccatgtgaggacacggcaagaaaatggctgtctacaaagcaggaagcaggccctcaccacacactaatataccagcaccttgaccttgacctccccccatctccagaactgtgaggagtaagtgttgtttaagccacctagtctgtggtatttttgttataatag

SEQ ID NO: 13046 - DNA, 1205 bp, Homo sapiens
  misc_feature (1)...(1205): n = a,t,c or g
tttttttttttttcacacaaatcatcggcatttatttcctgggtcctaggtgtcacttatcctggtggacagggcagaggtggtcagatcgttttgagccaaaatcccttccctaaaaatggatctgtggagctccatgagggaacctcagagatgcacaatgacagtttagctaaaatggcttaaaaaatgtgaattgattgtcagctctctccatatctgctgaaaaaaggtttaaaatttttaaaaagtttaaaagtgttttctaaaaaagggacaagcaggtctggacccagaagattgggctggagaggaggtgttggtgttggggacagggtccctgncccgggcccgntcgcgagagggagcgttcctgtgtgggctgctcactgtaggggcaggcccccgcccaagtcccggcgccagctcaataaataacatcttgtggttacagtgtcttgaaagtgtacctgggcacggtgcgaaggtggtgggaatgtgaagcctgtgggtgtgggcagaggctttcccggagtggagccacagaggcctctggggagccttctcagtctggcctggtttatctgggacatggagctcagagaagaggctgctgggcccagtgcccagggtttccccctctgggaggggacagaaggtctctcgtccagccttcttggacaaggtccagattcaagacgaggtggtcccatcgctgctctggggctggttgccagcttccttgtctggggcgcttccctccacctgtccttctgccccccttcgagtgccagctcgcccatgtctccagcccagcttcctcacggctcacagcctctgagtctccctggatgtcagggaccgcattccgacgggcctgtccggtcacaggagatgaagtccgagtaggaggactcgacctccatcatgcctgtcgcatcgctcctcaggcctggtttaatttctttttcctgcttgcatctcttcagattttccactgttgactaatcagtacgggaattaagaccaaagtttcctcaaaatccagtggtcctcagtcagaagcggaggcagaatttaagaaaccaggattcaaggttagcagtccagacctgtggtgcgggcaggattctcactttaccctcctctctgtctcttccccgtgtctcctaaatgaaaagcactttgaggttttagtgggtgtt

SEQ ID NO: 13047 - DNA, 887 bp, Homo sapiens
ggagcacgggaacagctttcttaaggcctcagggtcctgttttccctggcctcttctagagggcccgtggacaggtcgcagtgcgtgcttatttggaaaccaggtgtgtgagccgaatgcctgccaggccatgcactcagcagaggagcccttgtacctggctgccctgagaggagcaagaggccacctcccatgtggctctagacaccacgtgggctcattagccccagcgtctgtgccggctccaggtgcctgcctctgggtgtgtgagtgggagactttgctccctggcctcatcctagagagaggcccctggtgcctagtgctgaggcctctggggctggaaagcctcagcagaaaggaggcactactgagcaactatgcattgtcattgtcgggtttggggctttcggtggttccttggtgactgggaattgcttgtgtgcatgtgttgggtgcatgcttccgggtctcagctgccccaggcccgcacaggcaaccccttcccatccaaagccattggtggagcttctctggaatcatttgccaaaagcccaaggcagaatccaagggtccaagaccatttccatggagctcatgtttttcttttctgtaggaacttttttttaaccagcacccaccataattccgaaggccacgtttcatctttcctggatcactacagtgaagtattacagttgtacagttcccagtctggccttggcttgctcggataaaactttgtatgtattttgtatggcatagattctatattgtaatgatgtcctatgcaaaaagaaaaattaacgaaattgtaaattttattgttttaacgtgtatgcatgtttagtgacgtttacattttgaaataaaatttatgattcatt

SEQ ID NO: 13048 - DNA, 1442 bp, Homo sapiens
tactcaggcaatccaaattcactcttaactatatatatatacataaatactatatctctatatggactcgtaaaggcatgggtataatggtaccccccagtaaacttcctaatgatttcttatgactgttatcaggctttattgggattaggctaaagttgttagtaaacttataaaaggctgctatggtaacactaaacctaagtggtctcttgtctattagtttggtttgaattattagtactatcctgtagacccagagacatagtttatataagaattgctaaagctgaagttcaacttggctgagtgaagataatcataggttgtgtgagcctatgaaaaagtgtatacgtctaagatttcaaaacaatgggtcccaaagcctaaccactttaagagtttatggagggtacttggcattacagacgattcatacacttccagtgctgccttctttacactgccagttttgacaaaacaggtttgttttttattttacaacaacatatgcctaattctgcaggattgcaagtaactttttaatgcattgtgattacttattggtaatgatagggctgatggcagtttactagatcactggttataatttgggacaaaaactgctacatcaactttcatctcgcccagagtgctcaaggctggtatgatcagtggatcaggaatgcaattgtgaattcctgcccattgcctctcttggtgaatgtggaaatggccacctgggttttcccatatcaggaagggctttgggatggcacctatattggctgataattgaggatgcaaacattccattcattagtgtgatcgagctgttaatttttagactatagatcaaaatgtgaaacattttatgttcaatccatatttgtcttgcacattataaatatatttttattttttagtaatttaggggagggaggagggagaaagggataatgatgcccttggcataattcacaaaagcagctgtgacaacctccaatcagtttacttcatttcaaaactatttccaatcacaaggaaagatttatttaaaatatactcgtacatttcacctgtggatgtctataacttcatcctcagtatgttcccaaatctgtgctggcattgaaaggacaaaacattatactagtgggtttttctactaattattttttgaagcattattttcccaacacaaaagagcttttttctcggtataatgaaaattgaaatcctatgtgtattcaatagtaaatagacaaattttattttttatttccacttgaagagttacatttcgtataaaagtttacaaataacggtttttattttgattttttcagtataaaaaaagttgccttgatggcatattatgatgtaatgctaattgcttgtaggatagtaaatggtcagtattgaaacctaatctctagctg

SEQ ID NO: 13049 - DNA, 1112 bp, Homo sapiens
aaatcgactcgctcggtgttcgcccgccgacgccgcacggcttgctggggctgggctcttcctcgcggaagtggggaggaggcggttgcggttagtggaccgggaccggtaggggtgctgttgccatcatggctgaccccgacccccggtaccctcgctcctcgatcgaggacgacttcaactatggcagcagcgtggcctccgccaccgtgcacatccgaatggcctttctgagaaaagtctacagcattctttctctgcaggttctcttaactacagtgacttcaacagtttttttatactttgagtctgtacggacatttgtacatgagagtcctgccttaattttgctgtttgccctcgggatctctgggtttgatttttgcgttgacttttaaacagacataagtatccccttaacctgtacctactttttggatttacgctgttgggaagctctgactgtggcagttgttgttactttctatgatgtatatattattctgcaagctttcatactgactactacagtattttttggtttgactgtgtatactctacaatctaagaaggatttcagcaaatttggagcagggctgtttgctcttttgtggatattgtgcctgtcaggattcttgaagttttttttttatagtgagataatggagttggtcttagccgctgcaggagcccttcttttctgtggattcatcatctatgacacacactcactgatgcataaactgtcacctgaagagtacgtattagctgccatcagcctctacttggatatcatcaatctattcctgcacctgttacggtttctggaagcagttaataaaaagtaattaaaagtatctcagctcaactgaagaacaacaaaaaaaatttaacgagaaaaaaggattaaagtaattggaagcagtatatagaaactgtttcattaagtaataaagtttgaaacaatgattaaatactgttacaatctttatttgtatcatatgtaattttgagagctttaaaatcttactattctttatgatacctcatttctaaatccttgatttaggatctcagttaagagctatcaaaattctattaaaaatgctttt

SEQ ID NO: 13050 - DNA, 950 bp, Homo sapiens
tttctgctcagaaactcattgattttactctgaagcacccacgaatgacagattcccaggaggggcagagaaggctgagcggcaccacgtggggctggccgcgggttgtgggcatgagcacgcctggagaggccatggggctggtgacaagctctggccagaagaccccaagaaggtctgatcctggggtctgatccaggcctgcggcactgggtcctaggcagactgtctgcctggtgagacgtggaaggagccagtgtccacagccgtctcaggacgtcagagagctcggtggcctgtctccagcagcatgctctccagatgcagcctactgtcgctctccacatagggctggtgcagccacatggacaggtagctcagggtgaggtcgggatccccggtgtgggcaagctccttggccaccgtgcgcttcaggagcagctccttcctgtacatctccaagagcttatgcgaaacctcatagaaatgggttgtaggccacgtgtggaacagagggggtcgtttactctcctccccataatggtagttttctagttcacaaattcccttggtagttgaagacagcttttccattttcacctgtattttggtcaacccatccaaggtggcctgcagttcctcacacagcttctccagttcctcgttatattccagacacaccttttcttcattttccttcgaggctgggctgctgctgtctagttctatcttgtctttattcaataaactgattttcaagttggcaatattatttgcagtggtaaaacctgcatcattgagggtttcccacttcaggattaaattgtgccaatcagccgcattgtccttaatttttcttgcactgacagataagacaggttttctgggcgttacagttccaagagtctttgcttccataaggtccacagatatccgtagaaggagacgcg

SEQ ID NO: 13051 - DNA, 995 bp, Homo sapiens
cctgatggtttctcccagactagaccaaatagccagaaaaatgataggggtcggatgggtgggtaagcccaggatttgcacatgaccttccatccttacctgtattcccatctccccagtgtcactcccctcaccaatcactccagatggttttgggggaaccattctactcttctggtgggctttggggtatccccaccaactttcccttcaaaatagcaccttacaccccatctttgactcagttccccacacccaaagatcccagcctagggatggggtacagggactttaaatagtccctaatccctaatttgcactagttaaccctggtcagggtccctgtatttccttccagtgggggagataaatgtttgctcctaattctctttgaaaactgggcctccctgctctgtgattggataaatatttcccatcccacccacctccccccaaaaaatagctcacaaggggagagcccagtatgggggagcaaatttgacaaatgggaattagaggagtgcagttttaaaaggaaaagttgctgtcatcaaaatggcagccttttccccagctactgtttttggggccaagatggctgccctagcagcaatcactgccaagggcaagatcatggcttttggagggaggtgagtttagggagggccaggaccatcctcctacccctcataccctccccagcatatacaaaaggggaggttttagacaggctccctgaatgttaaccacagaggagtcactccttcattcctcctctgtctctttgcacttttcttggtcttggccacagcctgagtgacgaatttcctactgaatgtaccaagttccaatttttaagggggggaaaggtttcaaatggggaaaaacacacaaaaaaaaaatcactaaaaattcccacaaatcttgtttctggcactttagaaaaactgcaaaaaaatacgtaataaagaatacatatatatatatctacaaaa

SEQ ID NO: 13052 - DNA, 1662 bp, Homo sapiens
  misc_feature (1)...(1662): n = a,t,c or g
tttttttttttcagagaagtctttcatcggtctcatttattgcaatattttctagctttgcatccagtacaacacaatgaagtattacagtgatttttatcattgcatcagcatatacaaatacagatcaaatgcaaataaagtgtgcttacagtggtgatccaaacataaaattgcaaagggaattctctttgaaagtgtaattatttttctccaatgtaccaggtatatatttttctctatgccaggtatacatatttgtcttcatcacatgtgacaaacatttgatgacttgtcactaagtaggattcatttccatagggcaactttgaaatgtgtggtccaaatacagcattccagcacatgacctcagcatcactgggttatagtcatgtacacaaagataaaccaactcgtatatgcgtgagtgcagcccatatacaaatctcactttcagaagccagaaggcaggtgttaatatgccagccttgccagggctcacattgaacttgacacagatctgagagtgtgactttctggaaagcatgctctgtttcagggtgcagtgatgtggaagtttaaggtacatcaaaattcgggatccaaaattgcatcctctgaaaactccgcctgcagggtgtgctgctgcagagggctgcctggatgccaactgcatgagggatacatccccccattctcgcagccaaagttcctcctgggtgcaaaggagaaaccgtctgaacctttgcaggcccatgagcttatacttagttcagagcagttaaaattcactcaaaaataccctcattgcataaagaatgaatatagcctctttaggttactagtgaacaagcgcagaggagttagttaaggcaggannnnnnnnnnnnnnnnnnnnnnnnnnnnnnnnnnnnnnnnnnnnnnnnnnnnnnnnnnnnnnnnnnnnnnnnnnnnnnnnnnnnnnnnnnnnngcaggactatttttaattatttttaatacctgcaaaagggaatctgcacatgcacatccgtgtttctacagaaatctgcgatcgatggcagatctgtttgcctttgtgtgtccacatgaaccatttggcaaaggcatccaatgctaacggggcccaccaactacaacggaggcaacaactctgtggattttctttcacagaaagagtaaaatttcattcaaccgttccattttttgcctcctgtgattctaacaatgaaatttaaataggaaaatgtttcaatcgttggagtaaaacactctttaaaaaaataatgcttcgaaaagtaaagcaaaatcttttaccaaaataattctttcacttttcaaattgttctgtccacgagccagtgtaataaacaagtgaaagaatcacattctgtaggcttaaagaatgccaaattattactttttcgcttgcccttaatttgagtggaaaaagctaaggaaaataaatgactcagaaattccaaaagaagttcaactatattcttttagatattatgtattgttttactctgattaggttactgtgataggcatttattcatattctttctataccactgtcattaatatattaaaaagatgtatgtgttagactatcgaaagggccttattctctctttctcatagactgaccttcttttggc

SEQ ID NO: 13053 - DNA, 302 bp, Homo sapiens
ctgagggccccatcccagaccttaattccaggatgacatttctagacacaccctgggccaaaagggaatccactgccttgaaggggagaacccagtcctggcaggattcatcatctgctgacaaaagagcccttggcctttgaactttcagcagtggtagctgggcagtactcgctgtgggccttgggtgagactcaaagacatgctggcttcaggtgagacccagtacattcccaggcttttatggctatagggggagacctccgtcttcttaaaaaagggggggaagaataaaggagctt

SEQ ID NO: 13054 - DNA, 356 bp, Homo sapiens
  misc_feature (1)...(356): n = a,t,c or g
ctgccatcgtcaactcacaccattccattctatcccaaccccttgcaccctaggccatttcctagctcccgccttcctccaggaattatcgggggtgaatatgaccaaagaccaacacttccctatgttggagacccaatcagttcactcattcctggtcctggggagacgcccagccagtttcctccactgagaccacgctttgatccagttggcccaatgacagatttccctttagacccagcaggggtcggccaactgatggccggctgtcattcatgtgattgatttgtaatttcatttctggagctccatttgtttttgnttctaaactacagatgtcaactccttggggg

SEQ ID NO: 13055 - DNA, 589 bp, Homo sapiens
tttttttttttttttttttcggaaggtctattttaataggaaaatgttttttagttggaacgttttggaaataagataacgcaatgtcttctatagttactcatttacactgaaacgtgatgggtaacttttagggcgtttgcttccagtcactttcccctgactccttgatgtgataattccttccataagatacaaccattctcccaagtgatgcgatgacgagtatgtgcgtgactctggagggaaagggtctacatctgtctctgcttgtgcctcggatgggttttacagtagacgtaccaccgaccccgcctcttcaccaggtaacagtccttgcagcgcttcttaaggacagtcttgtttttgaaccccagcgcaggcagcagatggggcaggaggccgggtgagagaagtgagcgcactgctgccccgggttccacagccacgggggctgcacctcgaatggatccaaatagaaatgtggagagggctcgaggcttcaccgtgtgacgactgagatagagcagagggttcaccattttccttataaaaagatttgccatgttgtggtgaatccggccgcacg

SEQ ID NO: 13056 - DNA, 1552 bp, Homo sapiens
  misc_feature (1)...(1552): n = a,t,c or g
ttcggcagaggccgaacctggcttcgctaacgccctcccagctccctcgggtctgacttccggtttcctcgcgcgtccctggcgcgacccgcggacagcggagccccgttttccggctgagagctcatccacacttccaatcactttccggagtgcttcccctccctccggcccgtgctggtcccgacggcgggcctgggtctcgcgcgcgtattgctgggtaacgggccttctctcgcgtcggcccggcccctcctgcctcggctcgtccctccttccagaacgtcccgggctcctgccgagtcagaagaaatgggactccctccgcgacgtgcccggagcagctcccttcgctgtggaagcggcggtgtcttcgaagaaaccggaagcccgtggtgacccctggcgacccggtttgttttcggtccgtttccaaacactaaggaatcgaaactcggcggccttgggggcggccctacgtagcctggcttctggttgtcatggatgcactggtagaagatgatatctgtattctgaatcatgaaaaagcccataagagagatacagtgactccagtttcaatatattcaggagatgaatctgttgcttcccattttgctcttgtcactgcatatgaagacatcaaaaaacgacttaaggattcagagaaagagaactctttgttaaagaagagaataagatttttggaagaaaagctaatagctccgatttgaagaagaaacaagttccgtgggacgagaacaagtaaataaggcctatcatgcatatcgagaggtttgcattgatagagataatttgaagagcaaactggacaaaatgaataaagacaactctgaatctttgaaagtattgaatgagcagctacaatctaaagaagtagaactcctccagctgaggacagaggtggaaactcagcaggtgatgaggaatttaaatccaccttcatcaaactgggaggtggaaaagttgagctgtgacctgaagatccatggtttggaacaagagctggaactgatgaggaaagaatgtagcgatctcaaaatagaactacagaaagccaaacaaacggatccatatcaggaagacaatctgaagagcagagatctccaaaaactaagcatttcaagtgataatatgcagcatgcatactgggaactgaagagagaaatgtctaatttacatctggtgactcaagtacaagctgaactactaagaaaactgaaaacctcaactgcaatcaagaaagcctgtgcccctgtaggatgcagtgaagaccttggaagagacagcacaaaactgcacttgatgaattttactgcaacatacacaagacatccccctctcttaccaaatggcaaagctctttgtcataccacatcttcccctttaccaggagatgtaaaggttttatcagagaaagcaatcctccaatcatggacagacnaatgagagatccattcctaatgatggtacatgctttcaggaacacagttcttatggcagaaattctctggaagacaattcctgggta

SEQ ID NO: 13057 - DNA, 634 bp, Homo sapiens
ttttacagagagtgcttgtgatttcacgtatttttgctgaactcgtaaaagagacacttggatggtggattaaccagaacactaacattctgtgaaaagtttcaaattggagaatattgaattttcaccctagtccagcagctccgctgctcacttaaatacagatgaatgaagaccccattcggaaagacacctggccagcggtccagagctgatgcaggccatgctggagtatctgccaacatgatgaagaagaggacatcccacaaaaaacatcggagcagtgtgggtccgagcaaacctgtttcccagccccggcggaacatcgtaggctgcaggattcagcatgggtggaaagaggggaatggccctgttacccagtggaaaggaaccgttctggaccaggtgcctgtaaatccttctttgtatcttataaaatacgatggatttgactgtgtttatggactagaacttaataaagatgaaagagtttctgcgcttgaagtcctccctgatagagttgcgacatctcgaatcagcgatgcacacttggcagacacaatgattggcaaagcagtggaacatatgtttgagacagaggatggttctagagatgagtggaggggaatggtct

SEQ ID NO: 13058 - DNA, 1166 bp, Homo sapiens
tttttttttttttgtcatagatttgatttattaaaccaaaattatacatattaaaattatatcacaaatatatatgcttccagacaaagaaaagtttgttagtcctgattttctaatcgtagccactcaaggaacagtcctttcatagtaccccaagtatttcaattagacttataaaagtataagtcaatctatggtcagtgtctttggttaaaaaaaaaaacacaggcagttctttacataaaaacgtcccacacgttatagatgccagccacctcctggtagtcactatggacaactaatgagatgcaaagtcttttggaccgatgatgtctctactactggatctatctgtattaacagcaatgttactctcaatgaaactgcagaagccaccatgaacatggaagaccacctagcagatcggtgagtaggctgcttgttcagctttcctttaacacctgttggtaaatactaatgggagtagacagagttgtatggcctggacagtggaaaccaagagcaggatcgcaaagtaacagcatcagactcttctgccctcctcttgcacttgggttctgactcccagaacaaagaacttgggagaacagtacgggagactgagcagaaaggatgggtttgctgactcgccttgaaatctaactctaacgtaggcagcagtaactcgtctgaacaaatctgattaaataaattcttggggcttacctgtgatgtcacacatacagatctactctccaggaagcaaactcttagcaagttactgccccacttgtaatcactgatctgaaattctcttgttatgaaagaaaagtccttctccccacgaaagacctttaaagacttctacgtatttgaaataccagatactaaggtgtttaaaatgatttctatcattggtaacatcaaacaaaaatagctgcatctggttaagttaaaaagcatcaatactccctcttctggccctacagctgtaccaataggaattctcaccactactcaataacagaaataagtgcctacagccatgatgaatttgtaacattttctcaaattaactacgatttttctaatttcaggtgaaaacccaaggtggtacttcaaacacgcacatgcacacacaaactcaaaaggacagcgttacaagg

SEQ ID NO: 13059 - DNA, 2800 bp, Homo sapiens
  misc_feature (1)...(2800): n = a,t,c or g
gctcttggaactcaatgactctcctgtcttcaaaaccgtcttggaaagaatgcagcgtttcttctctaccctctatgaaaactgttttcatatcctagggaaggcaggcccttccatgcagcaagacttctatactgtggaggaccttgctacccagcttctcagctcagcctttgtcaacttgaacaatattcctgactaccgactcagacccatgcttcgggtctttgtaaagcctctggtgctcttctgtcccccagagcactatgaagccctggtatcccccatcctcggacctcttttcacctacctccatatgaggctttctcagaaatggcaagttatcaaccaaaggagcctgctgtgtggagaagatgaggctgcagatgaaaacccagagtctcaagagatgctggaggagcaactggtgaggatgttaacccgagaagtcatggacctaatcacggtttgctgtgtttcaaagaagggtgctgaccacagtagtgctcccccagcagatggagacgatgaagaaatgatggccacagaggtcaccccctcagctatggcagagcttacagacctgggcaaatgtctgatgaagcatgaggatgtttgtacagcgctattaattacagccttcaattccctggcctggaaagatactctgtcctgccagaggacaacctcacagctctgctggcctctcctcaaacaagtgctgtcagggacactgctcgcagatgcagttacgtggcttttcaccagtgtgctgaaaggcttacagatgcacgggcagcacgacgggtgcatggcttccctggtccatctggccttccagatatacgaggcactgcgccccagggtacctggagataagagctgtaatggagcaaatccctgaaatacagaaggactcactggaccagtttgactgcaagcttttaaacccctccctgcagaaagtggctgacaagcgccgaaaggaccaattcaaacgcctcattgctggttgcattgggaaacccttgggagagcagttccgaaaagaagttcacattaagaatcttccctcacttttcaaaaaaacaaagccaatgctggagacggaggtgctggacaatgatggggtggcctggccaccatctttgaaccctgaatcaagcttttgggcatccttcctcggcctttnttgtcatctcttcttttccctttgtagccgatctctaggcccttcttgcactgccacctcactttccaccactgtcagcctggaaagagatccaggtctggagctggagagaacaggccctgtgcaggaccagaagtaattatactaaagtatcaagaaagggagttagggcttaaactattctgtctagatgtcccagatagttcccattctacttggagatttggcttttccaagaaaagctagagcagagcagcccttctcccacaagccctcccacccccgtgcagccacatacctgtacagaatggtaactaagggtgctgtgcccaaccctgcgactagcaaggctcgcagcaagagcacagccctcaactacttgtgccagagtttctcttggaccactccaactcccactgagcccttttgctgctggggctgggcagggaaactttccccactccctaaggggcatgtctgggttaggtgctaagtgctgaagagaacttggtcagttctctcaactttgctttgggcaagaatctggtcacctgatgggatccatggtacaggctactgctaaacttggcacagtatcaagtatagtacctccaaggaccagggctgggcagtctttagtgctaacatcccctttagagttcacacatcttgcccttccatgaatgacccctcagtctggcctccccagcctcaaggtccactcaggcacaagagccacagtaccctagatagtgtcacatgacaccgttgtcatccaaggataatacagaccaactaggctacatctgtgatgagcagctagcaaagcccgctggtcttctcctaggactaagtccagggtgccttccacaatctcatgggtctttcaggtccctgggttacttttctcaaaggccatttccaaaagaatacatgccttcacatcacaacctgttactgtgagtccattctagaggtcactgaaaggccctgtaaagagaggacatggatacgggacctggccctgaggttattactggccgtaaggcagagttaatccatacagaaaccagtgtgtccatgtgctctgcacaaaaacagacctgttgtccatccagtccactgacaagagggtttccccgagagccgaagtggactgaagctacagtttttagctggtgcgggccacaggcagggtcagattgagaagaagcaaagctggggaagccagaattggggagtcttggtgttgcttccctcttcctgtgtggtgctctgggtttctgtggatcgtgaaggcgatctcaagagtgtttccctccaaacctgatagctgcctattcctgtctggttggggctgtggaggatgtagttgtatttattgcattgtaatatttttaacatcctgtgacttcatgctagaaattttctattgtttatagaaactttttgtagaaacattaactctaaagcacatctgcatgtcagtaaaaatctcagtttcgtacagaaagggacccatctgcctttttcaacctagtcttaaaaccagtgacatactccagggttacttcatgagcacccgggactaaaacaggaagaaatgtg

SEQ ID NO: 13060 - DNA, 1673 bp, Homo sapiens
ggaaaatgctgccttacagatgaaaacaaacttctccatccctttgtctttggtcagtacagaagaacatggttttatatcacaacaattgaagttccagattcttccattttgaaaaaggtgactcatttttctattgtcctgaccgccaaagattttaacccagagaagtatgctgccttcactaggatattgtgtagaatgtacctgaaacatgggagcccagttaaaatgatggagagttatattgcagttctcacaaaggggatatgccagagtgaagaaaacggctctttccttagtaaggattttgatgcccgaaaggcctacctggctggctccatcaaagacattgtatctcagtttggaatggaaactgttatcttacacacagcactgatgctaaagaaaagaattgtggtgtatcaccccaagatagaagcggtccaggagttcaccaggactctgcctgccctggtgtggcaccgacaggactggaccatccttcactcttacgtgcacctcaacgccgatgagctggaagccctgcagatgtgcacaggttacgtcgctggatttgtagacttggaggtgagcaacagaccagacctctatgatgtgtttgtgaatctggcagagagtgagattaccattggctccccttgcaaaagaggccatggcaatgggcaaactgcacaaagaaatgggtcagctaattgttcagtctgcagaagatccaggagaaattcagaggagccacgttatacaggatattgctctaaaaacaagagaaatctttaccaacctagcaaccggttttcagaaggtttcggctgaatggagaaaagagagtccttaattttggaagggcgctaaagcaaaaacgatttccaccagcaacagagaactttcctcttatcatctagcagcagccgaacaaatgctgaaaatctgactgtgtgacagaacgtatcactgatgactgatagaaagccctctttcactctgattacccactcactacatgaagtcctgaaaataacagagaaactgttatatctttttaatgatttatttgcaagtattgagatttgacctgaaaaacaatgaaacacatgaacacacttccgattttctcctcgctgattagcttcctgcctgctgtcagtgctggacgaagtgctataactactttatgtaacattacagaacagctagaggtcctggggtaagagaaaaaaagcacatcacaacaaatgtgaaagccttcattattacacgttccagtttgtctcgctgtgtaggcataagctaatggtttattttcagaaagctgcctgaaacgttgctttgtattcttctaggaagaactttaattcctcctgaggaactctactttctgagccaaactgctaattttctgcggaactgtctagaagatcattcaagagaccctgcagttgcactttctcgtaaaagttaaaaaaaaaaaaaaaaaaaaaaaggtttttcccggcctttgaacattttgcctatgagagttttgcatatattttatacttgagtagacaactttaataatccatatttatactatcgcagaagtaagcatttggcaaacgttcagccattagcactcatttaaccctgttagcaatattcttttgaaaaaa

SEQ ID NO: 13061 - DNA, 1654 bp, Homo sapiens
attggctgagatatgaacatattgttgaaaggtaatttgagagaaatatgaagaactgaggaggaaaaaaaaaaaaaaagaaaagaaccaaaaacctcaactgcctactccaaaatgttggtcattttatgttaagggaagaattccagggtatggccatggagtgtacaagtatgtgggcagattttcagcacactcttttcccactgtttaaggagttagtggattactgccattcacttcataatccagtaggatccagtgatccttacaagttagaaaacataatcttctgccttctcatgatccaactaatgccttactcttcttgaaattttaacctatgatattttctgtgcctgaatatttgttatgtagataacaagacctcagtgccttcctgtttttcacattttccttttcaaatagggtctaactcagcaactcgctttaggtcagcagcctccctgaagaccaaaattagaatatccatgacctagttttccatgcgtgtttctgactctgagctacagagtctggtgaagctcacttctgggcttcatctggcaacatctttatccgtagtgggtatggttgacactagcccaatgaaatgaattaaagtggaccaatagggctgagctctctgtgggctggcagtcctggaagccagctttccctgcctctcatcaactggaatggaggtcagcatgtctatttcagcttcgtttatttttcaagaataatcacgctttcctgaatccaaactaatccatcaccggggtggtttagtggctcaacattgtgttcccatttcagctgatcagtgggcctccaaggaggggctgtaaaatggaggccattgtgtgagcctatcagagttgctgcaaacctgacccctgctcagtaaagcacttgcaaccgtctgttatgctgtgacacatggcccctccccctgccaggagctttggacctaatccaagcatccctttgcccagaaagaagatgggggaggaggcagtaataaaaagattgaagtattttgctggaataagttcaaattcttctgaactcaaactgaggaatttcacctgtaaacctgagtcgtacagaaagctgcctggtatatccaaaagctttttattcctcctgctcatattgtgattctgcctttggggacttttcttaaaccttcagttatgatttttttttcatacacttattgggaactctgcttgatttttgcctcttccagtcttcctgacactttaattaccaacctgttacctactttggactttttggcatttaaaaacagacactggcatggatatagttttacttttaaactgtgtacataactgaaaatgtgctatactgcatactttttaaatgtaaagatatatttatctttatatgaagaaaatcacttaggaaatggctttgtgattcaatcctgtaaactgtgtattcccaagacatgtctgttcctacatagatgcttagtccctcatgcaaatcaattactggtccaaaagattgctgaaattttatatgcattacatgatatattttacaattttttatcattgcattgtccttgtaaaggttacaagccttgcacaataaatatgtttaacgggttaaaaaaaaa

SEQ ID NO: 13062 - DNA, 810 bp, Homo sapiens
ttttttttttttttgaaaaaaaccagtttattttgagatcagtgaaaagagtctaggccacagaaaagaacagctctttaatgcaagttaaaatgtgtaaatgaatgaccgggacactgagcaacctcagatgcagacttccatccggacactggtgtggcttcagtaccgaggctgctaaagctgccagtcacaacccagcatgtcaactggttcctcatgctctgtttggtgtggaaattcacatgtgccctgacactgaggaagcaattgcttaaaatcactttccaataacagctgataaaatattttgcaggtttgtcatgcaaggtttatttattaggtggctattcaaagtttgtatagcaaccacttaagcagaactaaattaatattcactgagcactgtaacgatggaagagggcttttcctaagggttgggttgggagttgtgcttctgtgaaattaacatctctcactcattgccaagattctctgcttaaaaatattagttttctgtgctgttgcccaaaatagcaatttaagcaaatgtagtgccagaatgacacatgagcctcggactcagggaacagttccactgactgtggagtacaactattgcattcttttccaaaattcagactgatgtaaaagactgaaatacaatgttcttaaggatctgataaacatggctgggatgaaaagaaaactgagagggaagagtgcttttcacagtgcaattcatagcagcgttcaaaaacttggttatgaattgacttgaaggtggacagagcttaagactggaaaaac

SEQ ID NO: 13063 - DNA, 863 bp, Homo sapiens
ttttttttttttttagaagtgcacggctgataggcttttattacagactgggggcggtaacggctggacagagaacggaaaaggaacatctgagaccaggctcaaagctagggggttacacaacctccaataacacaaggtgagtgcagcacttctagacacacacacagacacacatcacttactcataaacggcacagcctacggtacaagaaaaagggcaaggtaggtaagggcacccaacaccctcctgcctgcagggggccacagggttaatgtgccttcctgcacgcaggcttaagagggataaacaaggagagggctgcccttggagaaggcctgcggataatagtgactgaggcacaggtccatgcaggggaaggaagcacagttcacagagtggcaagctcagtgccagccagtgcaagcaacaggcagttctttgatcctggcttagtcacagcaaacatttacccagcctggctcttctccatagccagcaggttgcttgctcatccagtctgtccctggtcagcgggcatgtgctcaaggagaacaaacacagttcagcacaggactcagctgagggtcactaaaggatcatagactgtgagggtgggaggtcttggtttagaggttgagtctagtgcagctgatcacctggggtctagtgaaaatgcagggtcagattcagtgggtctggggtctgaatctctaaggcgctgccaagtgatgctgatgctcctggcttgtggaccaccctgtgtatagcaaagctctagactaggaggtctcaaccttggctgcacagaattatctggggagtttttaaatttcccagtgcccaggctgcattcatatca

SEQ ID NO: 13064 - DNA, 3319 bp, Homo sapiens
gaattcggcacgagatagttttcaggttaagaaagccagaatctttgttcagccacactgactgaacagacttttagtggggttacctggctaacagcagcagcggcaacggcagcagcagcagcagcagcagcagcagcagcagcagggctcctgggataactcaggcatagttcaacactatgggtcctcctctgaagctcttcaaaaaccagaaataccaggaactgaagcaggaatgcatcaaagacagcagacttttctgtgatccaacatttctgcctgagaatgattctcttttctacttccgactgcttcctggaaaggtggtgtggaaacgtccccaggacatctgtgatgacccccatctgattgtgggcaacattagcaaccaccagctgacccaagggagactggggcacaagccaatggtttctgcattttcctgtttggctgttcaggagtctcattggacaaagacaattcccaaccataaggaacaggaatgggaccctcaaaaaacagaaaaatacgctgggatatttcactttcgtttctggcattttggagaatggactgaagtggtgattgatgacttgttgcccaccattaacggagatctggtcttctctttctccacttccatgaatgagttttggaatgctctgctggaaaaagcttatgcaaagctgctaggctgttatgaggccctggatggtttgaccatcactgatattattgtggacttcacgggcacattggctgaaactgttgacatgcagaaaggaagatacactgagcttgttgaggagaagtacaagctattcggagaactgtacaaaacatttaccaaaggtggtctgatctgctgttccattgagtctcccaatcaggaggagcaagaagttgaaactgattggggtctgctgaagggccatacctataccatgactgatattcgcaaaattcgtcttggagagagacttgtggaagtcttcagtgctgagaaggtgtatatggttcgcctgagaaaccccttgggaagacaggaatggagtggcccctggagtgaaatttctgaagagtggcagcaactgactgcatcagatcgcaagaacctggggcttgttatgtctgatgatggagagttttggatgagcttggaggacttttgccgcaactttcacaaactgaatgtctgccgcaatgtgaacaaccctatttttggccgaaaggagctggaatcggtgttgggatgctggactgtggatgatgatcccctgatgaaccgctcaggaggctgctataacaaccgtgataccttcctgcagaatccccagtacatcttcactgtgcctgaggatgggcacaaggtcattatgtcactgcagcagaaggacctgcgcacttaccgccgaatgggaagacctgacaattacatcattggctttgagctcttcaaggtggagatgaaccgcaaattccgcctccaccacctctacatccaggagcgtgctgggacttccacctatattgacacccgcacagtgtttctgagcaagtacctgaagaagggcaactatgtgcttgtcccaaccatgttccagcatggtcgcaccagcgagtttctcctgagaatcttctctgaagtgcctgtccagctcagggaactgactctggacatgcccaaaatgtcctgctggaacctggctcgtggctacccgaaagtagttactcagatcactgttcacagtgctgaggacctggagaagaagtatgccaatgaaactgtaaacccatatttggtcatcaaatgtggaaaggaggaagtccgttctcctgtccagaagaatacagttcatgccatttttgacacccaggccattttctacagaaggaccactgacattcctattatagtacaggtctggaacagccgaaaattctgtgatcagttcttggggcaggttactctggatgctgaccccagcgactgccgtgatctgaagtctctgtacctgcgtaagaagggtggtccaactgccaaagtcaagcaaggccacatcagcttcaaggttatttccagcgatgatctcactgagctctaaatctgcaatcccagagaatcctgacaaagcgtgccacccttttattttccgtcaggtgccaggtcttagttaagattcacaatctttagaaagaatgagattcacaataattaactcttcctctcttctgataaattccccatacctcccaatccaagtagcatctgtagctacataacctatatacctccagcagctggacatggggagcgacagtcctatctagacatcatacacatttgccaagaaaggatctctggggcttccgggggtgagattcaagcaggacaataacaagaggctggacaccctacagatgtctttgatgttttcagttgtttgatatatctcccctgtagggcatgttgaggaaggaggagggctgatcaaggccaagctggtctagcctgacatcctagctcctgactgaacactatagacttcccagcagcatttcacccagcagccagagccggctttaagtccccaacccttacagacaccactgccaccaccaccaaccacgaccaccaccaccaccaccactcaccaccatcatcacctccggaaagtgtattcctgccctaaccctaacccaagtcacccccgacagtaaattttaccttcatgttgagaaagcttcctggtgcttaatcaagagctggagttcaatgagtcctagacagtgagagggggcctgagcttcagctcaattggaagcctgctgtgtgccacaagacggaaaagtggaagaagctgcagtgggagacaaagcctcggtcccccacccatccacacacacctacactcacacacgcgcacatgggcgcgcacgaactaccatttcagggcagttcagtggggcaaggagggaaaggttaagttaagttaccattacacaccttaaaagatgaggagaattcatccagacatattacagccagtttggggcccctgacttgcaatgtgaaacctcttcgcttgctgctaggtttacaaacaagcccattgtcctgtgcctcctaatatcatttgtactgaagaccccatctggggacttgaggactttggtcccagcccagactcctcagacttttctctcagttggggatgcttcactcgctgggggtgtttgtttgccctctcatttttcagtacttcttacagaattttctctagagtcagtcattatggaaatgtacttccctcca

SEQ ID NO: 13065 - DNA, 431 bp, Homo sapiens
gtggtctgatcttcctgcggctgaacccgcccggctgagccgacattgccggcgtcttggcgattcggcccgacgagctccgctttcgctacagcatggtggcctactggagacaggctggactcagctacatccgatactcccagatctgtgcaaaagcagtgagagatgcactgaagacagaattcaaagcaaatgctgagaagacttctggcagcaacgtaaaaattgtgaaagtaaagaaggaataatctaccctgactaaagcttgaaatgctacatttccaaggtgaagatgtgtgggcacatgttatggcagattgaaaaggatctcattccatgggaaaaaaaaaaaatcctgtcttgttcataaattgacaatgtcaataaattgaaatatggttcactgttactcttgaaaaaaaaaaaaa

SEQ ID NO: 13066 - DNA, 1114 bp, Homo sapiens
cggctggtttgattcatccattttgaagagacgggggagcggggggctcgtctgttccaggagccctgaaccaaagagcagcggagtttgagaagccagcagctcggggttcggcagcagcggtcccatcggctgaagttcggggggggtggggcgccgagcgcgcggggcgttggggggtcctggtctttggcttctcgactcggtcctgtttcgacagcgaacatgtcgcggcctgtcagaaataggaaggttgttgattactcacagtttcaggaatctgatgatgcagatgaagattatggaagagattcgggccctcccactaagaaaattcgatcatctccccgagaagctaaaaataagaggcgatctggaaagaattcacaggaagatagtgaggactcagaagacaaagatgtgaagaccaagaaggatgattctcactcagcagaggatagtgaagatgaaaaagaagatcataaaaatgtgcgccaacaacggcaggcggcatctaaagcagcttctaaacagagagagatgctcatggaagatgtgggcagtgaggaagaacaagaagaggaggatgaggcaccattccaggagaaagattccggcagcgatgaagatttcctaatggaagatgatgacgatagtgactatggcagttcgaaaaagaaaaacaaaaagatggttaagaagtccaaacctgaaagaaaagaaaagaaaatgcccaaacccagactaaaggctacagtgacgccaagtccagtgaaaggcaaagggaaagtgggtcgccccacagcttcaaaggcatcaaaggaaaagactccttctcccaaagaagaagatgaggaaccggaaagcccgccagaaaagaaaacatctacaagccccccacccgagaaatctggggatgaagggtctgaagatgaagccccttctggggaggattaaaagtgatgatggtctggggagagattttattaaaaaaaaaaagaaaaaaaaagaaaaaagagggaggaaaaaaaagaacctacttaagatagaacatggttttggctatggcttgactcatgggctttcagtgcttttttccatttgttgaaagtaa

SEQ ID NO: 13067 - DNA, 2389 bp, Homo sapiens
ttttttttttttttttttgactgttttaagatcatttattagaacagtcattcagaagccattgagacatcaggcagcagaaaggaaggtgggatggagcaggccctgtgaaggaccaagaacaaagtaatagccacagttatgaaatttcattttattctgataaagactaatatatgcttgataacctagtgataatccataagtttggtatttcacaacattttttagaaagcacataagattaacattcaaataaggcattatagaaagttttataaagaatgaagtgtttcctatatttcttttaaaaaaccttggttcatcttgaaagatcgatgaattttttaaatatcagaagaaaagggaaataaaattttccccccaaaacacataagaaccacttactggcacttgtattttaagtacctgggaaaaaaacggaacagatttttaaaggcaataacgacttgtaagacggcttgtttcatttgatttggcacgaagtaaagtaagagtaaatatgccatggaagacataatcaagtttttcctccatctctcatatttccccacttctaccagaccacacagtacatcagcaaccatcctttagattccaatttttaaatggctgctcagacgacaccaatagagttctttctccttaaaatatggtggcagtgaatgctaacaggtatcaatttctttgatcaggaacaaagaactccttcaggaaactcactttcctggtccttgttaacctatcatgtaaattctttttattggtacacctgtttactaattataattgattgctatttatgccaagggagcatttcccaggcatgcctcatctatttactaacaacaaagtatgcttactttatttacatagtgccacgggtttctcttttttcttctcttttttattggcgggggagatggtactataacttgttatttatcagggcagatcacacatttggatcaaaaagaaaaaccagcaagtagatcctaaaacacatttcttaacctgagtcataactgaaaacatagactttaattacattttgttgaaaattcattcaactttggtgcttgtaaaagcacttatgtcaatttttgacacaaatcataaccctcagtacacaggtattttcaaaggaaacaagtcatcttaaagtaatatttttctatatgctaattgatacatctttatagcaaattgaaaattctgagtaaactgaaagtatgcttaacgacaaaataaatacagcatatatggttaacatatacatttcttagtgtaaaggcagcagtgaatttgtgtctcacaataaatctgtaaatccagttgctttctttctggaattttatatagtgtctcaccatgttccacaatgctggaaatgtcttttttggcatcaatctatgcacaaatttctgattacgtattttctccaaatgacatgtaactttttttaacttttccagaaaaatatggaaactttatcaaccacttattaactgaacaaaaagttagattactaccaaatgctcttttaattttgctctaacagatgttttaaaggttcagacatcgctgatgtttttgaggataactgcatacaacacactagatgatttcaaacgatgcatcttagtatccgaatcatttggcacatccttagtatccaaaataaaatcagtagaaataaaagtaatataattttcaaagaattcatacatactagaagtcttaggaaaagcagcttctaaatgcaaggactaggaggtttgcccatcttactattaatagttacacacatttctcctcatggagtaactgaagctttctggcttctttgtggaaactttagtttgtaggaaagcatatacatagggccaaatcttgttggtttctgttccggagaatgtttccagcaccccttttttctggtaatattccaggactggctttgtttggtcttcataagcctttagtctcttgataaccgtctctggtttatcatcctcacgctgaatgagaggctccccagtcaggtcatcaatgcccacagttttgggagggttgaattcaatgttatagactcggccactggcgggatgaatccagcgagcagtaaggcgttgtttaatgacctcaaagggcacattcaggttaatcactgtgtcgatctgataagctctatctagggcttctgcctgtggaagtgtccttggaaaaccatccaacagccagctatactgggtgagatttttcagctcatgaagggccagccgagtcatgacatcatctgggatgagtttcccttggtcaatgaaagccttggctaacacgccaatttctgtgccccgcagcatgt

SEQ ID NO: 13068 - DNA, 2278 bp, Homo sapiens
ggaaaacgccctctgcggtgaaggagagaccacactgccatgcctccctctgggccccgaggaaccctccttctgtcgctgctgctgctgctcctgcttcgcgccgtgctggctgtccccctggagcgaggggcgcccaacaaggaggagacccctgcgactgagagtcccgacacaggcctgtactaccaccggtacctccaggaggtcatcgatgtactggagacggatgggcatttccgagagaagctgcaggctgccaatgcggaggacatcaagagcgggaagctgagccgagagctggactttgtcagccaccacgtccgcaccaagctggatgagctcaagcgacaggaggtgtcacggctgcggatgctgctcaaggccaagatggacgccgagcaggatcccaatgtacaggtggatcatctgaatctcctgaaacagtttgaacacctggaccctcagaaccagcatacattcgaggcccgcgacctggagctgctgatccagacggccacccgggaccttgcccagtacgacgcagcccatcatgaagagttcaagcgctacgagatgcttaaggaacacgagagacggcgttatctggagtcactgggagaggagcagagaaaggaggcggagaggaagctggaagagcaacagcgccggcaccgcgagcaccctaaagtcaacgtgccttggcagccaagcccagttgaaggaggtgtgggaggagctggatggactggaccccaacaggtttaaccccaagaccttcttcatactgcatgatatcaacagtgatggtgtcctggatgagcaggagctggaggctctcttcaccaaggagctggagaaagtgtacgacccaaagaatgaggaggacgacatgcgggagatggaggaggagcgactgcgcatgcgggagcagttgatgaagaatgtggacaccaaccaggaccgcctcgtgaccctggaggagttcctcgcatccactcagaggaaggagtttggggacaccggggagggctgggagacagtggagatgcaccctgcctacaccgaggaagagctgaggcgctttgaagaggagctggctgcccgggaggcagagctgaatgccaaggcccagcgcctcagccaggagacagaggctctagggcggtcccagggccgcctggaggcccagaagagagagctgcagcaggctgtgctgcacatggagcagcggaagcagcagcagcagcagcagcaaggccacaaggccccggctgcccaccctgaggggcagctcaagttccacccagacacagacgatgtacctgtcccagctccagccggtgaccagaaggaggtggacacttcagaaaagaaacttctcgagcggctccctgaggttgaggtgccccagcatctgtgatcctccgggaccccagccctcaggattcctgatgctccaaggcgactgatgggcgctggatgaagtggcacagtcagcttccctggggggccggtgtcatgttgggctcctggggcgggggcacggcctggcatttcacgcattgctgccaccccaggtccacctgtctccactttcacagcctccaagtctgtggctcttcccttctgtcctccgaggggcttgccttctctcgtgtccagtgaggtgctcagtgatcggcttaacttagagaagcccgccccctccccttctccgtctgtcccaagagggtctgctctgaagcctgcgtttcctaggtggctcggcctcagctgcctgggttgtggccgccctagcatcctgtatgcccacagctactggaatccccgctgctgctccgggccaagcttctggttgattaatgagggcatggggtggtccctcaagaccttcccctaccttttgtggaaccagtgatgcctcaaagacagtgtcccctccacagctgggtgccaggggcaggggatcctcagtatagccggtgaaccctgataccaggagcctgggcctccctgaacccctgggcttccagccatctcatcgccagcctcctcctggacctcttggcccccagccccttccccacacagccccagaagggtcccagagctgaccccactccaggacctaggcccagcccctcagcctcatctggagcccctgaagaccagtcccacccacctttctggcctcatctgacactgctccgcatcctgctgtgtgtcctgttccatgttccggttccatccaaatacactttctggaacaaaaaaa

SEQ ID NO: 13069 - DNA, 1090 bp, Homo sapiens
tttttttttttttctgcaagctgctttattttttattttcatttacattagaaaataatctctcccttgcttgattttacaagggtaagggtggtcacatgactgacagagacaaccatggtgacacagctcttttcagctgttcatcaccagcaacctggatttcctatgcccagaacagcaatgcactgaactcaagtacaaattaaatttaatcccaactttagtccagtctgagattagcgcattcaaagaatctgtcataacgtttactatagactcttgtcgcccacagaatcagtttccagttcgtgtgtgacatgttctattgttgaatcagtacagagttcttatgtgtgtgagttttctatggtgactacacaaaacctcaggcttacaattgtggaggtcagaggtcaaggtgctggcagggcaggatccttcctttcctccatcatgggggctgctggcagaattcagtttcttgcagggctgggacggaggtccccagtcccagctgcttaggggccaccacactcctcggccctcctctaaggccagcagcgcaggtgcggccctcctcgggttctaacctctcctgcttctggcatctctcagactcagcaggaaaggctctcaagctttaaagggcccatggggctgccctgggcctgcaagatgacctaggacaatctccccatgtgaggcactcacaaggtctgggggtcacaacacgggcatcttgggggccattatcctgcctacctcaccgtaattccagggtccttgacatttttcgtaataaaaagtttaaaagtggtaattacagaactataaagctgcatcggatgccccagccccatcaccctccagggccattcccctcacacctgccctcccctgcagcactgagcgaatcccagacactgcagagccttttccagttcacgtctctggaagagcccataaaacagaaacagtataaaccatagtgccattcattatcttacccagaagtttaacggtcatattttaacatcaaatagggactcaatgttctgagttccctgctcgtctcagagtcttcaat

SEQ ID NO: 13070 - DNA, 3575 bp, Homo sapiens
  misc_feature (1)...(3575): n = a,t,c or g
tttttttttttcaagtgtaaaagctagagatttattgttattttatgattaataaattgtcaaattagttatgacactatcccacactgaataccaccatttgccagtacagaagtttttaaaccaaactgaggcataaagcagaaagagcaaagacacatgaatacccttcttaacaatctcttctacttatgcctccaccgtaacctttgtacttgttttcctcctggggaaagtgtcagaacagtgcaaggactggtgggtaacctggcctcttaacctttttaatagcaagcaacatacagaagtaatgcaatcaacttgtatttcccttgattttattggtctgaattcattttaggttactttaacattttaatttcctgtaactgtacatgagagaatataatcacctaagagaatactgaaccagagtcagccaaatgtatcactgaccctcaattatgttttaattggtcctaaaggaatgtaccaccccaacagtttgggagttaggcaaacagaattctttgggggagggaagaaaaaggctataaaacagccaaatgtactcaacatcattaaaacggctctttgtttttcacccctgaatgatacttctttactacactatatgcacagaaatcctaacagaatcttggttgccagtattatttaagctggccccatccaggacagattccgctgccccngcgcgnnnanncgtccccctttctctgaggctctgaaaagcacaatatttaactatttcttaatagaactaccaaaacacttcagaaacaattggctcacaactcattttaaatttgtgtattgcctgtgcatgagaaaacagataaacccaaaagatagttctatttttttatggcgattaaaaataactgaaacatcaagacactttttcagtgaaagcaacatttcaattacaaattttaatgcctgttaaactacctatgggagaagctgagaagtcctaggcaaatgcactttggggtatactacagtgttccttcagtctgcacaaagattaaggtaatttacagtcaatctgtgaatgaatgttgagacaatgttacattatgtgtctgtacaattaattgtccttaaagagataaccagaatcagcttttctactgtattttcaacaaacctgactaaccggcacttttgctgggagatgtttgtcaaagatgctgtaagattctatacaattaggaaatactcagctttaagagtattttcttatcttcactttttttagttaccgggtgttttgctccagagggcctattgcagtatgtttccagaaatgcagtcccaaatgtgcatactctatattgtatacaaataaaacaaaattatcagtagtataaatcttacagcattgtttgcaaaatgcatgccaaagtcacactaagcatactgtacacacattatagagtgcaaatgatttgcttctttttaatgcttttattctacataaattactaccataggctaatgtttaaaaagcaaataaactggacagatgcaggacaaaatctggtcacccaactataaaaggtgatgtttttaaaaaattacaataaatgcagaagtgatgcatgcagtagccttaattcccactgttccagaaaagaaaaatacagaaaaacccacacatcttactgtactccaccttaaaatgtatcatattgggtttgtttataacagcacagaattccaagagtcaaaatgaaataaagcaggtattttaaagtttaagagccgttatcaaaaataaattacattttttcaagatacagaaatgctgctatgatgggctggggagccccggtaacctttcaatagctgcattgatatcacctcctgttgctattagagcttgcaagtttgcttcacggttcaaaaatcccattgcactgagttgttccagttgttgctgaaatctgacttctggattctgtagctgaggatttactccagcaagagcctgcagcatctgctgaataaactgctgatgtccaggttcagtggttcctgctgtgggacttgtgttttcactaggtgtggcgttagatccattagttcccgaagagcctccagtgcttcctaatgcccccaagccaggagtaaaccctgggatgaggcccggggcttccgttgctaatgtctgtaaaccctgctgaatctgtaacaaggcctgcattgctctagggtttgacattgctgatagtgtatcaggattctgcatttgttggaggaaagttgggagctgttgtctcatttgttcttgaagctgaggatttccagcaaataggggattattcagcatcatctgtgcagcaaggtcaggattctggcttagtgactgcatcatgcttctcatgtagggggcagacaacatgttttgcataagttgtgggttttcagttatttgttgcaacaagctctgcattccctggtgtgttgaacatactagctcctactccaggcaccaaatttggcgcagtagtactctgcccagaagtgccactggcagtactaccagtagtgccacccacagtgctggcagtgccgctggaagctgatgaactctgggaagtctgtggagcccatggattgggtagtggatctctattttctgtacgggaaggttgactaccttcaccagaggatgtattgctcaccaaggaagcaaatggattaccaccaaactgctcttgtgcagcactcagcattggttcctgaatatctgtgtacatgcgccttaaagcattatatccccctgggatgctttctaggttgctcaaagctcggtcctggttcctcatcatctcctgcatcattgctggattcctggcaaggttccaacgtttgtcttcattatatctggattattcaacatatgactaatttctgggatttctctgtatcaactgctgcatttgtgggattggccataattaactgtctcatcaggtcaggatttgagagcatgctctgaacaaagggattttccatgatctggaccatccatttccagggttagaccaaaagttgtcgctgcatctgactctgtagttcagagaagttggtagtattcaaacccaagctactcagacctgcaagtcccccaaggccacctaaaccaaaagggttgctagtagcagaaccagatgtagagttacctattaggagttgatgatgtagtaacattgcttccagctgtatttgtttgcctgagctgaatgatcctgaggcctgttttgtgttttaatgacaaggtgaacagtaagtccatcatgaattccatgctgactcaaggtatcttgatctttcaaaatttttccagcaaatatcaacacaagttggtcagtatgtgatttaaaacgtttagagatttcttccttaaactgctggacggagctattctcgggcacggcgaattcctccttttccttcggggtcttcacggtgactttcatgattttgggctccgcggaggcagcggccgcgggggcgccagcacttcggctccggcggcgctatcc

SEQ ID NO: 13071 - DNA, 965 bp, Homo sapiens
aagaaatttttttgctgtgaaaaccaaccaggaacatttattaaaaaactaagcaagttatccccaagagggtgaagcaccgctggctggttctgacattcgattcaggctgaaggcacggcaactcctccagcccttgctgggaaatgtcctacccaggccacgggcagtgccccagtgcagctgggtcccctaaaagcccccaaacacatgatcccaccaaaggcttgaacagagcaacttcatcaagcaggcagggaccacacctgagacacaagggcaaggaggtaaagcacaggggaccgggagtgggccagggacacccagcccccgtctccaactggcgccccctccaggggggctaacatgtggcgtggggccaccaggacctgtgcttgcccctggtggcggaagagctaccctccctcttgggtggtggggggatgttgtctgcacacagctcagacgaccgagggtacaggaagaatcaaactcagtcaaccattcttcaacccaactgggagtctgtgaggcctggcacacaggtgctcaataaacacttgtggcatgaagaagtgaaggaaccgatcttgttcatctctgtgccccagcactcggcatgtagcccatgatcgaaaatgcagactgaacaactgtcacactcttttgtatcactagtgcccggcacacagtcagtgctcttcaggtgtgtgggaaagaagccaatgagtgagaagttcccacaccgtctagcagtgaggaaaaaaagaaaaaagtgaaaagtaccttgtttactcccattcccatcccatagctcagctccctgcacacagcaggtgctcagtaagtgtaccgaatcaggaacttatctttgtgacatgagtgccaggcacacagtaggtgaccaatatgtgcttgaataaatggatagaagcatcttatttatctcaatattcccagagcct

SEQ ID NO: 13072 - DNA, 511 bp, Homo sapiens
ggcagcttggctaaaagtaagggtgtcgtgctgatggccctgtgcgcactgacccgcgctctgcgctctctgaacctggcgcccccgaccgtcgccgcccctgccccgagtctgttccccgccgcccagatgatgaacaatggcctcctccaacagccctctgccttgatgttgctcccctgccgcccagttcttacttctgtggcccttaatgccaactttgtgtcctggaagagtcgtaccaagtacaccattacaccagtgaagatgaggaagtctgggggccgagaccacacaggccgaatccgggtgcatggtattgggcgggggccacaagcaacgttatcgaatgattgactttctgcgtttccggcctgaggagaccaagtcaggacccctttgagggagaaggttatccaagtccgctatgatccctgtaggtcagcagacatagctctggttgctgggggcaaccggaaacgctggatcatcgccacagaaaacatgaagg

SEQ ID NO: 13073 - DNA, 1486 bp, Homo sapiens
gagtttgtgccccgacttaatggagattgccttaaaaaagaaagatgtacagttgttacaactctgtctacagcagttccctgacattcctgaatcagtcacctgtgcttgcttaaaaattttcttgagcattggtgatgacagtcttcaagaaacagatgttaatatggagtcagtttttgactatagtataaattctgtacatgatgagaaaatggaagagcaaactgaaattcttcaaaatggcttcaatcctgaagaagataaatgcaataactgtgatcaagagttaaataaaaagccccagggacgaaacaaaggagagcacttcatgccctgtggtacaaaaaagagcagctctacttaatgcaattcttcattcagcatatagcgagacatttcttctgcctcatttgaaagacatcccagcacagcatatcacgctgtttcttaagtatttgtatttcctgtacctgaagtgtagcgaaaatgctactatgactcttcctggaatacacccacctaccttgaaccagattatggattggatatgtctacttctggatgcaaattttactgttgttgtaatgatgccagaagcaaagaggctactgataaatctttacaagcttgtaaaatctcagatatctgtttattctgagctcaacaagattgaagtaagttttcgggagctacagaaattaaatcaagaaaagaataatagaggattatattcaattgaagtgctggagctcttctgatattatcaattctccttcatagacattttataaagctcttttatgtgaactcttgcttcatccaggcaagaacggtgttttgtttgcgaccatctcagtgtcaagagaaacgtgtcagtgagtacctggaccatcacttaactgatgctccggggtaggactgcaggtttcacatgaacctgttctaggctgtggacattggtgtggagaggttctgcaattttttaaaaatatgtaactgggttgattttaagtaaaattatttgtgtattgataaaattcaaaacacatgataagaaattagacttttatcaatacacaaataattttacttaaaatcaacccagttacatatttttaaaaaattgcagaacctctccacaccaatgtccacagcctagaacaggttcatgtgaaacctgcagtcctaccccggagcatcagttaagtgatggtccaggtactcactgacacgtttctcttgacactgagatggtcgcaaacaaaacaccgttcttgcctgagattttacaagcttgtaaagatttatcagtagcctctttgcttctggcatcattacaacaacagtaaaatttgcatccagaagtagacatatccaatccataatctggttcaaggtaggtgggtgtattccaggaagagtcatagtagcattttcgctacacttcaggtacaggaaatacaaatacttaagaaacagcgtg

SEQ ID NO: 13074 - DNA, 1719 bp, Homo sapiens
gtgagcggcaacatggcgtccaggtctaagcggcgtgccgtggaaagtggggttccgcagccgccggatcccccagtccagcgcgacgaggaagaggaaaaagaagtcgaaaatgaggatgaagacgatgatgacagtgacaaggaaaaggatgaagaggacgaggtcattgacgaggaagtgaatattgaatttgaagcttattccctatcagataatgattatgacggaattaagaaattactgcagcagctttttctaaaggctcctgtgaacactgcagaactaacagatctcttaattcaacagaaccatattgggagtgtgattaagcaaacggatgtttcagaagacagcaatgatgatatggatgaagatgaggtttttggtttcataagccttttaaatttaactgaaagaaagggtacccagtgtgttgaacaaattcaagagttggttctacgcttctgtgagaagaactgtgaaaagagcatggttgaacagctggacaagtttttaaatgacaccaccaagcctgtgggccttctcctaagtgaaagattcattaatgtccctccacagatcgctctgcccatgtaccagcagcttcagaaagaactgggcgggggcacacagaaccaataagccatgtgggaagtgctacttttaccttctgattagtaagacatttgtggaagcaggaaaaaacaattccaaaaagaaacctagcaacaaaaagaaagctgcgttaatgtttgcaaatgcagaggaagaatttttctatgaggagcagggaaaacctgaggtgcttggaggtccagacacaagaagaggattggaaccagttccgatacagcacaatggttggtctgttcccccagtattagaataaattaaaacatacaagccaggatgaatgaagccaataggaaataaaaaacaggcacacaacattatttggggaaaaacacctctagtgacacattttcttcatctgcgactgattatttcagcaaaagaaatctagtatgttttcatacatctgatgtataaatttgctgaactttgagttagttttcttaagataatttttcatattaagaaaattttccttttctaacctattaaaatacctcactatcatttcaaaaggttaaatgagttgatcactatctctgctctgtgctcctcaaaatataatttcaaatggatccgatctaaatctatacctagtgcagatttgcaaaaaaagaaaaggaatagtcattaaggatacctgttaccatggccgcgattgttagcacttcatctacacagtcaaattcacaggacgctaagatagacttcgagagttgtggatcaagaggaaactctgacatgatgattccaaattcagaaagatttccatcattatccagtgctgccagataatctaagtcttccaatgcctgcatcaaactttctggtgctaggaaaggaaaaaaataataatttaagagtctcatatggctaagatggagaaacaggtactggacttttccctcctgcatgaaacaagcaaacaatggacaaaatatgtgaaacaacggtttgcaagccaccaaataccagggagtgaaggatagtgattcttgagagggcaaactcaggaggggagccctgtgattgtccagctcatgctccgaggagggtcccagctgcagtgtgcatgcgggggga

SEQ ID NO: 13075 - DNA, 626 bp, Homo sapiens
aacagcggaccatatttctagagatgcttttttgaagagaccaataagcaataaatatatgtactttatgaaaaatcgtgcccggagcaaggtattaacttaaaacttctacccaatggattcaccaagaggaaggagaattcaaccttttttgataagaaaaaacaacagttttgttggcatgtgaagctccagtttcctcaaagtcaagctgagtacatagaaaaaagagtaccagatgataaaactattaatgaaatcctaaaaccttacattgatcctgaaaagtctgatcctgtaattcgtcaaaggttgaaagcctacattcgctctcagactggggttcagattttaatgaagattgaatatatgcagcaaaatttagtaagatattatgaactagatccttataaaagtctcctagacaatttgaggaacaaagtgatcattgagtatccaacattacatgtggtattgaaaggatccaataatgacatgaaagttcttcaccaagtgaagagtgaatctaccaagaacgttggcaatgaaaattgagcattttttctggaagaagaaagtgaaaacttccagacaactgcagcagactctgcattgatgggctggtg

SEQ ID NO: 13076 - DNA, 1487 bp, Homo sapiens
ctttcctccaaacccctaactccctccagacacccagggaataccctctgccccacaggattgaagactgcttggcagtcctcccaatcccacacctcctgtttgccaggggaaagaacctaaagacttcgtgtgattgggaggggtggcagacaggaagaaaacatgtccaggcccctggtctccatagagaatggtgctttgtccaagaaaacgtatgagtttctgattctccgggagccgttcaatggtgaggttgatgggaagacttccttcccaaagaaaatagatcctccatgcaggatctaggagagtgactgggtgtgccaaaatatgcccagggtcctgccctcagcactagatttaatggggccaagagggtccaaaccccttgctaacataccacttctttgtttaactcctttacctttccagccctttgaggagggaccatgagaacagaaattaccttatgaaaagctacttctgttcctgctttccctctcacgtattgacggtttatttctttgacctcccagagggctgaactctttcaactctgcgctgcccagccttctcagtggacttgcccctcctaagcagagaaggcctatgaggttgcttgctgctgggaagcctggcagagccaattaccaccctctgctgcttagtgcttgggtacctcttgcaataaccagctcttagttgttccctttccctggggcttttccatttaacacatgggagcccttcccccagaaggctacttccttgttttagaggaaggtactgcccattgggagatggggacattgggacctcagcaatgaagaacccttgtgaagtaaccaggaggaatggggaaagaagcaagttgggcaggatatggcctacttccataggcttttcttttttcaggtttgatgtaagcatgggcttacatcccccaggtacatacttttacttattgtgggataacctggcactagtaggcaggtaaagtcacaaatttggtgtcttttcaccttttgactgttgacttaatagctcctctcactctgcctggagatacttcctgcctcagatgaggagccagaagaaacagagcccgacttgaatgaactcagctcagagttctaaggacccagcattctgggggccattttctctacaggcaaatggaattgcttttccataacatccaaattgtaatgtggttgctgctgaaggaggaggcagcagcgaggtcctgcggtacccatggggtgatgctacttctgcatgcatctacagggcatctgacacctaacatgagacgtggcatgtgagatgagacttggcatgtgagacatagggtcactagagacccttctgggtcagaggagagagactgaattggactaaacccgtcctctgttcccagcacgtttctcatatagccctcagtcactgagggagtcccccgcaggattggagaggcacattcc

SEQ ID NO: 13077 - DNA, 617 bp, Homo sapiens
  misc_feature (1)...(617): n = a,t,c or g
cccttgtcagtggaggtggagttcggaggtggtgcggagctcctgtttgacggtattaagaaacatcgagtcactttgcctggacaggaggaaccctgggacatccggaacctgctcatctggatcaagaagaatttgctaaaagagcggccagagttgttcatccagggagacagcgtgcggccaggaattctggtgctgattaacgatgccgactgggagctactgggtgagctggactaccagcttcaggaccaggacagcgtcctcttcatctccactctgcacggcggctgagggcccttctctgggcctggggcacccttagaggggagaacgaagcaatcagacatccccttggggccctgcttccaggtctccctgtcccccttgcctgccttcttccctgctctgtcccctaagctccctccaggcagggaaaagaggccaggtgctaaaaatgagcctttctcaagcacgtgagcagcggaaggcagacaggcgccagagcccagcactcccttttccagcagctgtggtggggggagggttcccttccagtttgttcaagagtttgaaggaggctctnttgggccaggtgacctgggttgcnttcc

SEQ ID NO: 13078 - DNA, 1557 bp, Homo sapiens
  misc_feature (1)...(1557): n = a,t,c or g
gatctcagtgcctcaggctctgaggtactctgctcacaggccccagacagatgctgttgggtaaactcaaagcttcctatgagaagcttctgagatgtagcaggtcacagaagtgttcacctgtttcatctgaggatttcagctctngcaagtgatctaggcatgtttggtaaaaatgtttttgtgagagttctttttttaagaaagcattatgcaaaaagtcacttttaagggcatttaaaaatttttaagtaaagccattctttggcttttttggactatttgtggatactttgtttacattttgaatattaaaatgtgcatcatcttgtcggccatgcagtcctgcaggcatcagtgccctggctgtcctgtgagtcctcatgcagagcagggccatcatggtcagcccttgtgagtaagtgggtatacgctgaagctgacttccgtctgtgtcctgccctcccatccagcactctctatggaaatagttgtcatttcctcagtgatggtgtgtcttatagtgatggttgtaatggtgaatggctagtgtcattttgtttaattttgttttgctttttgatggtggataagatgaaattttagctgtttcagcatcaatccaacttaaaagcatcttgggactttgttttcccttccaaactaaaagatcaagggcatgtattaggacacaagcatatttgctggcctcaactcctctggacacccatattaggaaaagggcctgccaccaaagcaggagctgcacactcctaacccttctcccagggtgtggggtcccttgacgtcatgaagagctattgcaaggtgcttctgtaccttttcccagcctggaaatggagggtgactggccctggctcctgctatgagaagataaccagcctcattttctcagtgccccagaggtctaggataggatttctaaactggaatcatccttaatcaccttgaagatcccttaagaggcatttgactggtgctgccgtctgtgtcctcaaagcaatgctggtggcagcgtcctgtgtacacatgcagagctaatacccaaactaaaaactgggtaactggccctgaagtgcttcccaatcagtaagcccacagggaaatgtttgatttttatgttctggtggatttttggtttgcttggcatatctaaaggtgcctttacttttcttttttttttttttctttctgctttgttttgtaggacttgttctaacatggaaaacaagtccagaagactctcctctgactgttacctttgccccaagccaccccaaacttttatgctcatgttttattaaagcaggtgctccctggaatctctgggacatttttgaggcatttgaagcagaatatagagtggtctcatctccttccttaatcttcctggtggttgggatgttccacttgtatcatagatttttttattacagatatgctccactgtttttaaatgtgaacttgtgcgcaaatgtgcagattcaatgttcttgttacagattgaataaatttttattttgaagatgaaaaaaa

SEQ ID NO: 13079 - DNA, 1060 bp, Homo sapiens
  misc_feature (1)...(1060): n = a,t,c or g
gctgactccctctggtttccggtcaggtcggtcggtccccactatgggcctggagctgtacctggacctgctgtcccagccctgccgcgctgtttacatctttgccaagaagaacgacattcccttcgagctgcgcatcgtggatctgattaaaggtcagcacttaagcgatgcctttgcccaggtgaaccccctcaagaaggtgccagccttgaaggacggggacttcaccttgacggagagtgtggccatcctgctctacctgacgcgcaaatataaggtccctgactacttggtaccctcaggacctgcaggcccgtgcccgtgtggatgagtacctgggcatggcagcacacgactctgcggagaagctgcctccgggccttgtggcataaggtgatgttccctgttttcctgggtgagccagtatctccccagacactggcagccaccctggcagagttggatgtgaccctgcagttgctcgaggacaattcctccagaacaaggccttccttactggtcctcacatctccttagctgacctcgtagccatcagggatctgatccatcccgtgggtgctggctgccaagtcttcgaaggccgacccaagctggccacatggcggcagcgcgtggaggcagcagtgggggaggacctcttcccaggaggcccatgaggtcattctgaaggccaaggacttcccacctgcagaccccaccataaagcagaagctgatgcccctgggtgctggccatgatccggtgagctgggaaacctcacccttgcaccgtcctcagcagtccacaaagcattttcatttctaatggcccatgggagcccaggcccagaaagcaggaatggcttgcttaagacttgcccaagtcccagagcacctcacctcccgaagccaccatccccaccctgtcttccacagccgcctgaaagccacaatgagaatgatgcacactgaggccttgtgtcctttaatcactgcatttcattttgattttggataataaaccgtgggntcagcctgagcctctgcttctaaaaaaa

SEQ ID NO: 13080 - DNA, 1102 bp, Homo sapiens
  misc_feature (1)...(1102): n = a,t,c or g
cagcaaagaaggggagaagcgcaaccgtagtctgcctcagctctacagcaggatttaagctctggagtcagactgagttgtaatcctagctctgccctcttgaacaagttacttaatcttgctgtgccttggtttcctccgttttacaaatagcgtcatctcatagagtttttctgagagggaaatgtgaaatgctgcctccagtgcctgcacagtgtctgctacatgtcagctcttaccctggggaaaaggctggtctgtgtgtttgctgcttagacagtggcaagtccgtgttctctagaagagcctgggagatcaggaagactgaacctgctgccgtgctccgtttctggcaggtttggacatggcacctttctggctgtgcctggaaaccatttaccagaaagtgacgggcaagggagctgagatacgagggcctgatgggcaaacccagcatcctcacttaccagtatgccgaggacctgatcaggcgacaggcggagaggcggggctgggccgcccccatccggaagctctatgctgtgggtgataaccctatgtctgacgtatacggcgccaacctgttccaccagtacctgcagaaggcaacgcatgatggggcgccagaactaggggccgggggcacacggcagcaacagccctcagcaagccagagctgcatctccatcctggtgtgtacaggcgtctacaatcccaggaacccacagtccacggagcctgtccttggaggaggggagcctccattccacgggcaccgagacttatgcttcagtccagggctcatggaggcctcccacgtggtgaatgacagtgaatgaggctgtgcagctggtcttccgcaagagnggctgggctttggagtgagggcagtgcggtggaggtgagggggtgagcctggacctgtgggcgagtcccatttggctgggctctggcctgatcactgggctcaggtcagggcttggttccctttgccacccttcttgctgccccatgagtgtggcattacttggtcactttggaagaagacaagtgactcttttttcacattgctggggtaacatttttgtatgggaacggtttg

SEQ ID NO: 13081 - DNA, 666 bp, Homo sapiens
tgttgcttttataagacagagctgagaaagcaaagcttggctgtcgtcttggctctggtaccacccacgagatgcgggcgattctcagctcagggcgtggaggcgtggtgtgggggagtctatttgccatttttgtttgtcagcagggggcaggggttctcaaagattgcaaaatgctgctgcaggtcaggaaggttattttgggtgcctgtgggggaggtgaaacaaggtcccatgactgttttgcagaaccttgtctgtggagggtagaggttgcggcaggggcctgtgggccttacttggtgagaaggtaggtctagctggctccattcagtatttgagacatttggaatttgtctgcatttaaaaccaagagatcacacacacctgtctggatttggagtttctcttgaaaactcgccagtccggccgtctgagcctgcactgacgcctggtgaagctgtgcaggggccgcccctctccctttcgccacagtcctctccactccctttcgcctctccctggcctgctgcactcactgataggaaattctgaccccagactcggagcagccttcccgtggttcggtttttgcttccgcgaaaaagccaaaggccttggccagagagccagctgttcctacctctaccccacgcttccaaggca

SEQ ID NO: 13082 - DNA, 1485 bp, Homo sapiens
  misc_feature (1)...(1485): n = a,t,c or g
cttttttttttttttttttgctgctggaacgttttattaagttaagaggttcagggagcagaagagaaacaccttttgggtggctctggcggttctgcacccagcacagcctcgaaggaggctgtggggccatggaggccagctgctagctccctctgtcctgagccccatggtacgggtccaaatggggcaggaagtgttagtaggaggtagggcaggaagagggtggcaggctcccgcctctcccctgtagagacaccccgccatggctgctgcctgggcctccgccagacctctgggccagggccaccagctcagaagcccaagcagagggtggctggagacagagggggaccagggttggaggcacacagccaccaggaattgctttttttttttttttttaaagtataaagtgttttggaaaaaaaggaaaaaaatctatataaaaatctcttcacatataaaatcctgaagaaggtgcaaggtgagacccagtgcgaggggcgtgctcagatatgcagtgtgtgtgtgtgtgtgtgtgtatccgtgtgtacatgtgtgcacgtgtgtgcatangtgtctntgtgtgtntgtgtgtgtgtntgtgtgtntggtgggtgcaagtgcacgtgtggcccacagagggtggggagaaagcttggctttttacttccatccaggagggaaggagggcggctggtcctccagcctggagggtctgcagctgggcgggacctctactcagccaggctgttgcgcatcgactccttctcctggagggcggccatggcaagacgcaggtgctccttcagctgctcgatctcccgctcagaccgtgtcttgatgtggctcagctccacatagacgtcctggtactttcccgaggtgaagcgcttgtccttctgcatcatctggagctcgtcccggaggcactgcacctccttctttaggtactggagttcgttttcttttacgcgaagcagcacctctagctcgcaggaactccgctcgttcgcgcccgcagccattgcccatgccctgcgaggcaatgaagccgcgcagctggtctatctcctctgacaggcggccatgcagctcctggttgtggcgcagcagctcctggccctcctgctggcagcggcgcagcgtgtgctcgcgctcctcagcctgccgcatgagtgccccaatctccaggcacttctgcgagtactgctccgatagcacctgcagctctcgcttcagtgcctccacatctgactggtgctgcttccggaggccatccgggccctgctggagactccgtgttttgctcagctctcggctcagctcttcctggtaggccttattcatggcttcaatggctgaggccgtggctgccgtctcctcagccaggagccactccttctccttntgcaggcgctagcantcccgctcgtggtgccgctgcagctcctccantcacctgctggtgcgaggactcca

SEQ ID NO: 13083 - DNA, 683 bp, Homo sapiens
aagcagacagtgaagaagggggcacgtatattctgggaggaggaacactgaagtggcttcgggagttgggggacagaatgcactctgttcccacacttggttcctccacacctcctccctgtggggcccaggcctccctgactgctttaaaacctgtggtcctgtatctctttcagatcctggctctgcagagagaacagcccagaaaagaaagttccccagccctccacattcttccaatggccactcgccgcaggacacatcaacaagccccattaaaaagaaaaagaaacctggcttactgaacagtaacaataaggagcagtcagaactaagacatggtccgttttactatattgaagcaggcactcaccacaggaccctgttgatgttgtaccgcaggatggacggaatgatttctactgctgggtttgtcaccgggaaggccaagtcctttgctgtgagctctgtccccgggtttatcacgctaagtgtctgagactgacatcggaaccagagggggactggttttgtcctgaatgtgagaaaattacagtagcagaatgcatcgagacccagagtaaagccatgacaatgctcaccattgaacagttatcctacctgctcaagtttgccattcagaaaatgaaacagccagggacagatgcattccagaagcccgt

SEQ ID NO: 13084 - DNA, 1283 bp, Homo sapiens
caatttttaatttttgttaatatcaacagcaaaagcctagtgcattgggagatgtgcaacctccctgaaaatcttttctgtttctggagtacttcaggggtggcctctggccccagagcctttgccacagtgctcccaccagcccccacctcatccgtctgtttgcagagcctcatctacaggtccccacgctgccttctttactcactctgcgcttggccgttttgttatttggcttagtctacattgggcggaagtctgtgtgcacagagtgggtgttccttcgagccccttccactcagagggccacacccagcgatgccagtgaaaggtgggcacagcctctcttcagtttctcctgactgtgatctcactggggtagaattcccctgagagaattccctcactcacggctccctttgccagagtcagtcaatcaggtctgatgtgagcaatttacacacttgtctcagaaagtccctcagggtttgtagaggactgcaggggggcatccgctgcagactcagcctttctctgcagccatcctgcagtgggggtgagcggggcacaggctgagaactgctcttgggtggtggaagcaggtgtcacggtgcaagtctccccctgcacccctcccccagcttgagccgtgtcacccccctctccctccagcatgggcctgtgtctcaggctctctggaaggtggccctgccccggaccctcttgcaggtgtcctggtttgacttggaactagatggccatctttccaggctttggtggcccaagagcagtctgggtggatggaagtggctgtcccctcctctccagcccctgccccacccactggtggaggtgctaactagcagggacgtggcataggatgggagctgggcgtgaggtgcttggggtccattctttgtccctcagcttctcagagtccggccagcccttgtgttcccgtgccccacactttcctcctccccactgcagtgagtcaatagtccagggtggggcctggcctccctgccctgattggggactcaggaggtgaggcccttggggcttcctgccccctccttgcccaccttgcctgcccccgggcagcacgggagggagagcagggtgagcacgcttgttggtttcagatgcactttctgcttgcattgccgtatctgtgcgttccttcatcctggtcctggctttatggaacaccatgtttttagcatgtttttaaataaaaacggataaagtgtcaaaagcacaaaaaaaaaaaaaaaaaaaaa

SEQ ID NO: 13085 - DNA, 1254 bp, Homo sapiens
ttttttttttttaactagtcaaagtagcttccatttattcacagttttaaaaacatttttcaagtttagtcaacttcccaatataatcaaaggacaaaatggcaataaaaaatatacttcatcagatcttagagttatacaatcagttaaaaaatagatattgggttttaaacaactgacatatgctttccttttccccctttaaaggttttcagtagtctatctgaaatcactgaatcacttttcttctcctccacagaattcagaactttttcacccggaactggagaaggagcactccgtcattagctgaggggaatggcaaggatccaggggtcctccatgactacacaaccatcctcctgagcacctttaggaaatccaatgctgtctgagaagcagcagggccagatccagatctatggaaaattaatatctgcagtgcttcctgaaggtcacctcagtctttatgccatttcaaaagctagcccggggcttgagaagaaaagggaagtggcattccagccatatttggggtgcaatttaattttcattgcgtacctcatgaacaggggcaataacacattctaggacattcttccagcccacccactcttcctctttctcttcttctctttctctaacgagtggtagtgacaggatgcaagtctgcgctcttggtagataaacggagaagcaggagaaagaactattccataatcagttaaacggggagttttcagaatcctgtcttgtcatttaagtgacttactgaagtcctactaagttattgagactatatttctttactttttgcactgggacattgaagcattgagacaccagaagtccaaaagacgaaaaatgtgaaaatcacaaatttaaagaaaatgtagaggtctcagttctgaaacaccatgcttcaagtgttgtcatttttgagaacatttttaaaaggcatctaatattccaggacatacggttcccattactggcccagcaggtacacagggtctcccactttgatggtccctgggttttccagcacaaaatactgcccaaagagtggtgattttccatataactttcgttctgaagggtcacactggcgataactcttcagtgtttccagcggttccttcctgctcatgacaccggtgtctgggtccactgtggttaaaatgcatctggaacaagccatcacccttttcagttccacgtcaccaataagaagctcatcccaagaatcctctg

SEQ ID NO: 13086 - DNA, 1010 bp, Homo sapiens
  misc_feature (1)...(1010): n = a,t,c or g
ggctcagttccgccatggcctccttggaagtcagtcgtagtcctcgcaggtctcggcgggagctggaagtgcgcagtccacgacagaacaaatattcggtgcttttacctacctacaacgagcgcgagaacctgccgctcatcgtgtggctgctggtgaaaagcttctccgagagtggaatcaactatgaaattataatcatagatgatggaagcccagatggaacaagggatgttgctgaacagttggagaagatctatgggtcagacagaattcttctaagaccacgagagaaaaagttgggactaggaactgcatatattcatggaatgaaacatgccacaggaaactacatcattattatggatgctgatctctcacaccatccaaaatttattcctgaatttattaggaagcaaaaggagggtaattttgatattgtctctggaactcgctacaaaggaaatggaggtgtatatggctgggatttgaaaagaaaaataatcagccgtggggccaattttttaactcagatcttgctgagaccaggagcatctgatttaacaggaagtttcagattataccgaaaagaagttctagagaaattaatagaaaaatgtgtttctaaaggctacgtctccccagatggnagatgattgttcgggcaagacagttgaattatactattggcgaggttccaatatcatttgtggatcgtgtttatggtgaatcccaagttgggaggaaatgaaatagtatctttcttgaaaggattattgactctttttgctactacataaaagaaagatactcatttatagttacgttcatttcaggttaaacatgaaagaagcctggttactgatttgtataaaatgtactcttaaagtataaaatataaggtaaggtaaatttcatgcatctttttatgaagaccacctattttatatttcaaattaaataattttaaagttgctggcctaatgagcaatgttctcaattttcgtttt

SEQ ID NO: 13087 - DNA, 1838 bp, Homo sapiens
aggtatagctatgcttttgattttataagtgattttgtcatctttctaaaaacgagaacgcaaagactgtcaggagctgtttttattatgaagtgaattggggtctatagaaggggaggataagtaaagttggagactagaactcaacatataaccagccgataaacgttgctgttagaatcacttctgtgctctgcaaacttttattttctcccagagggaaaccaacttcagaacagttttagataaagctgtgcagggcagatggacaagtgaaagaatgttaccagtctcatcgtgacaccatcgtgcttttgtgtaaggccagagcctgagctgaatgctgccatcccttctgctaatccagcaaagaccatggcagggcagtgaggttgtaaatgtcttaaaatccttattgtcaaatcttgatgaagtaaagaaggaaagagagggtctggagaatgacttgaaatctgtgaattttgacatgacaagcaagtttttgacagccctggctcaagatggtgtgataaatgaagaagctctttctgttactgaactagatcgagtctatggaggtcttacaactaaagtccaagaatctctaaagaaacaggagggacttcttaaaaatattcaggtctcacatcaggaattttcaaaaatgaaacaatctaataatgaagctaacttaagagaagaagttttgaagaatttagctactgcatatgacaactttgttgaacttgtagctaatttgaaggaaggcacaaagttttacaatgagttgactgaaatccctggtcaggttccagaacaaatgcagtgatatagtttttgcacggaagacagaaagagatgaactcttaaaggacttgcaacaaagcattgccagagaacctagtgctccttcaattcctacacctgcgtatcagtccttaccagcaggaggacatgcaccaactcctccaactccagcgccaagaaccatgccgcctactaagccccagcccccagccaggcctccaccacctgtgcttccagcaaatcgagctccttctgctactgctccatctccagtgggggctgggactgctgcgccagttccatcacaaacgcctggctcagctcctcctccacaggcgcagggaccaccctatcccacctatccaggatatcctgggtattgccaaatgcccatgcccatgggctataatccttatgcgtatggccagtataatatgccatatccaccagtgtatcaccagagtcctggacaggctccatacccgggaccccagcagccttcataccccttccctcagcccccacagcagtcttactatccacagcagtaatatgtctgctcagcagctcagctgattcagatcagagggaaagaaataccaaccctgcaataagtgtactaaactctacgctctggttaatgtaatgtactctcctggactgaatgcagtgtataatttctgtctacagctagaagctgtgccccagttccacatttgattacacatgtgagatttgctgctgttgcagtataaacactaggtataataggatttgaaattgcattacagttcataaaaattgaaaatgagaaattaaacctgcaagtgaaacatttgaaacgattatactttctacataagacatggttgggacatcagatacttacaaagatggtttaagtatggatactagagaaaattaagttttctttctctttggtttattgatttggtttaatttccattatgctattttgcataatcaaggcactgtaaatcttataattttaaaataaattacttaagaac

SEQ ID NO: 13088 - DNA, 1330 bp, Homo sapiens
  misc_feature (1)...(1330): n = a,t,c or g
ctgctgtgagtttacacaaatgattccagagcagaatgaaagcagaaagctgttggttacaatattcttttaacctctctgcagcattttacacttactgggaaccttatgattcaccgtaagagtggaaatatacctgagttcgtgtcctaatggtctctaattcacattggatcgtgggcaaatcacctcacctctctgagcctgttccctcctcttagaccatctctaaggaccacttcatctatttacacatcatttgcttgaacattgctgaacatctgcgtgaacttggcctctccagcccttgcaggtggaaacagctgtgtcaaggctcaagggttcacgctgaggggacttggagggagggggcttctgcattaagctttcctggtgaagacccttgatcttgtccaaagccctgtgtctttgactggcttctcttcagagtccccgttgtcatcgtaagacccttgctgtttggagggtggtcttgtgactgtggcagctgctggccgctggaatgaggagcctatctccatcctccagtgtgactcaggcagagcattgagaattcccagggcagaaatccttcctgctcaggctttcattctaaaactacagtcttcattaaagctgaactttctgggtagctgagcttatatgcccggcatctgaatgagagctctctttgtaactgtgtgacttgagatctagtttgccagctcctgggaaacaatacatgtgttcttgtttgtgtttgctcagcaagcagatgtctgagatgtaagaagcttttcttttcctgtggcattgattctgacttagagctgaagtaaagatcactgaaacatcacgtcaagttgaagtcactcataggtctttgtcctttaggcaggacaggagagtcattaagaagcatttcactgtagcattctatcacaatatcatctggaattgttttctttgcccagaaagccttaacttgcctctagagaatccctggtattacaacgatattgcggcattagaattccaactcttctgctgtggaagtttgaagcgaagctgcagcaaaaccagagaatttcctcaagtggcctgtaggctccttgttatcttatgcccccacccctccctcaacaatatgagtgatccagaactgggcccaaacacctcagctctgggtcccttttttgcccttcttgggccttactctgttgttcaaaggcactttggttgctccggatgctttcgaacagncatggaaagtaggcntgccctgggatttttaggaggggccaggcatttngacaggaaggggtttttt

SEQ ID NO: 13089 - DNA, 292 bp, Homo sapiens
ggtttaatagctttatattttagagcaattttaggtttacagcaaaattgagagggtacagagatttcctatatagttgttgtccccacacatgcatagtctccaccattttcaacatctcccaccaaagaggtacatttgcagtaattgatgaacctacactgacacatcattatcactcaaagtccacagtttacattagggttcactcttggtgttgtacattttagggggttggacatatgtacaatgacaggtatttataattatagtatcatacagagtagtttcg

SEQ ID NO: 13090 - DNA, 2763 bp, Homo sapiens
aagcctgtgatggagtcgtacacactcctgctgagcccaccggagactcaagatgaaggctggacccttgcgctgtccctggctctaacctacagactggggcctggctccgtcttactggcccccaggtctccatggagactgcagaaacccccgcctgctggaggcctgccacactcacagttaccagctagacagtggggcttactaagacaagcaggacctaaaacagtgtctcccctgggaacctactccccacccagcatttgctaagtctgatcacagggaggttattttgtctctctgtctcggtttctctgagccactgagacagatggctgtccgctttgaggctctgcagagctgttggcaccccatggtgtgtctgcagtgttctgggcacatgcatgggcacccatcgttgagagtgcagctgggaagaactctgaaccagaagtcatcagagctgaggcatggccttgaacatgtcactcagtctctggggcttctgtttcacaaatgcatgagggggccaccagcccagtggctttaaaccaggggcaggttgtccctccaggcagcattggaaatgtgtgtgtgttgagggggtcacagtgactgtgggggcacccctggcatctagtgggcatcccacaatgtgcagaacagtctctgacagcaaagaattggtccattcaatgccaattgtagtacctttgagacattctggctgagccaatgccttctccctgtcagagtcccccagagcagagagggtcaggcttccctggaccttggctcccagagcaagccaaaataaagactacactgttgccttgggggcttgtcggggccagggccaagacggtctgcgtgctgcagggccaggacagaaatagccacacatgccggtgagaacaaagagcctctttctttctcatgttgacatcgactttctgtgccaagtcctttgggtataaggatgctagggaattcctataggcaccaaacagaaggaaagctaggggcttggactactgggtataggacttgctctagctctcaggtcctagcccaagctcaatgcaaacacagcccctccggcttctctgtttctgtgaggttctggaatcccttcctctgtgtccgtgagtctgacagaatcgatgatgttcccttagagctgggaaatccatgtgtttattcacggagggaactcaccattacctcccttgtcttctttgcctgccttgggagaaatccagagtctttcgggaatgggcaaagggcagctcctggatttccctggaggggagggcactagctgagggaagtagctcccttcattcatgatgcacagtttacgcagcagacacacaactgcgcctactatttgctcggtgccctgcaaggtgctgcctaactttgatttgttatttcagctctctccaggatagtgccaaatggtgcaatgggaaacctgttttgctggggggctctagatcactggctccagaactcccggctgccagggtagcccctaccccccagcccccttgctcctggacagcagtgggtctcacctttagcctctgccccccagttctggtctgacccaacagaggggctctatgatattaagaaggggcccttcctgctctgtgcctcaacctattctccataatagggagtctaatcctattccttccctgcctgatgaggatggtgtgaggatgaggaggacggcatctcatttggggctttttggcagtgggcctcattttaatcctgcagggctgcctgccagtggatctatccagctgcttccttgtagccaagaatgagttcaatgaattgtgattcactgattttattgattttgttttaaaacagggagactggtatttttgaagctgctatcattttctatttctttattaatttctttgtaatcatcttattaaagttttcttatttagtgggagagggagctttgtttaagtttggaatttgcctaaggcagaagttataaggcttcataaccttttgtatgtattgccaatatttgaaacttgggagattacgtataaaaaatacctagttttctgggtggaggatggggcatgctgtcatctcaagtctgctgcggctcacccccaccacctttaccccctcccccgcccttcccatcccccactgcacttcactcatgtaagacgtctgcccggtgctggtccaggcgggcatgtgagtttgtagcctctgctccaaaggatggtttacacattattttttcattaccttcagtattcctgtgaatggttcaagagagaaagtcttcatttactaagatttgggttctgcctcccaagtgacaatacggggctgagatccctctcagcttctttgagatgtggccaccataagcatcatcgttgtagggacagtctcattgctgtcttctagcagacagaagagttaggtgccagaaaggacaatcttgatggtgggtcccctccctgaaggactttaagaaggcataaaggggttggggtggagggtggcgtgtgaaggaggaggcccttgattaggtcagtggtccctgggagccatcggcgagagcctccagccgggtgacagtctgggctctcgggtactaatctttctaatatggcagtggttgtggcacttctgacttgaattgataattctcatatctaataaaaccaagaagtacctcgttgatatcttaaaaaaaaaaaa

SEQ ID NO: 13091 - DNA, 580 bp, Homo sapiens
  misc_feature (1)...(580): n = a,t,c or g
gaactgcagtaagtcccgcttggccctggagtccacgcggattttcgaagctggggctggcaagagggccgcgtggacaccacgctccagtcgtcagcccacttcctagctgaacagcgcgaggcggcggcagcgaggccggggtcccaccatggccgcgaattattccagtaccagtacccggagagaacatgtcaaagttaaaaccagctcccagccaggcttcctggaacggctgagcgagacctcgggtgggatgtaagtggggctcatggccttcctgctctccttctacctaattttcaccaatgagggccgcgcattgaagacggcaacctcattggctgaggggctctcgcttgtggtgtctcccgacagcattcacagtgtggctccggagaatgaaggaaggctggtgcacatcattggcgccttacggacatccaagcttttgtctgatccaaactatggggtccaacttccggctgtgaaactgcggaggcaccgtggagatgtaccaatgggtagaaactgaggagtccagggagtacccgaagaatgggcanggtgaaaaaaggaa

SEQ ID NO: 13092 - DNA, 1695 bp, Homo sapiens
tgttcatatcctaaagatagacttctcctgcaccgccaggaaagggtagcacgtgcagctctcaccgcagattggggcctagaatcaggcttgccttggaggcctgacagtgatctgacatccactaagcaaatttatttaaattcatgggaaatcacttcctgccccaaactgagacattgcattttgtgagctcttggtctgatttggagaaaggactgttacccatttttttggtgtgtttatggaagtgcatgtagagcgtcctgccctttgaaatcagactgggtgtgtgtcttccctggacatcactgcctctccagggcattctcaggcccgggggtctccttccctcaggcagctccagtggtgggttctgaagggtgctttcaaaacggggcacatctggctgggaagtcacatggactcttccagggagagagaccagctgaggcgtctctctctgaggttgtgttgggtctaagcgggtgtgtgctgggctccaaggaggaggagcttgctgggaaaagacaggagaagtactgactcaactgcactgaccatgttgtcataattagaataaagaagaagtggtcggaaatgcacattcctggataggaatcacagctcaccccagggatctcacaggtagtctcctgagtagttgacggctagcggggagctagttccgccgcatagttatagtgttgatgtgtgaacgctgacctgtcctgtgtgctaagagctatgcagcttagctgaggcgcctagattactagatgtgctgtatcacggggaatgaggtgggggtgcttattttttaatgaactaatcagagcctcttgagaaattgttactcattgaactggagcatcaagacatctcatggaagtggatacggagtgatttggtgtccatgcttttcactctgaggacatttaatcggagaacctcctggggaattttgtgggagacacttgggaaccaaaacagacaccctggggaatgcagttgcaagcacagatgctgccaccagtgtctctgaccaccctggtgtgactgctgactgccagcgtggtacctcccatgctgcaggcctccatctaaatgagacaacaaagcacaatgttcactgtttacaaccaagacaactgcgtgggtccaaacactcctcttcctccaggtcatttgttttgcatttttaatgtctttattttttgtaatgaaaaagcacactaagctgcccctggaatcgggtgcagctgaataggcacccaaaagtccgtgactaaatttcgtttgtcttttttgatagcaaattatgttaagagacagtgatggctagggctcaacaattttgtattcccatgtttgtgtgagacagagtttgttttccctttgaacttggttagaattgtgctactgtgaacgctgatcctgcatatggaaggtcccactttggtgacatttcctggcccattcttgtttcccattgtgtggatggtgggttgtgcccacttcctggagtgagacagctcctggtgtgtagaattccccggagcgtccgtggttcagagtaaacttgaagcagatctgtgcatgcttttcctctgcaacaattggctcgtttctcttttttgttctcttttgataggatcctgtttcctatgtgtgcaaaataaaaataaatttggg

SEQ ID NO: 13093 - DNA, 1872 bp, Homo sapiens
ccacgcgtccgcgggacccctgttggagagactatggcgctcaacaagaatcactcggagggcggcggagtgatcgtcaataacaccgagagcatcctaatgtcctatgatcacgtggaactcacattcaatgacatgaagaacgtgccagaagccttcaaagggaccaagaaaggcactgtctaccttaccccttaccgggtcatctttctgtccaagggcaaggatgccatgcagtccttcatgatgccattttatctcatgaaagactgtgagatcaagcagcccgtatttgggtgcaaacttacatcaagggaacagtgaagggcggaagcgggaggtggctggggaaggctctgcttcctacaagttgactttcacggcagggggcgccattgagttcggacagcggatgctccaggtggcatctcaagcctccagaggtgaagtccccagtgggagcctatggctactcttacatggcccagcggggccttatgtctatcccccgccagtcgccaatggaatgtacccctgccctcctgggttacccctatccaccgcccccacctgagttctatccaggaccccccatgatggacggggccatgggatacgtgcagcccccaccaccgccctaccctgggcccatggaacctccggtcagcggccccgatgtcccctccactcctgcagccgaagccaaggccgcagaagcagccgccagcgcctattacaacccaggcaatcctcacaacgtctacatgcccacgagccagccgccgccacctccctactacccaccggaagataagaagacccagtaggccctcctgcctccctgcctcccaccctcatctctctaccctacccctcccatcgggggctgtgctggggcttggggaggggagggggcgccttgttctccctccaggtctgatcataaacaattaccaggaactaagcattgtgggacattaggggcccccggctatcggggagaggtgccggcccagcttcccatgccagcccggagcccacagtggttgcccagcgtacctccctcaccgtctggggctcttctgggagcacggagcatcccctgttcctgtttcactctcagcttctcccctcgaagggactctctggccacctcctccaccgcagtccagctccctcagtctggcacccactgctacactcagcctcatgagccacttcagaccagccaggtgtcttcccgggccctgccagaccctgctcacattccctctgctggtctgtgctggtctcagaaggccaccgcgcccgcattccactcagccagggtccagctgcagcccccgccacccttccttcccttccctgtcctgggtcatgttgttgccaccctgtgtgacttttgaagctgtaaaaatgagcttccagggcttgggtggcgtcggggcagggccgccgaggctgggaggaagcccttctgccttttgctggtgtttctggaatttgctttccctcacctctcacttccttctagaaggagcttcctgactggaaccagagaatgcatgtctgtccacttggtggctgctgggtggggccgggaacaagggcccctgaaccctgtgtgctggccgggacctgccaccagccccccagcctgcttcttccccttaagctttgtgcccctggatgcgctaacattcactcttgtttgtccctggactggccatgaagtgaggagatggttatttaaagagaattccctatttatttgacaaaaaatccagttaatatattaatgtgaaataaaccctgtttgcacctcgatttgtttgctgaaaatgtgaaatagtaaaaatgaaataactggaa

SEQ ID NO: 13094 - DNA, 2403 bp, Homo sapiens
  misc_feature (1)...(2403): n = a,t,c or g
ctgaggggttgaccgagagacccagttgaaggcctttacgaagtgaaagaggccgggagtcgccccctacccgcttctcgtagtcctgggagcacagcagaagtgtttttctttttttaatgaacaagtaaaccatacaaattgtcaacatgggacggagatctacatcatccaccaagagtggaaaatttatgaaccccacagaccaagcccgaaaggaagcccggaagagagaattaaagaagaacaaaaaacagcgcatgatggttcgagctgcagttttaaagatgaaggatccaaaacagataatccgagacatggagaaattggatgaaatggagtttaacccagtgcaacagccacaattaaatgagaaagtactgaaagacaagcgtaaaaagctgcgtgaaacctttgaacgtattctacgactctatgaaaaagagaatccagatatttacaaagaattgagaaagctagaagtagaatatgaacagaagagggctcaacttagccaatattttgatgctgtcaagaatgctcagcatgtggaagtggagagtattcctttgccagatatgccacatgctccttccaacattttgatccaggacattccacttcctgggtgcccagccaccctctatcctaaagaaaacctcagcctatggacctccaactcgggcagtttctatccttcctcttcttggacatggtgttccacgtttgccccctggcagaaaacctcctggccctccccctggtccacctcctcctcaagtcgtgcagatgtatggccgaaaagggggttttgccctagatcttccccctcgtaggcgagatgaagacatgttatatagtcctgaacttgcccagcgaggtcatgatgatgatgtttctagcaccagtgaagatgatggctatcctgaggacatggatcaagataagcatgatgacagtactgatgacagtgacaccgacaaatcagatggagaaagtgacggggatgaatttgtgcaccgtgataatggtgagagagacaacaattgaagaaaaagaagtcaggtctgaagtgtacggtttgcagatatgcctggaaaatcaaggangaaaaagaagaacatgaaggaactgactcctcttcaagccatgatgcttcgtatggcaggtcaagaaatccctgaggagggacgggaagtagaggaattttcagaggacgatgatgaagatgattctgatgactctgaagcagaaaagcaatcacaaaagcagcataaagaggaatcccattctgatggcacatccactgcttcttcacagcagcaggctccgccgcagtctgttcctccttctcagatacaagcacctcccatgccaggaccaccacctcttggaccaccacctgctccaccattacggcctcctgggccacctacaggccttcctcctggtccacctccaggagctcctccattcctgagaccacctggaatgccaggactccgagggcccttaccccgacttttacctccaggaccaccaccaggccgaccccctggccctcccccaggtccacctccaggtctgcctcctggtccccctcctcgtggacccccaccaaggctacctccccctgcacctccaggtattcctccacctcgtcctggcatgatgcgcccacctttggtgcctccccttggacctgccccccctgggctgttcccaccagctcccttgccaaaccctggggttttaagtgccccacccaacttgattcagcgacccaaggcggatgatacaagtgcagccaccattgagaagaaagccacagcaaccatcagtgccaagccacagatcactaatcccaaggcagagattactcgatttgtgcccactgcactgagagtacgtcgggagaataaaggggctactgctgctccccaaagaaagtcagaggatgattctgctgtggcctcttgccaaagcagcacccaaatctggtccttctgttcctgtctcaggtacaaactaaggatgatgtctatgaggctttcatgaaagagatggaagggctactgtgacagcttttgatgccagaaaaggcttctgttcacaacagtggcccatggagaaagaggctcttattaaacttagatgaaagagctgcttccattgtcagggtattttctaatttcagttcaaggaatatcctaaaatttagccttgttcagaatttactgcacataaaaaagggtatttcatccagaatagatcagttattgaaggcagtgctgctaacatccattccctttcataccaccattttcaccctgtttcttcccctcctccagttctttggaaatttgtgatcgggggatcttagttgcttatttgttttgactc

SEQ ID NO: 13095 - DNA, 927 bp, Homo sapiens
acagcctccacccctgacccccatcctcttttcctacctctctgtttggtttagaaattgctcaataagtcatttggggtttggcatcctgcccagccacttcccaaacatgaagacctctctgttgctttatgttgtacatgccccatagccatcccaacgtcctccccagtcctctcctgggcaccagcaccttagaagttgttggcagaaggcacttaaactgtgggagaagtgtgcacacctttgagtcccttccctcaaggttaaagctcctgtcagactctcagaagggtctgtgggtgttgtatattagggcaaacaggggaaagcttagaggtccttctatatgtgttaataagctgtttctaagtgtttaaatttgaaaagcatcatgtttctcatgatttatgggaatgaagcaagtactgaaatcaaattaaatactccctgggtcctgggtcaagtttgaccctagccctgggggtgaggcaagccccctcctatgaggatgagcaaaaatactactctcttcgccctgagttgctttctggatctggggcttcaggacttgctgcttcagtcagcctttattagcaccaaagactttatgaagatcccacacacagacacacatcccttcccgcctcccccctgccttcagtagggatctgggctccgtgggctgggagggaccaacccctatagtgggaatggcagagcttaacgtgtactgcttgtgtgtgtgcgtgagtgtgtgtgtgtgtatggagtgtgtgttcttgcctcccaccctctccccatctgctctgggtatttttgtttttgtttagttttaggtttacaacagagaggaattaatttatcagcagcctaaaactgttgtgtttttcttatggtttaaaaaacgccatgtcattgataact

SEQ ID NO: 13096 - DNA, 2240 bp, Homo sapiens
ggagtcggcacctggctctcctcgtgcagtcaccccagtgccaaccaaaacagaggaggtcagcaacctaaagacactacccaagggcctgtctgccagcctgcctgacctggattctgagaactggattgaagtgaagaagaggcctcggccatccccagcacggcccaagaagtcagaggagtccagattttcccacctgacctctctgcctcagcagctgccttcccagcagctgatgtccaaggatcaggatgagcaagaggaactggattttctgtttgacgaggagatggagcagatggatgggcggaagaacaccttcactgcctggtctgatgaggaatctgactatgagattgatgacagggatgtcaacaagatcctcattgtcacccagacaccacattacatgcgccggcacccagggggggaccgcacaggcaaccacacctcgcgtgccaagatgagcgccgaactggccaaggtcattaatgatggcctcttctactatgagcaggacctgtgggctgaaaagtttgaacctgagtattcccagatcaagcaagaagtcgagaacttcaaaaaggtcaatatgatcagccgggagcagtttgacacactgacccctgagccccctgtggatcccaaccaggaagttcctcctgggccacctcggttccagcaagttcctacggatgccctggccaacaagttgtttggtgctcctgagccctccaccatcgcccgctctctaccaaccactgtcccagagtcaccaaactaccgcaacaccaggacccctcgcactccccggacaccacagctcaaagactcaagccagacatcacggttttacccagtggtgaaagaaggacggacactggatgccaagatgcctcgaaaaagaaagacaagacacagttcaaacccacccttggagagccatgtgggctgggtgatggattcccgtgagcacaggccccgtactgcttccatcagctccagcccctcagaagggacgcctacagttggcagctatggctgtacccctcagtcattgcccaagttccagcatccttcccatgaactgctcaaggaaaatggcttcacacaacacgtctaccataagtatcgtaggcgctgccttaatgagcggaaacgcttgggcattggccagtctcaggagatgaacacactcttccgcttctggtccttcttcctccgagatcacttcaacaaaaagatgtatgaggagttcaagcagctggctctggaggacgccaaagaaggctacagatatggtttggagtgcctttttcgatactacagttatggcctggaaaagaagttccggctggacatattcaaggattttcaggaggaaacggtgaaggactatgaagctggccaactgtatgggctggagaagttctgggccttcttgaaatattccaaagccaaaaatttggacattgaccccaaactgcaagaatacctcggcaaattccgacgtcttgaagacttccgagtagatccccccatgggtgaggagggcaaccacaagcgacactcagtggtagcaggaggtggcggcggtgagggcaggaagcggtgcccctcccagtcttccagcaggcctgctgccatgatcagccaaccccctacaccacccaccggccagcctgtccgggaagatgccaaatggacaagccagcactcgaacacacagactttgggaaagtgaaaagctccttagccctggggcttgaggggggaaaggggtagggtgggtaagagtccatgggggtgcccagtcccaggagaggggacaatgaagggacaggcctggagttactaggacaggcctttgtgctgagtagcaatgtatacaccatttgggctatcagaggtacccctgggcaggagcctctacatccccttccccctcctctctccatgactcttgacatcctagcttcttctaaggggggagggaaaggggggagatttttatatatatatacatatatatatatcaagttttaaattattgatagttcatctggattaccaaaatcactctgcagccctgcccgaggctagtaggctgcaaccctgggtccccacccctaacctcctgctccccctcaagccaactatgcagcccacaagaaggccctgcgggccccccccattgcccagcactgtctcatagaaggctctggtggtacctctgg

SEQ ID NO: 13097 - DNA, 1227 bp, Homo sapiens
taaaatcaaaatgtttattggagtgttgtacaaaaaagtttccagtcataaaatgtatattacaaatcattggaaaaaaaaaagaacacgttaggcatgcatcttcttaaaaaccgaatctctgaaatgaaagtccatgccagccccagctgcagcccagctccgtttttgcaggttgtgctgtgacgctcgctggacgcagggcttggaagaggctgcaggcggcgacgcccccaggactgaggagtccctcagatctttaacaaagaactgccgcgtgcaggcttcagaccaaccccagccaaagccgctggcatgaggacaggtgcatgatcggattctgggtcagcccgcaggcctcccggctcctgggctcagcggggcaggcttcagcgttaacctggcgctgtgcaccccagaacccgcgttggtccagcaggcgtgggcctccccccagggctgggtggcgtctgatgcttcgcagggagggcgctaggcttcgagtcacacggcacgggcttacacagagggatggtttcgcatcgttctaagcggcacacagctaagcgtatttggggacaaatgcaaattgtttcccaggccataaataacttttaaaaatttgattttcttagtgtttccaaagactcaattctcaatgaacctccaattacccacaggctgcccagtccacgcttctccccacccccttcagctaagggcacccgcagtcctaggaccacccccagctccacccaaggcaaatgtagggtggggggttctgtgggcctggggcgtgctgttttcaggacaggactgggcagcgtctggacatgaggacctgcgggttttgggggggactttgtccctgagcccagcctgcaaggctgtcggcaaatcacagaccaactccaggatacagctttgctcctccagagccaaaatacataggatgtggctgagaccactgcagactccccataggacaagatcaccaagacccacccccagaaccctcgctagcacgaagcccagccagtcgggtccgggtgattcctgctatgaaggtgggaaagaggacacagtctgtcgccagcattcccacttccagcggctggcagagggtatccccggggcaggcaaagctccctaccagccgcctgactgggagcacagcggcgtagcctccaggaggaaatgctttggtaagatgcgcccccctgtatc

SEQ ID NO: 13098 - DNA, 944 bp, Homo sapiens
gcgttaaggtcctgcccactgaggggacagccttctgggcagggacctcggggggcttcaagggctctgcacggctgtggggccctgtgcctttgtctccttgtgtctcctttcccccgaagtagatgaaacagtctcacatacccaactgctcatcaacagagcagagctgatggcatgagtgagggctgggcggggtggggcctccagagctttgcagggaaccctgggaaccctaggaacaaggagcctttgttccaacagagcagagaaggaggttctctatgttcagaccactggagaggatagagaggtaaaaggtggcgacagtttcccttaggggtcctgcctggcaggagccacagctcaggagagttgtgagggatgggacggaggctggcgaccaggcgaggcctaggccaggctcgggagacttttctgtgctcctttctacacatgccttaaaccttccttcctgtggggtgcctggaccccttccccatctctggcagctcagagggtctctgctgctctcccctgggaaatcccctcatcctgccctctggctgcctcccagctgggcttgttctctgagggaggttctggagactcatggacttggggctctgcctgtaggaaggaggctgggccggagggaccagccaccattgtctctgttcagccaagtgtgcaagtaggctgcccgccaagagggggcctctgctacccgctgctgcctgccggctgacacactgcctccccagccttcctgctaggccaccctcctcccttcccatgcttgtaaccagctctggggcttgcacctccacaaagtaaggttggcccttggaggccatgtttgggtcttccgccagggcctagggctaggccactgcacccaatgggtgcacaataaataacaggtcaacaaagaaaaaaaaaaa

SEQ ID NO: 13099 - DNA, 2838 bp, Homo sapiens
  misc_feature (1)...(2838): n = a,t,c or g
gccatccttccgcagcaatacctgcggccagtggaagatgtggccacgtcccaagacgactgttacaagtttgccatctcacagtcatccacgggcactgttatgggagctgttatcatggagggcttctacgttgtctttgatcgggcccgaaaacgaattggctttgctgtcagcgcttgccatgtgcacgatgagttcaggacggcagcggtggaaggcccttttgtcaccttggacatggaagactgtggctacaacattccacagacagatgagtcaaccctcatgaccatagcctatgtcatggctgccatctgcgccctcttcatgctgccactctgcctcatggtgtgtcagtggcgctgcctccgctgcctgcgccagcagcatggaatgactttgctgatgacatctccctgctgaagtgaggaggcccatgggaagaaagatagagattcccctgggaccacacctccgtggttcactttggtcacaagtaggagacacagatggcacctgtggccagagcacctcaggaccctccccacccaccaaatgcctctgccttgatggagaaggaaaaggctggcaaggtgggttccagggactgtacctgtaggaaacagaaaagagaagaaagaagcactctgctggcgggaatactcttggtcacctcaaatttaagtcgggaaattctgctgcttgaaacttcagccctgaacctttgtccaccattcctttaaattctccaacccaaagtattcttcttttcttagtttcagaagtactggcatcacacgcaggttaccttggcgtgtgtccctgtggtaccctggcagagaagagaccaagcttgtttccctgctggccaaagtcagtaggagaggatgcacagtttgctatttgctttagagacagggactgtataaacaagcctaacattggtgcaaagattgcctcttgaattaaaaaaaaaaactagattgactatttatacaaatgggggcggctggaaagaggagaaggagagggagtacaaagacagggaatagtgggatcaaagctaggaaaggcagaaacacaaccactcaccagtcctagttttagacctcatctccaagatagcatcccatctcagaagatgggtgttgttttcaatgttttcttttctgtggttgcagcctgaccaaaagtgagatgggaagggcttatctagccaaagagctcttttttagctctcttaaatgaagtgcccactaagaagttccacttaacacatgaatttctgccatattaatttcattgtctctatctgaaccaccctttattctacatatgataggcagcactgaaatatcctaaccccctaagctcagaggtgccctgtgggagagcaactggactatagcagggctgggctctgtcttcctggtcataggctcactctttcccccaaatcttcctctggagctttgcagccaaggtgctaaaaggaataggtaggagacctcttctatctaatccttaaaagcataatgttgaacattcattcaacagctgatgccctataacccctgcctggatttcttcctattaggctataagaagtagcaagatctttacataattcagagtggtttcattgccttcctaccctctctaatggcccctccatttatttgactaaagcatcacacagtggcactagcattataccaagagtatgagaaatacagtgctttatggctctaacattactgccttcagtatcaaggctgcctggagaaaggatggcagcctcagggcttccttatgtcctccaccacaagagctccttgatgaaggtcatctttttcccccctatcctgttcttcccctccccgctccttaatggtacgtggggtaccccaggctgggttcttgggctaggtagtggggaccaagttcattacctccctatcagttctagcatagtaaactacggtaccaagtgttagtggggaaggagctgggttttcctagtatacccactgcatcctactcctacctggtcaacccgctgcttccaggtatgggacctgctaagtgtggaattaccctgataaggggagagggaaatacaaggagggcctctggtgttcctggcctcagccagctgcccacaagccataaaccaataaaacaagaatactgagtcagttttttatctgggttctcttcattcccactgcacttggtgctgctttggctgactgggaacaccccataactacagagtctgacaggaagactggagactgtccacttctagctcggaacttactgtgtaaataaactttcagaactgctaccatgaagtgaaaatgccacattttgctttataatttctacccatgttgggaaaaactggctttttcccagccctttccagggcataaaactcaaccccttcgatagcaagtcccatcagcctattatttttttaaagaaaacttgcacttgtttttctttttacagttacttccttcctgccccaaaattataaactctaagtgtaaaaaaaagtcttaacaacagcttcttgcttgtaaaaatatgtattatacatctgtatttttaaattctgctcctgaaaaatgactgtcccattctccactcactggcatttggggggcctttcccattgggtctggcatgtctttttatcagtgcagggccagtggggacagaggggagaaggggtggaacaggggtcgccaacacttgtgttgctttctgactgatcctgaacaagaaagagtaacactgaggcgctcgctcccatgcncaactctc

SEQ ID NO: 13100 - DNA, 621 bp, Homo sapiens
ctgcattggcaaagttaaagggataattaactggctcagagcttatgtgcagagttccaagccccaaagttaatcctagaaccactcgataacaccaataaaaatatttatttcacatctgttatatatctggaaaatgttctaagcatcttacacatatttctcattaaatccacaggtgaccattgtgaggtagatattttgttctaattttccagatgaggaagctgagaccctaaaaggctgaccggttccctgatgtgttacctgcttctgctactgatccaaactgcagaacttctcattcatccccaaggcctccaggcagtatccaatggggaatcagctctaaaaggaaccagaccaacgttttccagccccttcattctgtagcttccctctgtgtgaggaaaggatagaaatgttcaggacatcatcatacaggctcctcatctacaaagttccagtagcagtgacgcctacacggaagacttggaactgcaaacaggctggggtcacctcagtgacatctgacgctgtccaaccagaagttcgatttttgttctgggggtgaaggaggaaacagactgtactaaaggactaaaataatttgtctatact

SEQ ID NO: 13101 - DNA, 1289 bp, Homo sapiens
cacccagcccagaggtggcttttaaactgggcattaaaagatgaataagagctcatcaagtgtggagggcttggggaggagatgatgttccaggctaaggggactacatgagcaagagcctggaagttgagagcctgtagtatgtccaggaacatgtggcttagggtcatgactttctggctgatggaccttctgcctattcctaggtgggtgcctgagtctgcacgctggcttctgacccaaggccatgtgaaagaggcccacaggtacttgctccactgtgccaggctcaatgggcggccagtgtgtgaggacagcttcagccaggaggtgtggagcaaagtggccgccggggaacgggtggtccgaagaccttcatacctagacctgttccgcacaccacggctccgacacatctcactgtgctgcgtggtggtgcggttcggagtgaacttctcctattacggcctgagtctggatgtgtcggggctggggctgaacgtgtaccagacacagctgttgttcggggctgtggaactgccttccaagctgctggtctacttgtcggtgcgctacgcaggacgccgcctcacgcaagccgggacactgctgggcacggccctggcgttcggcactagactgctagtgtcctctgatatgaagtcctggagcactgtcctggcagtgatggggaaagctttttctgaagctgccttcaccactgcctacctgttcacttcagagttgtaccctacggtgctcagacagacagggatggggctgactgcactggtgggccggctggggggctctttggccccactggcggccttgctggatggaattgtggctgtcactgcccaagcttacttatggggggatcgccctgctggctgccggcaccgccctcctgctgccagagacgaggcaggcacagctgccagagaccatccagggacgtgggagagaaagagagatggtgctaaagaaaggactagcatatgagacttctggtaccaatggggctggtgggcatgctggtcactgtgtggtgctaggactgccaatgccaggcccaagggacaaaaagaacagagctttttgttctcatggctggccctgctacctccgaggcaccctgcagggcaatgcatgtcatcccaacccccacactccccatcctccaacccactggtctcatgcccaaagaagagttgaaggcatgggagccaacattttattgaaagaagccacagaggctgaaattcaataaacacaaggtttatgag

SEQ ID NO: 13102 - DNA, 2050 bp, Homo sapiens
ggggggggccggttgcctagaggagacccacgttctcctctcttgctcccacctccctctcttccccccacagtgcactccctccctctgcccttctctgtccaccccctcctaagctagacaaatcaacctcgtgcctaatggaggaagtgtggaaactttgtaaaatgtgtacataggacttggagaccttgtgtccgccctgctctttcttccgatcccacaggaagtgcccctgcactgtcatcactctcacgaggacgtcacctgtgctaacctgggggaaggtggggtcctttcttctttccttttgagaagcactgaaactcccaagtgtgttcttatcccatggataggaaaccagtgaattccgtggctggcacaccacgagctgtcacgcggcacgggtcataacacatctgggtgtcatcggacacctcacctcgcccaccctgtaggagcgtaaggagcctccatcctcagccacgtgcagctgacgtggctttcctgatcggagggcttttcttttatgggtggcccagcttcttcaagaccttcactgctctgcctcagtggacagtcgtttcttttttgaggtgtgaccttttgttttcatgccttccccttgaagtcatcctgtgttttgtaatcagctgtcaggccaaatgtctgacccgaaagagaatgtatttacactcatgctgcgttgttcagcagcccctctgtgttctgtgtgatttgttttatttttccttttttttacatatatatgcagggaagtaatggtactgggtagtgtatgttttctatgtggttcaaatatgaatttcgaacacaccaagccgctaatgagatagcagctttttttctgggacccagagtcacaaccaaattgatttaagaccggacccaagacacctttaacaataggactgaaaggaaaaaggatagggaaaaagcttattaaagaaatgtgtcaacaccaaatgtagaggggaagaaccacaaccaggcataataccaaaccggttccagggggaaacaaggctttggtattccgctggctccagcgctttttctgaaacccgaggctggccagggtgctgtcaccgtgtggtctttgattgcagccattcaatgcccacatgcttttccttcttgtttcagaacagcacatggtcacaacaagatattttctttccctccaaagccttttgtctccttgtgcctctttttatccttaggaaaagatccaggtgcttgtgaaaagaatcatgaatgcaacaagggaggctggtcctgttgctgtcgccgattaagttttaaacttttatttattatttatgtctgccgtattttaaataaacattctcgttccttccagttccagtcatagtgtgtctgtggcattccagtccaaccatgtgacttatttattctaatttgagggctgcactgtacaccatggtgtcctgtgacaccgtgttccagacatttatggaaggaaaacatcccatataaatgaaactgtcatgctgtgtcctccccggcagcagaagatgtgtccttccattgagtgagggtaaccttatgtccaccaaggatactttgagaaagcccctaaggaacaagcctcagtcccacggtttcagactatttattctctgaacacaagagtattggttaattatgttctcagctctccctgctgttgtatgtgtgcattcactgcaagtaacttatatctttttatttgaatgtattttaaagcagtagatagaataacaaaggaatatgaaaaccatggactgaatggaccattttatgtattcagagagagaagccactcatcattgccagaaataccatgtaaaaattggcagttcagaggttgcaatacttagtatagtaaataaataaacggtcaacattgtgcaaccactaccaaaaagtgtgttgtaatgcatcaaaaatcaacacaattttattcactaatgagtatcaataaaataagttcaaatgatggaaaccaaaaaaaaaaaaaaaaaaa

SEQ ID NO: 13103 - DNA, 1091 bp, Homo sapiens
gtttttgaagatggcggccctcaaggctctggtgtccggctgtgggcggcttctccgtgggctactagcgggcccggcagcgaccagctgggtctcggcttccagctcgcgggttcagggaagtggtggagacccaagaagggaagacaactataattgaaggccgtatcacagcgactcccaaggagagtccaaatcctcctaacccctctgggccagtgccccatctgccgttggaacctgaagcacaagtataactatggacgatgttctgctggcttagccagttcatccggcctcatgggagggattgcttgccccgaaagatcacaaggcctatgccaggaagaacaccgcaagatcgaggagtgtgtgaagatggcccaccgagcaggtctattaccaaatcacaggcctcggcttcctgaaggagttgttccgaagagcaaaccccaactcaaccggtacctgacgcgctgggctcctggctccgtcaagcccatctacaaaaaaggcccccgctggaacagggtgcgcatgcccgtggggtcaccccttctgagggacaatgtctgctactcaagaacaccttggaagctgtatcactgacagagagcagtgcttccagagttcctcctgcacctgtgctggggagtaggaggcccactcacaagcccttggccacaactatactcctgtcccaccccaccacgatggcctggtccctccaacatgcatggacaggggacagtgggactaacttcagtacccttggcctgcacagtagcaatgctgggagctagaggcaggcagggcagttgggtcccttgccagctgctatggggcttaggccatgctcagtgctggggacaggagttttgcccaacgcagtgtcataaactgggttcatgggcttacccattgggtgtgcgctcactgcttgggaagtgcagggggtcctgggcacattgccagctgggtgctgagcattgagtcactgatctcttgtgatggggccaatgagtcaattgaattcatgggccaaacaggtcccatcctcttcatgaaaaaaaaaaaaaaaaaaaaaaaaa

SEQ ID NO: 13104 - DNA, 605 bp, Homo sapiens
atggctgctatatacctggtagatgtggaccaaactgcagtttatacacagtattttgacatcagttatattccatctactgtctttttcttcaatgggcagcatatgaaagtggattatggatctccagatcacactaagtttgtgggaagcttcaaaaccaaacaagacttcatagatttgattgaagtaatctatcgaggagcaatgagggggaagcttattgtccaaagtcctattgatcccaagaatattcccaaatatgaccttctctatcaagacatttagtacattaattgctgtcaaagatgaagaagaaggcacatcttgacacagtacctgaatccagctgtgctgtgtttctggagtcctttggaaacatgtgtcccagaggagaagaggtttgacttgcgtgtagaaaacccggcccctgaggaaaagaccccactggttctctgatgacctgggatgcctaactgtctactccctgcaagcctcagagcagccaagtcattggtgttcattttccccacagtgatttttgtaacttctctttctaatgtttttctttatccctttaatacagaaccctcccaaaaaaaaaa

SEQ ID NO: 13105 - DNA, 1417 bp, Homo sapiens
tcaaagtggttatttttattatcttacctccactgggttttcagtcccaatggagattgtgagacctggcaagaccttgagatcagtagcatccctgaggggtaaacacaagactggtccactgtctgctgccctgactttcctacaactcttaagaggtttgcagtccccattcctcatagccagccatagaaatctttccctgaaacaggaaacactttgggcagcagagcttctcatcccattccaggtagacaaccacacccctaaacactcctctccataactgaaggtcagagggtgaagggaatagtctctgctctctgtgaccaggaacttcactcgttcctttccagcatcattcctgctctcaagcgcctgagtctgggccttttctacctagtgggctacacactgctcaggcccccacatcacagaagactatctcctcactgaagactatgacgtgagtgtctactaaagcagcagcagcatgactgcaccagagctagaaaatggacaggcaaggatccctacagatagcagagaagtaggaaatatcatctacaagtgcatgttggttttgctctagatctgtgagttgtcaatgccagccgtgctgggacatgttcatcagccagcactgaacaaccttcgcgggcacagggctgtgccaggtgcacatttagcacccgttgccttctctaggagccgctcctagcttgccttatcacatccacgtgacccctcagagcacagcagcttctgattctccatcctattttcttctcttgactgatacatttgggcacttctagggaattcagaaaccaagggaaggggggaagtgctggcttttgctcctgcccagctgaaaggcttgaaaacagttcagtaattctgggcaggtttctctccttaaattaaaatccaatatgggcccctctgtacttaacattccaaatgctcattccaaacactttgccaacgaaggcaaacagtagagaagttaaatacagtgctgcccttggaggctctccaagggaaaggcgaatgaatattctccaggccctctgcttattcctctctgcctattgtgaaggcaatcaggccagactattgagggcatctggcagcaggactcaggcaggtatgaagtagccagccacaagtgtgaaaaggaagagtgctgagagaaactgcctagtcatgtgatatccctaatgcactgtgctttcttccctcaagaaccaccccttctggttccgctgcatgtacatgctgatctggggcaagtttgtgctgtacaaatatgtcacctgttggctggtcacagtaagtagaaaagttgaaacaaggtcctatttagacaagccatgggggccagtatggggagtggcaagagccctaactgagc

SEQ ID NO: 13106 - DNA, 559 bp, Homo sapiens
taaaaattatctgctagggatgataggcctgggtttctcgttgacatctagatgggcctgattagagcagtcatctcctggtaggcacaaaataatcaccaacagtaatgttgtatctgtaatgtttgtttgctttttaaagttttattcttgatttcttgtaaacatccattgcactgaggccgtatcattccttaagacagccctacatcttgccttggtaatcccttagataatgtggaaactcaaaccgttaggctccagtcatcttagaccatttcccatccgttttgtattttctcgtcctgaaagcagctgaactgaaagtaagtaataatatgctggaccagtgggaacggatgtggggagtatttgtggtgtgctaaaatactgtaattatctgtgaggctgcctgacacgcttctgccaatcttgttttcatcattcattctgcaaacgtttatggagggccttctttgagcacagaggcaaaactgaaagcttcagggatttgctgtagctgaggagccctgggagcacagcccatcaagcaagggat

SEQ ID NO: 13107 - DNA, 1047 bp, Homo sapiens
ggccttgacgaggtctgagcgaccatggaccggccggggttcgtggcagcgctggtggctggtggggtagcaggtgtttctgttgacttgatattatttcctctggataccattaaaaccaggctgcagagtccccaaggatttagtaaggctggtggttttcatggaatatatgctggcgttccttctgctgctattggatcctttcctaatgctgctgcattttttatcacctatgaatatgtgaagtggtttttgcatgctgattcatcttcatatttgacacctatgaaacatatgttggctgcctctgctggagaagtggttgcctgcctgattcgagttccatctgaagtggttaagcagagggcacaggtatctgcttctacaagaacatttcagattttctctaacatcttatatgaagagggtatccaagggttgtatcgaggctataaaagcacagttttaagagagattcctttttctttggtccagtttcccttatgggagtccttaaaagccctctggtcctggaggcaggatcatgtggtggattcttggcagtcagcagtctgtggagcttttgcaggtggatttgccgctgcagtcaccacccctctagacgtggcgaagacaagaattatgctggcaaagattatttgcaggtgtcttccctcgaatggcagccatcagtctgggaggtttcatctttctgggggcttatgaccgaacgcacagcttgctgttggaagttggcagaaagagtccttgaagcagagacaagcctcacctccacttctgtcaagagaggggcctgcagtgtaaaccctcttccgctgagcagctgtctgaactataggccccagtgctgaagaccagttgtgctaagataccggcatggagattgtgccatccgtggtataggctggctggtatgaagtcattggcctgtatgccaaagagctaagagaagaaaacggggtctgtggcagtactctgaacaatttcctcagaacctcttaataaataagtttggtaatgctg

SEQ ID NO: 13108 - DNA, 2720 bp, Homo sapiens
  misc_feature (1)...(2720): n = a,t,c or g
ggaggacttcaccgatttccaagggggcacactggcccaagatgacccacctattatctttgaggcctcagtggacctggtccagattccccaggccgaggccttgctccatgctgactgcagtgggaaggaggtgacctgtganatctcccgctactttctccagatgacagagaccactgttaagacagcancttggttcatggccaacgtgcaggtctctggacggggacctancatctccttggtgatgaagactcccagggtcgccaagaatgaggcgctctggcacccgacgctgaacttgccactgagcccccaggggactgtgcgaactgcagtggagttccaggtgatgacacagacccaatccctgagcttcctgctggggtcctcagcctccttggactgtggcttctccatggcaccgggcttggacctcatcagtgtggagtggcgactgcagcacaagggcaggggtcagttggtgtacagctggaccgcaggcaggggcaggctntgcggaagggcgctaccctggagcctncacaactgggcatggccagggatgcctccctcaccctgcccggcctcactatacaggacgaggggacctacatttgccagatcaccacctctctgtaccgagctcagcagatcatccagctcaacatccaagcttcccctaaagtacgactgagcttggcaaacgaagctctgctgcccaccctcatctgcgacattgctggctattaccctctggatgtggtggtgatgtggacccgagaggagctgggtggatccccaagcccaagtctctggtgcctccttctccaagcctcaggcaaaagcgttggcaggcacctacagcatctcctcctctctcaccgcagaacctgggctctgcaggtgccacttacacctgccaggtcacacacatctctctggagggancccttggggccaggcacccaggttgtcccaccagagcggagaacagccttgggagtcatctttgccagcagtctcttccttcttgcactgatgttcctggggcttcagagacggcaaggcacctacaggacttgggctgcttcaggctgaacgctgggagaccacttcctgtgctgacacacagagctcccatctccatgaagaccgcacagcgcgtgtaagccagcccagctgacctaaagcgacatgagactactagaaagaaacgacacccttccccaagcccccacagctactccaacccaaacaacaaccaagccagtttaatggtaggaatttgtattttttgcctttgttcagaatacatgacattggtaaatatgccacatgcctttggtggaagtacaactgttgttaatactctatacaagtatgagatcagggttaggaaaaaaagacaaagaggtgatgacagacacgacagtgggaaaccccacatcgtctcatggcaaaccgaaggaacgggatgtggggaagctcagcttcatttggactgcaaagtcccaggggttttgtttgcacatttgctcatgcacatgggtggtgggaggaaagggggatagcagagacacacagaagagggtacagggtgggtgagaaagaaagtagaagggctaatacccccaaagaacaaggccaactacacctggtgagcctcagagggacagaaacccaggaatgattcctgtgatagggctgggagagccaagaggacggattcgctccaggcttgggacacatcgaggacagtggtggttcttctccagcggtgaccccctgcattaggcaaggaggagcccagaggagagtggagaccttcgaggggggccgttgggagggtactgactgctttcttccagctcttcagtcccgcccttgggcaggacgaagggaatgtgggaaacaagggcgaagggaaaggaaggatggttttgagcaatgaaatgctgctgcatggaaagtgggcatccagaccctgcccagcatggcctcagcctcttcctgttcgtggaccgagggaagaaggaataaagggccatgggcattctccgctctgttcccagcctgccctcctccccttgcacctgggcttatcccacattaatagcccatcctgaagctcagcaattgcccccgaagataggctgagcagatcccatcctcaggttccactgtctatacacacaaaccatgcaaagaggaggaagagaaaggaggcaaagtagaattcagacaggaaagggtggttcaaaggggaatatactacaggaagaacagagaggcggctctcaaggagagggccccatgacagcacagcaatacacaagcacacctgacacaggctggcacgcctccccccaaggtggggctggtgggtctacatgacttctctgcatcctgaggatcggccgggccccaggaagaacctcttgcctcatccctgtctttggcaagtgcaacgggtggtgtggaggaaaggattccatgggtgtccaaagatctcacactgctaacaccctcacgctccttcatcaacaggaagagaggaacaggaccctctttaacgagggcaaggagtggcttcctctgagcttgttactttcaaattaagcacttgactcactgtttctctataactaaacaggcaatctctctctttatgccaacaattaactgggagctaggttaaattatttggctcataa

SEQ ID NO: 13109 - DNA, 561 bp, Homo sapiens
ctcttagaaaacatcttggctcttcaaagcatactctgctggtcggctaaattgcactgggaaaaaaaagcagcagccctattgctatgtcatttgtctacagagcaaaagttgattcaggaacagtaatttgactttgtctatattaaaaatcataaatagtcaacaaatgcaaaaaatgcaaagaatttgtaggtatgattagtgcattataggtgttttcaaatttctcctatgataaattaaaaatgtaatgttgggcattaatttcctaaacccaatgctcagcaattttctcaaattgtttacagtttttccaagagacttcagaaccattccctggagtgaattatttccaatggtgaagagtaatggatggatggcatgagattctaaaaaaaaaaaaaatcttgcttctatttcagaagtgtcactcttcagccccgtgaaggacacgaaaagctggctgagtagtgtggtctatggaggtgcaggggcttcagagttagggaagcatcaatcctgagtccaagccagctgcttggtagctgtgggatagtt

SEQ ID NO: 13110 - DNA, 1254 bp, Homo sapiens
tttttttcaaaaattgaataagtatttattgttccagaaggtacattgctttttatacatatttcataaatgatacaggattttacacatgttcaatagtttgctatttgtttaaagaacttttctccatgtcctccctcccttgcttcccacacaccccaaaaagatttgcctcgttgcactgtgctgtttcttcttaaaaaccctatgcacaaacaggataaatgggttaaaaataattcacacaacttaacaaaaataaatgagggaaggagctgacgactgggggtggtggagggagaaggaagtgggcggagggtcaggaagtggagacatgcatcctttcattccgtcatgccaatgaaaggggtgttggcaggagtagcagcagcagcagcaatcctggctggccttcaacctttgcaaggcacctggagtctgggtttgtcatttaaagtttttcttttcatacacaatgatcccaaaggaggaagaaaaagagaaagaaactccttgccacaatgaggaaggatgaatcacgtgaaagaaaaggccaatcagtggtgtggcagcccccatcatcctttccatcctgcccctacagcagttaaaaacaggatattagacacagattcctttgactcttcaagcgcagatgtcatctggaaatatggtagaaaatgttttgacaaagtataagattaattctctttctctcaatttaagataagaaaaaatagggtgaagagagtgggcttgaaggaagccctagaaatgtattcctatataaagataaattgcaccctttgagatccacacacttgatttacaactgaagttgtggaggtgggagggctcacaaacagtgtggaagtgtgtgtccttcgagatgaacaaagcctccagacaaggcagtcccatctggctggcctggaatgctgtcacacaaagcagattagcaataaaattattctggttgaaatggctacagagccatgattcttagccaattttgtaaaccttacatcttcctgatttggtagtacagctgaacaccccctttccctctgatttgtgttctggagggagaggggattatcaatagataagtatataaaggagggcaattattcctcctgtgaaagactaattaataaaacaaaacaaaaccaacaacctcatgcagtgttgccagtgatttttagacactgatccagagcactgggatatatagacatttaagaaggtattaag

SEQ ID NO: 13111 - DNA, 422 bp, Homo sapiens
tgcgtttgtcaaagcacagacttcctgttttgcctgctagcatctccctgtaactctcccaatcttgaggagtgatccctgtcccagcccctggaaaggggcaggaacgacaaactcaaagtccaggatgttcaccatgacaagagccatggaagaggctctttttcagcacttcatgcaccagaagctggggatcgcctatgccatacacaagccatttcccttctttgaaggcctcctagacaactccatcatcactaagagaatgtacatggaatctctggaagcctgtagaaatttgatccctgtatccagagtggtgcacaacattctcacccaactggagaggacttttaacctgtctcttctggtgacattgttcagtcaaattaacctgcgtgaatatcccaatctggtgaccg

SEQ ID NO: 13112 - DNA, 2240 bp, Homo sapiens
gcgagtgaaaaaggaaagtagaaggcagctgctggcctagatgttggtttgggaatattaggtgatcctgttgagattctggatccagagcaatttctttagcttttgactttgccaaagtgtagatagcctttatccagcagtattttaagtggggaatgcaacgtgaggccaactgaacaattccccccgtggctgcccagatagtcacagtcaaggttggagagtctccttccagccagtgacctacccaaaccttttgttctgtaaaactgctctggaaataccgggaagcccagttttctcacgtggtttctagcttcttcagactcagcccaaattaaggaagtgcagaagcacattgatggtgaaaaacttaggatttggcagccttccagaatggtatggaatctgagggaagatttatgtttcgttttggaggatagctcaagttgaattttctttccagccagttaccctttcaacctacccatactttgtacaactcttacacaaatacttagatatttattagatagccctgaattcactctaattataaacagggagtgtaaactgcccccagatgttcctgggctgggtaaaagcagctggagtgaagcactcattttccataaaggtaacaaagggcagctcagtggttactcaagctcaaaagggtttttttaagagcaagcattggttaagtctgtgtatactgagttggaagtgatttcagcacattcttttttagtggagtgaaagttctgaagcccccttttaacttcctcttggtttttcattataattggtagccatctcatgaactgtctctgactgttgtctctttgtggtcatgtgattgtgagcttgctttctgacttgcatttctgactttatcctgttgttaggaagatagaaactaggttttgaaagattacatgattcaagcgagggattttaaagtaaagatgtatttattctgaagaatctaaaagataacagattatttgcttatgaaagaacaatatagtctgggaatcccagaatgtcaagccaaaggtctaagaagtcatctccttcaaatactttaataaagaagtatttcgaggagatatctgtccaaaaaggtttgactggcctccaggattccagttatttttaaaaaggcaacttaccactaaatccttgagtctccatagagtaacagtaaagaaactgatgtaacagactctcctctcaaaggatctcctctggaagagactatcagcggcagatctctccagggaagacccatcccctagtgccagagcttgcatcctggagactaaagattgcacttttttgtagttttttgtccaaatgcaatcccatttctgtgcctcttagcatgcagttagatttggacaaacaagattcctaaggaatgactttattaactataatatggttacagctattatataaatatatattctgggttatagttctaatatggagatgttgtgtggcaatgctgggcctgtggtggtctgtgtaatgctttaacttgtatggaggaggccaggctcagagcctgagatgtggcctgaaccttccctgtatcgatcctttaatttagaactgtcaagatgtcactttctccccctctgccttttagtggtatctgacatatactcaaaacagtaatttcctggtcacatcattaactgctaattctgtatttataaagaattttcagatggacatgtacaaatttgaactcaaaccatccccagtccagatacaggggcagcgtgtaggtgaccacaccagagcctcagcctcggtccttctcagccgtcgggataggatccaggcatttcttttaaatctcagaggtagcagtaaacttttcagtattgctgttagcaagtgtgtgtttgccaatagatacccattatactaatgtgccaagtaaatgttcattgcacatctgcttccactgtgttcccacgggtgccatgaagtgtgtgaggagcccctcatctggagggatgagtgctgcgttgactactgctatcaggattgtgttgtgtggaatattcatctacataaattttatatgcacagtaatttccctttttatatgtcaagtaactatttgtaaaagttatactcacaaattattataatgattactaatatattttttccatgtttcattgcctgaataaaaactgtttaccactgttaaaaaa

SEQ ID NO: 13113 - DNA, 424 bp, Homo sapiens
  misc_feature (1)...(424): n = a,t,c or g
cctcgaggccaagaattcggcacgagcacagatgacgggcgcctgctggagtatgatactgtgaccagggaagtaaaagttttattggaccagctgcggttcccgaatggagtccagctgtctcctgcagactttgtcctggtggcaagaaacaaccatggccaggatacgaagctctttagtcaagagacggtgatgaagtttgtgccgcggtacagcctcgtcctagaactcagcgacagcggtgccttccggagaagcctgcatgatcccgatgggctggtggccacctacatcagcgaggtgcacgaacacgatgggcacctgtacctgggctctttcaggtcccccttcctctgcagactcagcctccaggctgtttagccctcccagatagctgccctgcacgcaggccangagtctt

SEQ ID NO: 13114 - DNA, 767 bp, Homo sapiens
taccaatctgaagggggagctgccgggagttggagcctgcgatgttcgagaccatgctgctgttctgcccgctgcgggaacgggctgatcgtggaggagggacaacgctgccaccgcttcgcctgcaacacgtgcccctacgtgcacaacatcacccgcaaggtaacaaatcggaagtacccaaaactgaaagaagtggatgatgtgcttggtggagcagctgcctgggagaatgttgactctactgcagagtcgtgtcccaaatgcgaacatcctcgtgcttacttcatgcagcttcagacccgctctgcagatgagccgatgaccaccttctacaagtgctgcaatgctcagtgtggacaccgctggagggattagggccaggatggcccagctgccctagtgtgtgcttgccttgtccctcggggtagatgcttagctggcagtatgagttgtgtgtcctgagggtctttgctagtgtggtggaaagataaaccttttgaggtgaagagccagggggtcaggaaatatggcctatctgccaggcagggtggatgaagtcatgaatgtctgggagtttttctgtgtggggaggagacagagacccataactaaatatgctctgtgtaaagtcctattctttcatcttccactttattggcagttgacattcccttactcccaatcaacactcttaaatatttgtactgtttgtaaaacttagtacatgtccctaaatatttaactgttacttgtaaaaaaaaaaa

SEQ ID NO: 13115 - DNA, 910 bp, Homo sapiens
ttttttttttttttaaggagtggctgagaatttaatactggtaaacactataaattgtaaatgtaagttgtaaatgaccttgtcactggagaggggagaaggaactggagtcagacgtcccagcagaaacagcagcggcaacatgcggtaggcacacctaggtgcaggctgggctacagggacagccaagctgagcaaggacaggtccccgcagcctagactggggcaccgcttcgttctcggtctcactccccgctgtgccgtgctttgcctgtgagacggcggcgctgggccttgctggtacgaggggcccttggggctttatttggagtcctgggcccgtcggggatgtttcctcttgacctttttgcggctgtgtgcatgtagtgatgctgtgagggaggagatccgctgagagagcagggggtctctggacttcctgggcaaggctttggttggtttctccgtggatgacgcctcctcctcagacctgtctccagcccctccctcaggtggggtcagcccgagcagccgggcccccgagaggtccaggtcactgatggtggtcacggtgactgtgtggttggggtggtcatactgcaccgactccgtctttgctgtcaccaaccggtccagctcatctgcctcctccagagcctcttctctctctgccagcatcttcaagtattcctggtggcgctcctcccgaagcttcctctgctcctctttcagccgctgcttaatctcctcaatggctgccttctttcgctcgaccttccgcttgtggaagcctgtcaggtactcccgcctcttctcctcgtcgaagctaagaacgagcctcggccgccggtcgtcaccatctcgcttcttcttcttgttgcggcccatagcagtgaggccgccggcttcc

SEQ ID NO: 13116 - DNA, 1717 bp, Homo sapiens
gggaaagagcaggaaggagcgcgagaatgcagttccgcggcaggtgctcatcccagcagcttcgggctctcggttgtggtttttacacctatgacaaatgacatggccaaacacaccataatgtctgaaggtacaggtagccctaagcgcctgctcgtcacggaagagactgtcttgagagcacaggtctgttgcagcgtgggaaagcctgcgttaccactgcgcaatggctagactgaaacgtgcgcctttgcagtggatctccctgctcttctgagggagagggatttgaatcttgttgctttagtagcatcttctggaaggaggtcgtttacgtaaattctgttccaaagctctgtcgtaactgcttctaaaatgaggttgatactaaacctctgtagaggagcaggatgcaaccgacaggctgtggccggacagctgctgcccagcacatggagcctgcacgcgcacggtttggccaaagaagcccccatactcccggtgaaaaagatttccagaagctgttctgtcaataacaaagtctcaaagaaaaccacaaaaccaccaacactaagatcattcttgagtccaatttgaaaaactagggtcaagttctgcagaggcattgaaaggacaagaaaccaccctgatacccatcgtgtgagggaaaatgctctattcaccattcctcagcttctgcttctggtttcagagttctctctatattggagggtgttttaaagctagagtggtctttatccacttttattaacacatctgaatgtgaaggtcaagagaggaaagtgatatgtcctaagtcagagtagagtcaacaagaaaataagacaaacagcgactgagcccctggtgtatactgggcattggccagctactggggatatggagatgaagaaaacataacccttcttcaaggagcccaacctaccaaggtagacagacatatagacaaatagatacttgcatagaaaaaaagaggaaaaggggatcagtgtgacctgtgtaactaaggtaccctataaaccctcctgcaacagatcatattgccctttatagtggggatggtaatcccatctgaattccacaggtactttgcagtcataccacacccatgtgtctgtcggtcctgactgtaccatttataaacagcttcactttcagcagttctcagccctcttaagctagggtcattgtcagtagggatactgcttcataagcaccagcagaacaccaaaggagaccatatgggtgaaagcaaccagcactgccctggcgcttcataggttcttagagtttttatcttttactttcagtctaacacagcactgcctgctttttgtttttgttgcttggtttgtttttttcttaccgtgttcaccaaacttgtgtccaaatagctttgggctgatgcaaaaatatctatgtgggaagagaagagttgttcctcatggagggccttcagatgagtgctatagactctcctaggcaactccaagaggcttctcaagcagggtgggcagggagagctgctatgggaatcaatggacaaactgacagggactgctttgaaagacagtactcagttgagtatatatattctctcttaagggctaaaagtttataatcatcccttaaacactctgtgatgggatcttcaggatcatcttttgaagtaaactatattttacaatgtgaaaaa

SEQ ID NO: 13117 - DNA, 1300 bp, Homo sapiens
cccgccgcgggcgcgagatggattccgggtgctggttgttcggcggcgagttcgaggactcggtgttcgaggagaggccggagcggcggtcaggaccgcccgcgtcctactgcgccaagctctgcgagccgcagtggttttatgaagaaacagaaagcagtgatgatgttgaagtgctgactctcaagaaattcaaaggagacctggcctacagacgacaagagtatcagaaagcactgcaggagtattccagtatctctgaaaaattgtcatcaaccaattttgccatgaaaagggatgtccaggaaggtcaggctcggtgtctggctcacctgggtaggcatatggaggcgctggagattgctgcaaacttggaaaataaagcaaccaacacagaccatttaaccacggtactctacctccagcttgctatttgttcaagtttgcagaacttggagaaaacaattttctgcctgcagaaactgatttctttgcatccttttaatccttggaactggggcaaattggcagaggcttacctgaatctggggccagctctttcagcagcacttgcgtcatctcagaaacagcacagttttcacctcaagtgacaaaactatcaaatccttctttccacactcaggaaaagactgtcttttgtgttttcctgaaaccttgcctgagagctctttattttctgtggaagcgaatagcagtaatagccagaaaaatgagaaagctctgacaaatatccaaaactgtatggcagaaaagagagaaacagtgttgatagagactcagctgaaagcatgtgcctcttttatacgaaccaggcttctgcttcagtttacccaacctcagcaaacatcgtttgctttggagaggaacttaaggactcagcaggaaattgaagataaaatgaaagggttcagcttcaaagaagacactttgctgttgatagctgaggttatgggagaagatatcccagaaaaaataaaagatgaagttcacccagaggtgaagtgtgttggctccgtagccctgactgccttggtgactgtatcctcagaagaatttgaagacaagtggttcagaaagatcaaagaccatttctgtccatttgaaaatcagttccatacagagatacaaatcttggcttagtgggttataaaaaacaaaaccacaaatatcttgtactgtattaattgtccttgtttacttcagacaggatccattgctaatcatggagtataaatgattatttatgttttataaaactggcttctgtctcaaaaaaaaa

SEQ ID NO: 13118 - DNA, 877 bp, Homo sapiens
atattgtgcttccaccactgccaataacaaaataactagcaaccatgaagtgggtggaatcaatttttttaattttcctactaaattttactgaatccagaacactgcatagaaatgaatatggaatagcttccatattggattcttaccaatgtactgcagagataagtttagctgacctggctaccatattttttgcccagtttgttcaagaagccacttacaaggaagtaagcaaaatggtgaaagatgcattgactgcaattgagaaacccactggagatgaacagtcttcagggtgtttagaaaaccagctacctgcctttctggaagaactttgccatgagaaagaaattttggagaagtacggacattcagactgctgcagcccaaagtgaagagggaagacataactgttttcttgcacacaaaaagcccactccagcatcgatcccacttttccaagttccagaacctgtcacaagctgtgaagcatatgaagaagacagggagacattcatgaacaaattcatttatgagatagcaagaaggcatcccttcctgtatgcacctacaattcttctttgggctgctcgctatgacaaaataattccatcttgctgcaaagctgaaaatgcagttgaatgcttccaaacaaaggcagcaacagttacaaaagaattaagagaaagcagcttgttaaatcaacatgcatgtgcagtaatgaaaaattttggggacccgaactttccaagccataactgttactaaactgagtcagaagtttaccaaagttaattttactggaaatccaggaaactagtcctggatgtggcccatgtacatgagcactgttgcagaggagatgtgctggatt

SEQ ID NO: 13119 - DNA, 893 bp, Homo sapiens
gcggcacgaggtgatcgatatcattaacctggacaccttcacctacatcgagtctgcctcggagctcagaggggggtttgactggagcctccacttccagtgggagcagctctccccagagcagaaggctcggcgcctggaccccacggagcccatcaggactcctatcatagctggagggctcttcgtgatcgacaaagcttggtttgattacctggggaaatatgatatggacatggacatctggggtggggagaactttgaaatctccttccgagtgtggatgtgcgggggcagcctagagatcgtcccctgcagccgagtggggcacgtcttccggaagaagcacccctacgttttccctgatggaaatgccaacaccgtatataaagaacaccaagcggacagctgaagtgtggatggatgaatacaagcaatactattacgctgcccggccattcgccctggagaggcccttcgggaatgttgagagcagattggacctgaggaagaatctgcgctgccagagcttcaagtggtacctggagaatatctaccctgaactcagcatccccaaggagtcctccatccagaagggcaatatccgacagagacagaagtgcctgggaatctcaaaggcagaacaaccaagaaaccccaaacctaaagttgagcccctgtgccaaggtcaaaggcgaagatgcaaagtcccaggtatggggccttcacatacacccagcagatcctccagggaggagctgtgcctgtcagttcattcacctttgtttccctgggcgccccagtggtttcttgttcctttgcaagaatgggagattgaccgacagcaatgggaccaaaatggtttcccacattcgaggcacataggcttccca

SEQ ID NO: 13120 - DNA, 625 bp, Homo sapiens
  misc_feature (1)...(625): n = a,t,c or g
gctggaaacggagtggggccggcattctgaggaagtgcgcgaccttcaaaacacaggctgagagggacggccacacagcagctaatgccacaatttcaagaatagaagccatcaacttcctgcaacgatcacattctagtccctgcatgggggagggaattgtgtgagatgcaggtcatgctatgaagccactgtaaggtcatcttttcataggaaataatgtatagatggataaaattatgtaagacatcccttctagcaacaacgtcaaagcagtgtctggttttgtttctcctttcttgaaaaagtcaaaggaagtatgctttatgctaaaattagaaaatgatttcagctggtcagagttggatcacagaatacatcatcccacacaagaaactctgtaggagaatgcagaacattttaaacatgaggcacagtgccttccccgctgaagggatgcctttcccagccaccagtgaaagaaacactaagacggagggtctggccacagagaaaagtgacttgatataaaattgttgaagtaaanttcaggctgctgttgaaacctgantgaagcantcaccactgtcttataacacacgttnnnacanatcccgggataaac

SEQ ID NO: 13121 - DNA, 1086 bp, Homo sapiens
cagccttttccccagctactgtttttggggccaagatgctgccctagcagcaatcactccaagggcaagatcatggcttttggagggaggtgagtttagggagggccaggaccatcctcctacccctcataccctcccagcatatacaaaaggggaggttttagacaggctccctgaatgttaaccacagaggagtcactccttcattcctcctctgtctctttgcacttttcttggtcttggccacagcctgagtgacgaatttcctactgaatgtaccaagttccaatttttaagggggggaaaggtttcaaatggggaaaaacacacaaaaaaaaaatcactaaaaattcccacaaatcttgtttctggcactttagaaaaactgcaaaaaaatacgtaataaagaatacatatatatatatctacacacaaattatatatctatctatctatacagcggaaccacaagagagactgaggaaggcctggaggcaggggcagaggtgacgacagtgcccctatatccttaacccatactcctctgaggcaaacaggcatgggaaaatggaagggttgaggatggaccggagaattggaacttcagaataggtcaaaattccaaaaccatggacatttttttttgggagaattgagattgtagacattttttttttcttaaatatgatcaaggaaaatagcttccagaatgtggtggttctgggcaacaaatgagattgtggcgacgtggagattaaaatatatgtatttgagctggggaatttgaatattgtgagtttcagatgttggaaatttgggattttgcagttttgtcttttgaaaatgatcaagtcttgtcagttcgtgccctctttccccatgttccctgggaagacgggtggtggcagagtgagaaggccactggttctgtgccgcagcacgcaaaatttagaattctacagactagctctatacgtagtgaggacccagatttagagaaactgaccaatatttatctccgcatttgtgtgtgtgtccaactctgtaggccaataaaccaacaagacaaatgaactgtgaaaaaaa

SEQ ID NO: 13122 - DNA, 1189 bp, Homo sapiens
tttttttttctcttttcttttcttttttctcttttagcagcaagagcctgctttctgctctcttctcttgacttttccagatcaagttcctttaaaagaatactcgcattcttatttgcttctgcagcttgctgggtctttagccttcacaatggtttcgacacattgatgacattttttcaacagttccttatctgtaattgttgctatgtatctcatgcattctatatcagaagggaactgatttacttcctttaccaaatattgaacaacttttacatgacccttgcgaaatgctgacataagaggtgtgattttccggttatctgctgcatccacatcagcacctgcttgcactagcaactgcacaacatcaaaatgacctccattggatgccagccaaagtggcgtatttccctttttgttacgaacatcaatgtgggctcccctatgaatcaggagttcacaaaatttgtagtgacctttgtctgctgctattgttaaagcagtatctcttgaggaaggcacagggggagcattaacatctgctcctttatcaagaagaactcttccaacctctgcataccctccagaagctgcttccatcaagggggtaagacccgtctttgccctatgttcaacattggcttttcggtccagaagcaaactcactacttctgctcggccctggaaacaggccagggtgagagccgtgttccgattggtctctatttgggcattaatgtctgaacccatatcgagcagcaattttactgcaggaacatgtccattcattgcagccaacatcaggggagaaatacctagtttactcccagtccttgaattaatttctgccccagcattaagcagaatcttaatgatattaacatatcctccagacgcagctagactcagtggtgtataatcagatacgttcctatgttctttatttgcacctcgagccagcagcaagtctaccacctcctgacgtccaccagaacatgccaatgaaagcggagtatccttagttcgttcagactgtgcttctatatctccacctttatccaaaaggatttcaacaactccaacatgccctgctgttgctgccaggattagtggtgtgaaaccttttttgtctctgtgttcaattttggcatcccgtgcaatgagcacagatacaagttcttcc

SEQ ID NO: 13123 - DNA, 1953 bp, Homo sapiens
agagaacggggcctctgccatcggggaagcttctcccttggagaacagtctcgagtgatatctcacttcttgcccaatgatctgggcttcactgatagctactctcagaaggctttctgtggcatctacagcaaagatggtcaaatattcatgtctgcttgccaagaccagacaatccgactctatgactgccgatatggccgtttccgtaaattcaagagcatcaaggcccgcgacgtaggctggagcgtcttggatgtggccttcacccctgatgggaaccacttcctctactctagctggtctgattacattcatatctgcaatatctatggtgagggagatacacacactgccctggatctcaggccagatgagccgtcgctttgcctgtcttctccattgctgtctcctcagatggacgagaagtactaggaggggccaatgatggctgcctgtatgtctttgaccgagaacagaaccggcgcacccttcagattgagtcccatgaggatgatgtgaatgcagtggcctttgctgatataagctcccaaatcctgttctctgggggagatgatgccatctgcaaagtgtgggatcgacgcaccatgcggggaggatgaccccaagcctgtgggttgcactggctggacaccaggatggcatcaccttcattgacagcaagggtgatgcccggtatctgatctccaactctaaagaccagaccatcaaactctgggatatccgacgcttttccagccgggaaggcatggaagcttcacgccaggctgccacacagcaaaactgggactatcggtggcagcaagtgcccaaaaaagcctggcggaagctgaagctcccaggggacagctccttgatgacctaccggggccacggagtgctgcacaccctcatccgctgccggttctcccccattcatagcactggccagcagttcatctacagtggctgctccactggcaaagtggttgtgtacgaccttctaagtggccacattgtgaagaagctgaccaaccacaaggcctgtgtgcgtgacgtcagttggcacccctttgaagagaagattgtcagcagttcgtgggacgggaacctgcgtctgtggcagtaccgccaggctgagtacttccaggatgacatgccagaatctgaggaatgtgccagcgcccctgccccagtgccccaatcctctacacccttttcctcaccccagtagatccaacctccagccccatatagggtgaacctcttgataagctctctgcctcctcctccctttctcccttgtggggaatgtttggaggaatcactggcatttgatggggaataacataagcctggggctctgagcctcagctgagccctggaagattctccccatggggcagagtggtctccttacgtgctcacacccagtcagcttgggtccctatctctggccagagtttggcaggactgccattatctggggtgtggcctctgccagcaagagaagtgtcctgggtgtttttaatcatgtttgaatgttaggggttggatcctagagtagatgcctgaggccacatctgaacagacctgtcagccaggcctgccaggtcttcacgttgaggattcaactggccaatcacaggacaggtgtcctggcctttcttcctgaggtctctaggggaggggcatgggtaagggtgtttcctcagcaccctccctggggtggggattatgtctgctgtcatgtctgggtctttagggtaggacaggctgtggtatgagaggcaggagtctccacaaggcttcatgtggccccttaatagggcaggccctgccctctgggaaggtcccttcatgctggaggcacacagctttaaggaagtaggttgaagtaggactccttcgtcctctcactggctttggctccctcaataaactgtgtgggaa

SEQ ID NO: 13124 - DNA, 1341 bp, Homo sapiens
attcggcaccaggaggggtccgcccccccgcgcatggggaggtaggctcggaccggcccgcggactgctgcagtccttcgcgccctcctcgccctccccaccgacatcatgctccagttcctgcttggatttacactgggcaacgtggttggaatgtatctggctcagaactatgatataccaaacctggctaaaaaacttgaagaaattaaaaaggacttggatgccaagaagaaaccccctagtgcatgagactgcctccagcactgccttcaggatatactgattctactgctcttgagggcctcgtttactatctgaaccaaaagcttttgttttcgtctccagcctcagcacttctcttctttgctagaccctgtgttttttgctttaaagcaagcaaaatggggccccaatttgagaactacccgacatttccaacatactcacctcttcccataatccctttccaactgcatgggaggttctaagactggaattatggtgctagattagtaaacatgacttttaatgagtagtgtcttctttatcgtttgcgatttttactaccttttttcaaaagaaaaattgatgagttttgtatagctggtcagatacaaataatagtgacttcacagtttagtaattataatgggtacttgttaaacatttggtactaaattatgttgctgcaaagtaattaaaattagtatctagagctagttcctggtgaattattcatttattttgtactgttgttaggcagctctgtagttgctaatttaaccaataagtcaatttgctattcatgaagaaacgattctgagaatcctgtcaggaattggggaatgaaaaaatacacaaaataatggtctttgtcccagtagagttcatagtctatttagtgtgcatgtttttccttaatgatgtatttgatctgacttttttccttctcaaaagaatcatacttgggattacaggtacatttgatgttatatgatggataagtgaaaagtttttaaaggagattttataccttttcacattaaaaaaggtatttatattattactttgtagtgattgtcttaagaaaaaatatagcccaaatgtatagtaaaatcagcagctcaagaagaatttctgcttctctttgtagttgatgctttgttttttcctgcagtcagaaattccttgtatttgtcaaatgtataatcagcttgtattgtttttaaattaaaaaaaaatttgaataattaacttttgccatgggacaagatacaaaagtaatttcatataaagggcctctcccacccctgttctctggaaaaaaaaaagtcgacg

SEQ ID NO: 13125 - DNA, 1198 bp, Homo sapiens
tttttttttttttttttttccggagcgtaggtgtgtttattcctgtacaaatcattacaaaaccaagtctggggcagtcaccgcccccacccatcaccccagtgtgcaatggctagctgctggcctcctccatctggtccctccagcctcacagcctcctcctgaagccctttccttccaggctccagaagagcaggagacaaacacaccccactgaggcccagctttaataaagtgcctgatacagagccaggggacagaacccaggtgatacagctcccgacagccatcccaggacgacagagggtcgagggagaccctcggaagcccccagtgactccagacaaaggggcagccccaaaggcgcctccaacagttggaaaacctccctgctagagggcagaaaaggaggcctggccctttaagagccaagctaatggcagctggctgaggggctaagaaaacagcttaaggttttgtcccgtttccttcagagtcccccaaccctgaaggagtttgcgcaaaaataccctaaagttttccaggaggtggggaggtcaccccagaccccccaaagagctgagccttccagcaagggatagtggctgggagggtcccagacggggaggacagacccgagggcacttgtaggggaggtggaaagggtctcagactccgcactggaaactggtgtgggcagaagggtgcccagagagggggaagggtttgtccaaggtctcacggccagagccaagacctggatgcccagcctcccacctctgggacctccccaccgcccccacaacctccacaaccccacaaattctctggccgggcctccagacagcttctacccccacacaatctctctttctggtgctggaaattgagggggcaacaccaagttcccagctccttgggacaggaccccattatcccagcagagtggggagtgattggggggtccattcctggggctctgaaccaaggcctcatgggaaaggacatgtccttagcctcagattgactcagaaataccccctctaccctgattgactgtgcgcagaccctgactgcacaagaaagacacccctgattaaccacatagactcccaaatccctgattcgccaacagattccccaggccctgattggctggaggatacatcctcctcaaggccctgattggctgggagac

SEQ ID NO: 13126 - DNA, 1759 bp, Homo sapiens
  misc_feature (1)...(1759): n = a,t,c or g
agcaatctctgttccatcaaggttctagttgctggccctgtgtcctcaaagttcattacatcttatcaaggcctgtttgcaaaggggagatcccttttcttaaaaaaggctcaacccaaaagaaaccatttcttaaaaaattttacatagatcagttgtatttctatttagcaaaaatgagtgctctgcttttatttgggaatttcgatgaaaaagcgttcagagtagataatgttcatttatcaaaaatctggtttgggaaataccaaagaggctttgattgaattcccttttgacccgtgtgtaacttcctctggtagttagaccccagggcagctccgaatttgtgaacctgcttcctgatgaattctcccttgttcccccttgggntctgccattatttcgttttcagtgtaatttgccaagccgcagttttctgtgctgggctgtgctctagtcgcagctctgtgactgattccctcccgggtgctgagtcccctccccggccaccatcctgcgtgaatatcctgaaattcatgggcttcctcgggggcccgcccgcaggtggtgctgggtgggttccgccaccttctcctggaaggtgagccttttcctggccaagggcagcttgctttaacctctgagagtctgcgcttgggcctttagtcctgggagacccagcctccaaggaactgaaacgtgctgctgttggggagccaagaccggccttttgagccgcagcccaggggtccctgctggatcagagaaatagaaagcacccgaagacggttagtggcaattccttgacccggtttgcttccaaatgaaggccatttgtccaccaggcattgaaaagacatgacttacccagtccggcatcggacttgaaaaatcgaaattgacatcactcagctgttacatttcacatccgattcagcccccttttatttccatgtgcttttcgcagccttcctgtgttggatgaaagagaataagaattcagctgacaggaggcctctatcctgtccctccaccccaccctccacctcaatcccctcccatcttccccagacctacctcacctacttagggacctgagggcagctcctttaggcagaggacccctgggggttttagctggacttctgggggtcaggggttcctgtccccaaacttcgcaagacagccctgaagtcacaagtgctttcttttaagtggcattggcaattggcgtgtaatgatggcagtagaatctgaatctcggatcccaggcagggttcacatttccaaacctttttgatttcccctgacctctaatggctggatcctatttttctacaacctttcagtgacatcgttcaggtttctttcttggccatttaaaaaaacaaattttttttttctcacttgtaagtcaccgccagtacctaagttaggctaacggagactttgacaggactggatttttcttccaccagaagagaagccttttccgttggtttggggccacctctttgaccatgaccatgtgatgttccgtttacagtgacttgctttgggggaggggaggctctcttaaccgattcccatgttgtacagtagatggttagaccttttgtatattagtgtgttttaagttattgatttgttttatataaaataatttatttttcaggtgccatttttcattttaactttgtttttacatgggtttgttttcaataaagtctgacactggtgtccaaaagtcaacaataaa

SEQ ID NO: 13127 - DNA, 1322 bp, Homo sapiens
gtcacgtgtcagggggaagctggaaggcgtcgttctcctttcccagctctcctgcctgtccgccatgttttcaggccgggtctggcttggtcttcccccgtaaggaaatggccggggagctccaggggacccaggcgccgtcgcttcggcggagcctgggcctgaccagccaggacagcggggtaaacccgaacaattctgcgcgaggtagggaggccatggcgtccggcagtaactggctctccggggtgaatgtcgtgctggtgatggcctacgggagcctggtgtttgtactgctatttatttttgtgaagaggcaaatcatgcgctttgcaatgaaatctcgaaggggacctcatgtccctgtgggacacaatgcccccaaggacttgaaagaggagattgatattcgactctccagggttcaggatatcaagtatgagccccagctccttgcagatgatgatgctagactactacaactggaaacccagggaaatcaaagttgctacaactatctgtataggatgaaagctctggatgccattcgtacctctgagatcccatttcattctgaaggcccggcatccccgttccttaatggggcaagaatttccgctcctacctgctggatctgcgaaacactagtacgccctttcaagggtgtacggcaaagcactcattgatacccttttggatggctatgaaacagcccgctatgggacaggggtctttggccagaatgagtacctacgctatcaggaggccctgagtgagctggccactgcggttaaagcacgaattgggagctctcagcgacatcaccagtcagcagccaaagacctaactcagtcccctgaggtctccccaacaaccatccaggtgacatacctcccctccagtcagaagagtaaacgtgccaagcacttccttgaattgaagagctttaaggataactataacacattggagagtactctgtgacggagctgaaggactcttgccgtagattaagccagtcagttgcaatgtgcaagacaggctgcttgccgggccgccctcggaacatctggcccagcaggcccagactgtatccatccaagttcccgttgtatccagagttcttagagcttgtgtctaaagggtaattccccaacccttccttatgagcatttttagaacattggctaagactattttcccccagtagcgcttttttctggatttgcattcgggtgttattcttaatgtttctgtcaaagcttcttaaaaatcttcacttggtttcagccatagtttcaccttcccctgttccaggttta

SEQ ID NO: 13128 - DNA, 909 bp, Homo sapiens
gctgcgggagcgtttccggtgacggtgccgccatgagattgaccccgcgcgcgctgtgcaggcgccgcccaggccgcctggcgggagaacttccccctgtgcggtcgcgacgtggcgcgctggttcccgggccacatggccaaggggctgaagaagatgcagagcagcctgaagctggtggactgtatcatcgaggtccacgatgcccggatcccactttcaggccgcaaccctctgtttcaggaaacccttgggcttaagcctcacttgctggtcctcaacaagatggacttggcggatcttacagagcagcagaaaattatgcaacacttagaaggagaaggcctaaaaaatgtcatttttaccaactgtgtaaaggatgaaaatgtcaagcagatcatcccgatggtcactgaactgattgggagaagccaccgctaccaccgaaaagagaacctgggagtactgtattcatgggtcattgggggttccccaacgttgggcaagtcctccctcatcaactccctccggaggcagcacctcaggaaagggaaagccaccagggtgggaggcgagcctgggatcaccagagctgtgatgtccaaaattcaggtctctgagcggcccctgatgttcctgttggacactcctggcgtgctggctcctcggattgaaagtgtggagacaggcctgaagctggccctgtgtggaacggtgctggaccacctggtcggggaggagaccatggctgactacctgctgtacaccctcaacaaacaccagcgctttgggtgagtgcagtgaatgcagggcagctggggcccctcctcctagtcacctcatttaaaaaaaaaaaaacaaacaaaaaaacccccagcattataaaggtattataaacacggtaacctg

SEQ ID NO: 13129 - DNA, 681 bp, Homo sapiens
ggtgtcaaaaggatgctgaggaaaagagcttcttaatatagaccatgcctgaagaggcaccggtagggcgataacagcccctttcttctgatttcctccctggggccaaagggattttgaaaggccagaaggcaaagacttgagaatgagattcctcaggcttcccttgtgaggctgcctgggttctgccgctgggtggtttgggatgtccaagagatatcccctttcagccagtgactcggtcctcagttgctgctccggaaagacgctggggctgggaagggccctgtgtcctctggctttaaaatgggcaatgctattgaaaaacagaagcccttgaaacgaagtcatctgtacccctggaaacaaggtaagaaagccctgggcttcctttccaggaagaagcaaggaggcagttttctctgagagactggcccagcagcagagctgaagtgcctggggaatcaccttccagagcagaaagcacaggtagtccaacatgatttcaagaaaattcacaattctcctgaggaataagatgattcctctctcaatatgatggcttggtttggctgagagtttagttcagctcgagatgtttcatttggtgcagtatgtgtctgttgaaaatttttattttttttgaaatggagcctgggtgacagagtgaaactgtctcaa

SEQ ID NO: 13130 - DNA, 1776 bp, Homo sapiens
tttttttttttttcaattttatatgaagttttattctcaaaatataaaaaaaaaaaaacaaaccccacacaccaagggactaagatgatgttatttcacagcacttgcttgcctcagtctttacgaagaacacaattccaaactaatggacaagttcctccctgtgctctaggtcattcaaaggaggcaagctcctttgtcaaatcaggagctccatcagctgatcaggagcccagatgccagggtggattttctcagtgggatctagtattgctagaagagccttccttacatggcagaaacaggcacatgggcctcttcccttagaatgcatctgtctcacatgcttggggactgctgtgcaggaacacctggtgtggcctggcgaggcagcgtatacatggcccccaaaaactggtctgcaattcttcccgcttctcgcagcccactcagcagagcaccatgcactgtggctgggtagttacggatcgtatgttctcccgcaaagaagagtcgtggaatcggctgtggggcacctggaatcgaggggcccaggagtgattggctgagccattaaatcatagtcatttccagatgatcctgcagcaacataggaataagagccccgagcccagggatcagcacgccaacgagacaccacagtttctttgggctgaggtactgcactgctaccaaaaatccctttgagaatggcccaggccatcggccaacaatcacatcgtcacttatgttttccatgataccagcagcttctcctgccactagtgccaacagtattggagctttaatagaggttccagaagaggaagagctcacccctgctggcagtcgtactgccaacatgcccgaacaaattgacacttggatcccagaacacccgatcaaaacacaacaccaccttgttaaggttgccaaatcccatcctttggactgcagatgttttccactcagggagaggtggcacaaactgaacggctggtggctgctgcttcagcacacccaggggaagggtacagagaactgcgtcgcatttataaataaaggtttgactcgtggagcgggtattcacagctatcacttcacatcctgaagccgtgtagcgaacctgtcgcactgctgtattcagtttaatgtctaggccttctgctaaagccacaggcacacacgagtagccattccttactgtcaggtggctgccagtgaactcaaagtcatcatcctgatcccagtgcttaagggagagagttgagagaggtgtggcattagcaaattcaagatttgcaaaatgccaatcaagtatttgtctgtctcttgatgagagatatacatcacttgggggattcgcttccaactcctgaagtttttcttctagctttccttgtgtttcagctaattcatcatattccttgcatagggcggtcagatccctgtgtttgcttttcactaagaactcggcagtaatatctctgggtggctttacttcagatgcttctttgtattgctgatggagttctttaattttctctttcaaatttaccatcttattaagaagttctttcaattcttcctgagttttcactatcttcttccaatgttcaatctgctcatctttgacatgcttctcttgtaactgaatgacaacttccaatgcctggccaagggacacaggcttattattgaggacattgaagtctagttgatgactaaggtaagatgtagcttctagcaacccgttaaactcttgctctaccattt

SEQ ID NO: 13131 - DNA, 2241 bp, Homo sapiens
cgactccaacgacacgcggcctgaccctgatggaggaagtgctcctgctgcggctcaaggaccgcgagggttacacatcattttggaatgcctgtatatcatctggattacgtggctgtatgttaattgaatccgcattgagaggaaggttacaactagaggcttgtggaactgagacgtaaaagtctattaacaagaaaggtaatctgtaagtcagatgctccaacaggggatgttcttcttgatgaagctctgaagcatgttaaggaaactcagcctccagaaacggtccagaactggattgaattacttagtggtgagacatggaatccattaaaattgcattatcagttaagaaatgtacgggaacgattagctaaaaacctggtggaaaagggtgtattgacaacagagaaacagaacttcctactttttgacatgacaacacatcccctcaccaataacaacattaagcagcgcctcatcaagaaagtacaggaagccgttcttgacaaatgggtgaatgaccctcaccgcatggacaggcgcttgctggccctcatttacctggctcatgcctcggacgtcctggagaatgcttttgctcctcttctggacgagcagtatgatttggctaccaagagagtgcggcagcttctcgacttagaccctgaagtggaatgtctgaaggccaacaccaatgaggttctgtgggcggtggtggcggcgtttcaccaagtaactctgctcggggtgaaccattctcctttctctcaagtaaaccagtagtttttcttctgttgacttctggttttctgtaatttgtactttcccacactataattggcttctgttttacaaaatggtgggtggctttttcttttttgtacgtgtacaggattctgctggtacgagaggccttcctctttctgtttttaaaaaaagttttactgccatattggcattccattccctgttggcaacctcactgttacctgttttgggtttctggtctactttgactttcaaagtaacctccagcctcctcatacgcacagcttttgggatgacctcagcttgagtttctccatatgtgcatgtacatctagcattctgcctacagttcagacagaagtcacaaaaaggccttcaactcaccaaaggtaaatatctgtatctattaggacattttttacatagacttcagttgagatgtatacttagcaaaattatttttaaattgaaacagcacagtaaatacttaatataaaatgtcccttggggttttgcttcccatgtaaatctattgtattattacacttgttataattttaactataaaggtccaattgtttcacagagccagtttgggatgggctgcattccatttatgctgtatatagtttgaattatatataaattaccccttcttctggccacccctgctcccatcttagtattttgcaagatctaatcagttgtacacctggtgcccctcgcttgcttcaatcatggttatttgatggcaaaatcgacctcttgtcgctgaaggagagagaaaagatgtgtgtctgattggtcctgggattttttgagctgtgccatttatggtactctttgcctatgcatcccctttttagattttttttaaattttatcttactgtttttataatttctattgggaagaggcttgtgaccagtaccaatcttgagtttctttttctgtccacaagtaaattaatatctgctctgaaatgtcatttatctactcacacattcttggggaaaaaaatcaaatgtcagtcctagcagatgttgcatgtaaattggtagcaagtaatgattacaacccagaggattaagaattttgtaacagaaagctctatgttttaattttttatatacaattaggataattagcattgtcagactataaacctttgctttttaaagtttatttttactatttctttatcactttattgtatcatcaccattggtttcataatgtaaatactatatgttgaacaaattaaatgtcaaaattttttattaccatagtccctgttaatagtggggctttcgaggtgtttagagattttttttgttgttgttaacattcattgcaaaagtactagatggtgtataactctagagttgaattttaagggattccctaatatgtatactatctttttatctgaagtaataaataaacaatgatcttgaaagtgcctga

SEQ ID NO: 13132 - DNA, 1686 bp, Homo sapiens
cgggaggtggctggggagtgaattttctggaaggcgactttaaaggcgcggtgactgagcgaagggcgtttgggtactgccgtcgccgccgcccagccggggaggggtgcgttagtgtcaggaagcgggctgcgccgaggtcgtagcggaaccagctggcgaccccgcagaatgaaccacaagagcaagaagcgcatccgcgaggccaagcggagtgcgcggccggagctcaaggactcgctggattggacccggcacaactactactagagcttctcgctgagcccggcggccgtggcggataacgtggaaagggcagatgctttacagctgtctgtggaagaatttgtggagcggtatgaaagaccttacaagcccgtggttttgttgaatgcgcaagagggctggtctgcgcaggagaaatggactctggagcgcctaaaaaggaaatatcggaaccagaagttcaagtgtggtgaggataacgatggctactcagtgaagatgaagatgaaatactacatcgagtacatggagagcactcgagatgatagtcccctttacatctttgacagcagctatggtgaacaccctaaaagaaggaaacttttggaagactacaaggtgccaaagtttttcactgatgaccttttccagtatgctggggagaagcgcaggcccccttacaggtggtttgtgatggggccaccacgctccggaactgggattcacatcgaccctctgggaaccagtgcctggaatgccttagttcagggccacaagcgctggtgcctgtttcctaccagcactcccagggaactcatcaaagtgacccgagacgaaggagggaaccagcaagacgaagctattacctggtttaatgttatttatccccggacacagcttccaacctggccacctgaattcaaacccctggaaatcttacaaaaaccaggagagactgtctttgtaccaggaggctggtggcatgttgtcctcaatctcgacactactatcgccatcacccaaaattttgccagcagcaccaacttccctgtggtatggcacaagacggtaagagggagaccaaagttatcaaggaaatggtataggattttgaagcaagagcaccccgagttggcagtcctcgcagactcggttgaccttcaggagtccacagggatagcttccgacagctccagcgactcttccagctcctccagctccagttcgtcagactccgactcagagtgcgagtctggatccgagggcgatgggacagtgcaccgcaggaagaagaggaggacgtgcagcatggtgggaaacggggacaccacctcccaggacgactgtgtcagcaaagagcgcagcctcctccaggtgacccagcaaggctgttgtctgtatggaaggacacgctcgcggcaagggcagggcctggggagggtggcctgtccagtcctgcagacaaggggaggcctgacagagcccaagaatgaggacaccctcggcacgggaacccattcacttagcgtttgctccagtagctttccctctgctaccaatgcagataaacgcggcttgttttactcaggcaagagaatgtgaatagtgccaagaaaatcctttacattatttaataaaaattgaatccattttctatcttggaaaaaaaaaaaaaaaaaa

SEQ ID NO: 13133 - DNA, 591 bp, Homo sapiens
  misc_feature (1)...(591): n = a,t,c or g
agccgaaaaccccggagggccttagggggaacacactgaaaccgtacccnggtagcnagtgccttctcacagatccatttattcatgccatgaagtaaacggtacttatacaagtgtacagtgacgttccacgctccccatctaacacggcttgctgaaatttacaggcagactgacgttttctttcacatgtactccaagtaaatctggttagtgatgaccaggagcaggcgctgaagctttcaaagccttacttcttttataattctgatattaaagtcttgttcaaagttccccaattgggccaggtgttgtggctcacgcttgttaattccagcactttggggaagccaagattgggaggactgcttgagtccagggggttcaagaccagcctgggggtaacatgggcaaaaccccatctcagcagcccggattttataaacgatgaagcccatcagccccattcctatccaaatctcctggtaaactttggtgtagtagggcttcatggggatccatacgtttttaataatactttgaagcatcttggcgcaggacagacggctcagaacgcacnacaaatctgcc

SEQ ID NO: 13134 - DNA, 474 bp, Homo sapiens
ggtggatggggtgtctgcgtgtgcaaacgggttccctagcaaagtatttgtgggggtccaatgcaaggaggcagggaagaaagggggcctgcaaaggaagcagtagagtgacttaaacatcttgcgaggcagcctgcctggtttatgggagaactctgaagcccatgatgttttcctggaaggctgttcctacagacggggtttataagtactgatactggacaggatgagaagggagtaggatgtcatcctgtctcaggcctcggataggaagctgcctgccagcaagaggagactgatgtgccccgggtgcaccccacctcctttgaggtccaagatgctcctggggagttgaccgacatttgggaagataataggaggcattggggaaactgctccccaatatattcctcttttcctttcttcaagctgcgtaacaaggggcctttagctagtttctccgagaggggcggg

SEQ ID NO: 13135 - DNA, 1812 bp, Homo sapiens
gcgagcggaaagcagccgccctgaggacattaaggatatgaccaaagaccagattgctaatgagaaagtggctctgcagaaagctctgttatattatgaaagcattcatggacggccggtaacaaagaacgaacggcaggtgatgaagccactatacgacaggtaccggctggtcaaacagatcctctcccgagctaacaccatacccatcattggttccccctccagcaagcggagaagccctttgctgcagccaattatcgagggcgaaactgcttccttcttcaaggagataaaggaagaagaggaggggtcagaagacgatagcaatgtgaagccagacttcatggtcactctgaaaaccgatttcagtgcacgatgctttctggaccaattcgaagatgacgctgatggatttatttccccaatggatgataaaataccatcaaaatgcagccaggacacagggctttcaaatctccatgctgcctcaatacctgaactcctggaacacctccaggaaatgagagaagaaaagaaaaggattcgaaagaaacttcgggattttgaagacaactttttcagacagaatggaagaaatgtccagaaggaagaccgcactcctatggctgaagaatacagtgaatataagcacataaaggcgaaactgaggctcctggaggtgctcatcagcaagagagacactgattccaagtccatgtgaggggcatggccaagcacagggggctggcagctgcggtgagagtttactgtccccagagaaagtgcagctctggaaggcagccttggggctggccctgcaaagcatgcagcccttctgcctctagaccatttggcatcggctcctgtttccattgcctgccttagaaactggctggaagaagacaatgtgacctgacttaggcattttgtaattggaaagtcaagactgcagtatgtgcacatgcgcacgcgcatgcacgcacacacacacacagtagtggagctttcctaacactagcagagattaatcactacattagacaacactcatctacagagaatatacactgttcttccctggataactgagaaacaagagaccattctctgtctaactgtgataaaaacaagctcaggactttattctatagagcaaacttgctgtggagggccatgctctccttggacccagttaactgcaaacgtgcattggagccctatttgctgccgctgccattctagtgacctttccacagagctgcgccttcctcacgtgtgtgaaaggttttccccttcagccctcaggtagatggaagctgcatctgcccacgatggcagtgcagtcatcatcttcaggatgtttcttcaggacttcctcagctgacaaggaattttggtccctgcctaggaccgggtcatctgcagaggacagagagatggtaagcagctgtatgaatgctgattttaaaaccaggtcatgggagaagagcctggagattctttcctgaacactgactgcacttaccagtctgattttatcgtcaaacaccaagccaggctagcatgctcatggcaatctgtttggggctgttttgttgtggcactagccaaacataaaggggcttaagtcagcctgcatacagaggatcggggagagaaggggcctgtgttctcagcctcctgagtacttaccagagtttaatttttttaaaaaaaatctgcactaaaatccccaaactgacaggtaaatgtagccctcagagctcagcccaaggcagaatctaaatcacactattttcgagatcatgt

SEQ ID NO: 13136 - DNA, 1905 bp, Homo sapiens
ctaaggagaggaggaagcctcaagtccattgtttattaccccgactcttagcccagcacacagtaggcactggagaggaatgattcccagtttaaccacactacggtaccttttatgaagaaaaattagagcataaaatctactacaagctccataggaactcaaagatgagggcaaaactgtgagccaagaagcagagaaagaaaatagaaccagttattcttgatttaggggacctcaaccttgggttcagtctctgaggacaaagggaaaggtagttgttggcctgcctctcgcctgcacgtcactgctggactagctgtcgcatgtggctgggagctgcaaggccagtgcttgaggggccccagcagttccacaggtggtgaagcctgagttggcagaggaggagccagaagagaactgccctttctgcactggtggaaactagttatttatgccatgtggagagccagtgagatagatagatagtctgtttgttttgaggacttggaaagttgttcctatgaagcctggagcttggatggttttgagaggttaatggtgcctccacactcactcttccctagttccaggattactgtcctagcagctaacggttctactctcttccccagagtgtagacaggcagcaggtcttccccacagctctgaaaggaccctggtgacagctacaccctcagcaccaggagctggccttcctgatgagggaggcttccaggaaacacagaatccacatgaccttaagattatttacaactcagtcatggtgctgctgtcctccaggcttactggcccctcctgactggcatcaggggcttcctcaggtggtggagagagtttactttcaacaactagtttattcaagaaaagaaaagaacttactgattcctctgttcctaaagcaagagtggcaggtgatcagggctggtgtagcatccgcgttcctttagtgcagctaactgcactttgtcactgatgaccaaggaggaaatcactaagacatttgagaagcagtggtatgaacgttcttgggacaagccacagttctgagccttaaccctgtagtttgcacacaagaacgagctccacctccccttcttcaggaggaatctgtgcggatagattggctggacttttcaatggttctgggttgcaggtgggcactgtatggctgggtatggagcggacagcccccaggagtcagagcctcagcccggctgccctggtggaaggtacaggtgttcagcaccttcagaaaagggcataaagtggtgggggacaattctcagtccaggaaaatgcattgaccattgctggctatttgcttacctagtaagaattggattcatttttgaccagattattcttctatgcttttttgcaataaatcaaatcccacatatctacaagtggtatgaagtcctgcaccccccaggaggcctgtccaggcatgtcttcagaggcagggtgggttacactcatttacctcccctctccccaccaaattatgacacaaacgagtatgtttcctctctagaaccctgtaatgcctcctcccccatccccagagctccttactgtaggtcttacccctggacaaggattttttcaagttggaggcacagaacatgagcaatctgacattcccacagcccctcaaacatgcaaggctactaaggcaggaggagtataaatgatggatattgaccaagacctgcttggacggagaccgccatattatctgttctcttcgttcacaaaacagccttcacttgtctcagaatttgatggacacatactgtgatgagcaggagcttcagatgcactctttacacattttgttgaaataaacctctacatttgtaggaagaaaaaaaaaaaaaa

SEQ ID NO: 13137 - DNA, 548 bp, Homo sapiens
cggacgcgtggggtggagctgttcgaggactcgcgggtgtgcagtgcacctatgatatgtgttttagaaatagccattaaactttggtttgaatgaagaatgtctctcaatccacctatatttctcaaacgaagtgaagaaaatagttcaaaatttgtggaaacaaaacagtcacaaactacttccatagcttcagaagatccccttcaaaacttatgtttagcatctcaagaagttcttcaaaaagctcagcaaagtgggagatcaaaatgtctcaaatgtggtggttccagaatgttctactgctatacatgttatgttccagttgaaaatgtacctattgaacagattccacttgtgaagcttccattgaagattgacatcattaaacatccaaatggaaacagatggcaaaagtactgctatacatgcaaaactcttagcacctgaatttgtaaacatttacacgtatccgtgtattccagaatatgaacgaaaaggaccatgaagttgcactcatttttcctgggacctcagtctatctcaat

SEQ ID NO: 13138 - DNA, 1295 bp, Homo sapiens
gcctgggcagtggtgtggcatccatcatggtgaatggctccttcaacgatggtcggtggcaccgagttaaggccgttagggatggccagtcaggaaagataaccgtggatgactatggagccagaacaggcaaatccccaggcatgatgcggcagcttaacatcaatggagctctgtatgtgggtggaatgaaggaaattgctctgcacactaacaggcaatatatgagagggctcgtgggctgtatctctcacttcaccctgtccaccgattaccacatttccctcgtggaagatgccgtggatgggaaaaacatcaacacttgtggagccaagtaacaccagctggccttgtccaagggacagagccttctattctgagaatcccaggggccctcagaccctgcctgatgctatatgcagaggcccagggaccaggtgtgtttcctctcaccaagaagaaagtacacactgatgagaaactgagaaccaagacaggcatccctgggtggcctttcctgctgacactccacgagctgacccagcagaattctctgtgtaggaagcatcggactttgtccattgaatatgtagcggctgccagagatcacacatcaatgcaaattccagagcctgtctgctatagctcagtgactgtgttgtgattcatagtacattaaaaagagagagagagagaaagaatcccacagggcactattaaaatacttctctccttccctgactcatgacactcttcctgacagcagaatgactgtgtgaccttgaacttcacatttcccacattggcccttggattgttcggattaaccccttccactcctcactggctggttcactgtgttctgactagtccataaaaataaagatggaaggagatcaaacacagaatcataatcataatgcggcccccttccccagagcttacctcgaatgtgaaatccctacttcttataatgcagagttaaggagctgagcccccatgattttgtagctgtacttttgtatgtgtatatttttatagctgcagattgtccacacagtatacttttggaagtttgggtggatgactctgaattcttgcacacctttcctaaaaatttctcccaagagagacttgtttgggccttttgtggtgtcagtggaatggataggtaacttgggtgggcaacttggggagctgaccattctcttttggtaaatgttgacggctcaagaggatgaatatgaagctttccaagataagcagattaaaaggaacatgtgttaccgaaaaaa

SEQ ID NO: 13139 - DNA, 518 bp, Homo sapiens
gctcgacatagattccaatacaataataactgggaggcttcaacaccctactttcagcattaggcagatcatccagacagaaaatcaacaaagaaacatcagacttaaactacatactagatctaatggacctaatagatatttacagaacatttcacccaacggctacagaatacacattcttttcatcagcacatggaacactctaaaggatagaccatactttaggccacaaaacaagcctcaaaacattcaaaaaaattgaaatgatagcaagcatcttttctgaccacaatggaatacaactggaaatcaataacgaggaatgttggaaactatacaaacacgtggaaattaaacaacatgctcctgaaagactaatggatcaatgaagaaattaagaaggaaatttaaaaattgcttgaaacgaatgaaaatggcaatacaatgtaacaaaatttatgggatatgacaaaagcagtactaagaatgaagtttataacataaacacctatgtc

SEQ ID NO: 13140 - DNA, 1372 bp, Homo sapiens
cggcacgaggtcgtgatgtcaacaagcccatcattgctgtctttgagaaacaacgagacttcaaaaaattgtcagatctctactacgacattcatcggtcatatctgaaagtggcagaggtggtgaattcggagaagcggctgtttggtcgctactatcgtgtggcattttatgggcagggcttttttgaagaagaagaaggtaaagagtatatttataaagagcctaagctgacaggtctgtccgagatttcccaaagattactcaagctctatgcagataaatttggagcagacaatgtgaagataatccaggattccaacaaggtaaaccccaaggatttggaccccaaatatgcctacatccaggtgacctatgtgacgccgttctttgaggaaaaggaaatcgaagaccggaagacagatttcgaaatgcaccacaacatcaaccgctttgtcttcgagacacccttcacgctgtcgggcaagaagcacggtggggtggcggagcagtgcaagcggcggacgatcctgacaacgagtcacctgttcccctacgtgaagaagagaatacaagtaattagccaatcgagcacagaactgaatccaattgaagtggcaattgacgagatgtccaagaaggtttctgagcttaatcagctttgcacaatggaagaagtggacatgatcagactgcagctcaaactgcaaggaagtgtcagcgtgaaggttaatgctgggccaatggcctatgcacgagcttttcttgaagaaaccaatgcaaagaagtaccctgacaaccaagtaaagcttttgaaggagatcttcaggcaatttgcagatgcatgtgggcaggcccttgacgtgaatgagcgcctcatcaaagaggaccagctggagtaccaggaagaactgaggtcccactacaaggacatgctcagcgaactctccacagtcatgaatgagcagattacgggcagggacgacctgtcaaagcgcggagtggaccaaacctgcactcgagtaattagcaaagcaactccggccctacccacggtctccatctcatctagtgctgaagtctgagggctctgcagcatcagacccacctctaagagaactttctgaatttgcagctaatctcggggaagagaaagataggtttaatttatttgaagttttcatggtgttaatatttttgtttacctcgctagcttcagaattttgccaacctctgaatttgcacattttgtataattttttttttctttgagcagtgttgatcaagccagggttggaatatttgccatggaaattccagtggaatgtgtaggctcaaatggcaaaccctaaggttttgctggttcaggtta

SEQ ID NO: 13141 - DNA, 2120 bp, Homo sapiens
  misc_feature (1)...(2120): n = a,t,c or g
aagaacagcagctccaccaaatgaagtccctctcacgcagctccacagcgctgtctcgtgaatggacagtagccacttacaaacaaatcaacatttttaaaaagaaaatgtaaaggtgtgttttggggcatttgtggaacttacccatggggactaatatggaaaaggtctgtccatagtggttccctgaagactggaattacttcagcaaaacttccccatgaacagctaatgtgtagtgaaagaatgagctagcaaatgagttttagcggggacaaaaaatcaaacaaaaaagtgaatgcttagaaccttctcaaagcagtcacaagtacagacacttcacttagcctagggggccttccagggttcttgtggctgttgtcagagcaggagctgggggagggaagacttgttctctctttcttgaggggtggcattaggaacttacgaaaccagagacctttccctatgacttggcagtatgtgaatatcctctacacttagttattgataaacttcttaaagagatctgttattttcaggtagtgccataatctgcacttagcattggcttgcttcagttgtttctcttcccagccagtatgccacaggtgaactttcggggttgtcattaagtaagttgtgaaatttctgtaataacaaaggcagtccgcattcttccctttcccccaaattcctagggcaaaacttttttatggtgctgttaacatgggagtcacacaagccgcctgactttttctcattgccattagtaatgactgatggaaaacccagccaccactgtgatgcgaaatgatcagtctgttgcctgaaacagcccagtcctcttaactgaaacagcattctacttcttgttccaagatgagcctctgcaatattctggcaatttaatatacccccctacaaaagcactccacagcttttacactattttgactttgagttataactagtattattcatgttttcataaaaagaagttaggtgacccagagctataatcatccatcaagtcttccacaataattcccaactcataaattgctttcctaacaactagcaaaagctattgttcataatggcatttctaaagcttttgggcactgtgtaccaggatgaggaagagaagaaatgaggagcctgtcttttaatattccagtatttgtgtgtttgattttttttgacaacagtacatatatctatttctctagggatatggaagtaagtggagaagggcctacctttttaaaggacaaatataaaaatagcaacagtatctttgctaatcttactaatggatattgattaaaaaaaaaaaacctcagtactgcatcactgtgttgggatcgtaccaggacaatagggtcattccatatgataaaactaaaggactaaatttgttttataatgatgtcttagagggactgaaaagtttaaggaggcgatcaaactaaaatgtcttaatggctgtgtgacacacgtaaggnaaggaaagggggtcacgcacatcatgtactggaatgatctgcattaaacattgacttgtcttcagaaataagactgaagggttttgttgttccttacgagttttccgtgttacatcacctaaaagagatttcttttaaaaacttnctagactctttgcaaaatgtatattactaacatagtttggaagaaaaattgagtagtggtaagttttgttcaagcacaatgttgaatgttaagcttcctgtattaattttagttcagttaatggttcagcccatacaaaggtgctatcctagggattttatgaattcctgaaaggaaaatagaatatgatcaattccttgccctgtggaagagtgcagaactgtggttttgttttcctttgacttctgtaaaatgtgaccgtttgacatctgtggtagattgaacggaatatcacagctgctgagtttactccatagctttcaaaccttttttattttaagaaattcttgaaaaaccctatgttccatgggaacataaagttattatagtgcctcctaaggggttaatataaatcaaggaggaagtttatatttaaggaagaattggagtgacgtatcctagaaaaa

SEQ ID NO: 13142 - DNA, 761 bp, Homo sapiens
taaatatgtctacaaggttttattaaaattaagtttaacattaataacacactaatataaaggtaaaatttagcttatctggtataaaagtcatacaggaagcattagtaaatataaaatagcgtttagctttcttttgtctaaaaactaataaaaattggtgctaaaggaagcattcattttactagaggatcataaaagttaaagacttaaaacaaactttggcaattaagacagcataccaagatgcaaatgcctggttgaaatggatcaaatattccatctgcaggttaaacaaaagcaattagcatgcttgtgcacatggcaggccagagaccctgattgtcccccttccactaaggtggtcctccagtcgaccaggcatgggctgcatggtagctcttttccaggattctatagcctggagtaataagtcatgccaagctctctctgctatatcccaaagtccctgcgggtcagcccctgagggccatccagcttccatctcccaacacttaagttcacttcttgtctctcatggcagggaggagacttagcattccttggagacctgaagggatgcagtgagcttaagaattttcaagagcttatcactcagtcagcccttgttcatcccaaagcggatgtgtggtggtattgtggtagacctttattggggactctgccgagtaactagagtggcacttgtgctttagtccatttggctatccctttcaccctgacatttcatcaacaagagg

SEQ ID NO: 13143 - DNA, 1114 bp, Homo sapiens
ctagagagcgccggaagcggtccgagaatgaagagtgtgatctaccatgcattgtctcagaaagaggcgaatgactccgatgtccagccttcaggagcacagcgggccgaggccttcgtgagggccttcctgaagcgcagcacgccccgcatgagcccgcaggccccgcgaggaccagctgcagcgcaaggcggtggtcctggagtacttcacccgccacaagcgcaaggagaagaagaagaaagccaaaggcctctctgccaggcaaaggagggagctgcggctctttgacattaaaccagagcagcagagatacagccttttcctccctctccatgaactctggaaacagtacatcagggacctgtgcagtggggctcaagccagacacgcagccacagatgattcaggccaagctcttaaaggcagatcttcacggggctattatttcagtgacaaaatccaaatgcccctcttatgtgggtattacaggaatccttctacaggaaacaaagcacattttcaaaattatcaccaaagaagaccgcctgaaagttatccccaagctaaactgcgtgttcactgtggaaaccgatggctttatttcctacatttacgggagcaaattccagcttcggtcaagtgaacggtctgcgaagaagttcaaagcgaagggaacgattgacctgtgaattctttgccgtctaaggcagttgtttatgacagctgaaaactggacactccctaaatgtccacctttcagtgaagagatagttaagccaattccatttatagaccacctccagccagtgacgctccgagttgaggatgttgaacaacatgggaaggtcgcagcgtactaagtgaagaagtcagaggacagaggaatttctctttctaggagattttcattttgtgtgactcccatggggaggaacagactggcaggaagcacaccggggttaacactggttgacttgaataggattattcgatttttaaaaatacttttccatgttttctgagtgctctatgataaatcagttgcatctgtgataatacaatacatatgtggacataaacagggatcaaataaaggaggtattgctgcaaa

SEQ ID NO: 13144 - DNA, 1187 bp, Homo sapiens
  misc_feature (1)...(1187): n = a,t,c or g
gacgtgaaaagacagggagtgggttctcaccaaagaaaacataatgaccattcagaggagtcagtagcacagctcacagataaagtattttattactatctgaagttttcttttgttttcatgcaggacattttaaaaacgtatatggcagcagaaacttgtttctcaatagaaaaaatacattcagaggcatttctgggatagtctatctgtgttagtatttggtgctatctatgtccagccaagttatctaccctcaaattctgactaatcatgtttgtgctttgggtatttaaaattacatacatatatattctttttgccaaaaacaaaagtcttgcttcttgtcaaatgattgctaaagtagatcttacattttttgttattatgtatatatttatacacacccccaacacacttagtgatttctgttatttcctagggagcacagctttaaggctatgagatacaactaaaaggagcccatctatttggttttccagccaattattgtactcacatttcaggggagaatctgaaattcctgtcatgtttacagcaacaatctatcattcctggctagctctcagcctctctctccttccatagggttagaattatgtcattttgttacttagtggccacgtctatttctgagaaagactggttacatttatgtggcatctcaggtatcattaaggaaaagccagagcaggggtgagcagaggtcaaaaccacagacgcagcagggccatttgccgcctttggccgggatcacaaccactgcagtctcccagcaggtaggccttgccaagcctaaggctccccatccaatctagacagaggggcgctcagagcagactttgccgtagccatgtctggtgagcacaacagggaatgaattgggcactccactcccccgtctctctggcccagccctgaactagatgagctgcatttcatggagcccattttaaaacctctttccttatgactttgttactcaagtccagagttctctgtgcacttctgctagataaggagtgtaagccctgccccccagcactggnagcacgctgggccctccccacacaggacaccgtgcagttccgggggaaactgagnnaaatnaagcttgaatccangaaannaaaatggcttgcttttattggaaagggnaaanntcc

SEQ ID NO: 13145 - DNA, 1058 bp, Homo sapiens
ggcgcattttcttgcaccaactaatgcggtgtcgctggcggctgaggagggcggagagttctgtggtgaaatagtgggaaggattcatgtaggcatcgggaagagcctaagtccacattataaaataggaagttgatgcggggtacagttactcccggaccggcggcgtgaaagtcgtgatatcatcgttgaactattagctttgaagtttaaatccaatggagaagactcaagaaacagtccaaagaattcttctagaaccctataaatacttacttcagttaccaggtaaacaagtgagaaccaaactttcacaggcatttaatcattggctgaaagttccagaggacaagctacagattattattgaagtgacagaaatgttgcataatgccagtttactcatcgatgatattgaagacaactcaaaactccgacgtggctttccagtggcccacagcatctatggaatcccatctgtcatcaattctgccaattacgtgtatttccttggcttggagaaagtcttaacccttgatcacccagatgcagtgaagctttttacccgccagcttttggaactccatcagggacaaggcctagatatttactggagggataattacacttgtcccactgaagaagaatataaagctatggtgctgcagaaaacaggtggactgtttggattagcagtaggtctcatgcagttgttctctgattacaaagaagatttaaaaccgctacttaatacacttgggctctttttccaaattagggatgattatgctaatctacactccaaagaatatagtgaaaacaaaagtttttgtgaagatctgacagagggaaagttctcatttcctactattcatgctatttggtcaaggcctgaaagcacccaggtgcagaatatcttgcgccagagaacagaaaacatagatataaaaaaatactgtgtacattatcttgaggatgtaggttcttttgaatacactcgtaatacccttaaagagcttgaagctaaagcctataaacagattgatgcacgtggtggg

SEQ ID NO: 13146 - DNA, 1705 bp, Homo sapiens
tttttttttttttttttaccaagttcataattttattatactctgaatagagatgatatttaaggagcagagaaaatgactatacaaaagatttatagaacattcatttacatactggatatattctttacagtatcagaaaagtaaaaatatgcactaacaaggcagagaagacgttacaaggtatttgatgctgaggaataaatgcacagtgacttttaacatggctatagcttaacactggaggaatacaacaatacgttcttttactgagtagttagtaggaccctggctataacatgcgttgggcacagttcgtgaactctccgcatttactccccagggcagtacgtgcctgtccagcgggagccctggagacaaaatgcctggaaacgttccttttcctgtggccctagagccggtgtccacggtgggggctctctcacggtttctgagcccacagtacaatctgtgatgacacacagcttgttctgtttaatgcacatgtaacacaaaaggaagaaagaaacttcctataccagctcttcagaaatcgtggaaacttgcttcctttggttcctcagagggagctatctgcttggagcaaattccccgatgcccttgaccacgtttaccttgtgtaaaaatcacacctggccaatgagttcaaaaagcacgtttgcagggccttcctgaatgccgtcgaggcatggccttcatgagggccatcgcgggcaccccgatgtctctgtgattccctggcaggctgcgtttctcaatactgagaccctagtttgctctgacttctaaatgagctctctcatccttcatcagaaggataaggaacctggcctgcactctttgggttaaacatgggtagagaccgtctcaggatgaggacctcttggggaaagtacaaacctctgctccctgtggccacattcctgcagtggatgaaaaaccgagatgctagaggcctctgctaaagacatcagggtcaacaccatggggatctgcttgaaaatgccagcacctcctgacagtcatgccaccgcaagttagaggaggaggtccacaacgaccaaggcaaacatttggcacagaaatgaggcacttggtttggtgcatcaataggagctaaaaagtggaatggtccacctgctttcacacacgcatacacgcacgcatgcacacacgcacacacacacaacacccactgtgatttggctgcttccaactctgcctgtttctaagttttcctcggcccctcactttaaagcagagttcacaaagcacattcccaaaccccagctccctgacaggagcttgtgacaccagtgtggcctaagaatgggggatttgacttttgaaagcagaggagggaatttcgggctggatcgcaatcaggacagtcagcatgcctgcagagcacctaggctgtgagaggatggggccaaggccttattctgatgtggcccagctccatctttcactctggggatgttccagggtcacaaattcccccaaacctttgaccacgaacagattcaagcaggaaaaccagggcattggaatgttgaaataagcctgaaatacacttgattcagtggcttagatgatggcaaacagtggcactcaaaaacagcttgtcagtaccggggtttcttctctttttcctcatcctcccttctgctcacacatgccc

SEQ ID NO: 13147 - DNA, 1716 bp, Homo sapiens
gattctcacaagtgttagctttgtggaaatgggaaacagacctctggaatctcttatacttagcccagcggtgggttggagatggcacggaattaaagatttgggaagagactgactcaccgtcacacccctcacttttgtgctatagtggatcaatcttcctgtcctacaactgacaaaggatcccctaaagacccctgggaaggctggaccatggcacaagaactgccttcatccatcaccgggagcaagtgtggaagagatgcatcaacatttgggcgtgatgtgggcctttttggggtgctaaatgaaatttgcaaactcagaagaagaggtgtttgagtgggtgaagacggcatccggctggggccctggcactctgtcgatgggcctcttccctccatgggtccctgttcccccatctgtctctcaggagcgaagatctgatcgctgaatttgcccaagtcacaaattggtccagctgctgcttgcgtgtctttgcatggcacccccacaccaacaagtttgcagtggccctgctagatgactcagtccgtgtgtataatgccagcagcaccatagtcccctccctgaagcaccggctgcagcgaaatgtgggcgtctctgggcctgggaagccccttagtgcctctgtcttgggctgtggcctgccagagctggcattcttatctggaccctgggaccctacctccttgtctacccgaccctcttctgggctgtgcccaagtgctgttttcaccctgggcatacacctgttaccagcttggcctgggcccccagtggggggccggctgctctcagcttcacccgtggatgctgctatccgggtatgggatgtctcaacagagacctgtgtcccccttccctggtttcgaggaggtggggtgaccaacctgctctggtccccagacggcagcaaaatcctggctaccactccttcagctgtctttcgagtctgggaggcccagatgtggacttgtgagaggtggcctactctatcagggcgctgtcagactggctgctggagcccagatggcagccgactgctgttcactgtattgggagagccactgatttactccctgtcttttccagaacgttgtggtgagggaaaggggtgcgttggaggtgcaaagtcagcaacgattgtggcagatctgtctgagacaacaatacagacaccagatggtgaggagaggcttgggggagaggctcactccatggtctgggaccccagtggggaacgtctggctgtgcttatgaaaggaaagccaagggtacaggatggtaaaccagtcatcctcctttttcgcactcgaaacagccctgtgtttgagctccttccctgtggcattatccagggggagccaggagcccagccccagctcatcactttccatccttccttcaacaaaggggccctgctcagtgtgggctggtccacaggccgaattgcccacatcccgctgtactttgtcaatgcccagtttccacgttttagcccagtgcttgggcgggcccaaggaaccccctgctgggggtggaggctctattcatgacctgcccctctttactgagacatccccaacctctgccccttgggaccctctcccagggccaccacctgttctgccccactccccacattcccacctctaagaataaataagttttccttttgttttccaaaaaaaa

SEQ ID NO: 13148 - DNA, 2963 bp, Homo sapiens
ggcggagagggccggccgccggcacattcctgtggaggccgcagcgggtgcggcgccgacgggaggagcagcgagcgagcgacgaacgcgagccgagcctcccgccgtcgccatgggccagaacgacctgatgggcacggccgaggacttcgccgaccagttcctccgtgtcacaaagcagtacctgccccacgtggcgcgcctctgtctgatcagcaccttcctggaggacggcatccgtatgtggttccagtggagcgagcaggcgactacatcgacaccacctggaactgcggctacctgctggcctcgtccttcgtcttcctcaacttgctgggacagctgactggctgcgtcctggtgttgagcaggaacttcgtgcagtacgcctgcttcgggctctttggaatcatagctctgcagacgattgcctacagcattttatgggacttgaagtttttgatgaggaacctggccctgggaggaggcctgttgcctgctcctagcagaatcccgttctgaagggaagagcatgtttgcggggcgtccccaccatgcgtgagagctcccccaaacagtacatgcagctcggaggcagggtcttgctggttctgatgttcatgaccctccttcactttgacgccagcttcttttctattgtccagaacatcgtgggcacagctctgatgattttagtggccattggttttaaaaccaagctggctgctttgactcttgttgtgtggctctttgccatcaacgtatatttcaacgccttctggaccattccagtctacaagcccatgcatgacttcctgaaatacgacttcttccagaccatgtcggtgattgggggcttgctcctggtggtggccctgggccctgggggtgtctccatggatgagaagaagaaggagtggtaacagtcacagatccctacctgcctggctaagacccgtggccgtcaaggactggttcggggtggattcaacaaaactgcccagcttttatgtatcctcttcccttcccctcccttggtaaaggcacagatgttttgagaactttatttgcagagacacctgagaatcgatggctcagtctgctctggagccacagtctggcgtctgacccttcagtgcaggccagcctggcagctggaagcctcccccacgccgaggctttggagtgaacagcccgcttggctgtggcatctcagtcctatttttgagtttttttgtgggggtacaggagggggccttcaagctgtactgtgagcagacgcattggtattatcattcaaagcagtctccctcttatttgtaagtttacatttttagcggaaactactaaattattttgggtggttcagccaaacctcaaaacagttaatctccctggtttaaaatcacaccagtggctttgatgttgtttctgccccgcattgtattttataggaatagtgaaaacatttagggacacccaaagaatgatgcagtattaaaggggtggtagaagctgctgtttatgataaaagtcatcggtcagaaaatcagcttggattggtgccaagtgttttattgggtaacaccctgggagttttagtagcttgaggcaaggtggaggggcaagaagtccttggggaagctgctggtctgggtgctgctggcctccaagctggcagtgggaagggctagtgagaccacacaggggtagccccagcagcagcaccctgcaagccagccctggccagctgctcagaccagcttgcagagccgcagccgctgtgggcagggggtgtggcaggagctcccagcactggagacccacggactcaacccagttacctcacatggggccttttctgagcaaggtctcgaaagcgcaggccgccctggctgagcagcaccgccctttcccagctgcactcgccctgtggacagccccgacacaccactttcctgaggctgtcgctcactcagattgtccgtttgctatgccgaatgcagccaaaattcctttttacaatttgtgatgccttaccgatttgatcttaatcctgtatttaaagttttctaacactgccttatactgtgtttctctttttgggggagcttaactgcttgttgctccctgtcgtctgcaccatagtaaatgccacaagggtagtcgaacacctctctggcccctagacctatctggggacaggctggctcagcctgtcttccaggggctgctgcggcccagccccgagcctgcctccctcttgggcctctcatccattgggctctgcagggcaggggtgaggcaggtttctgctcataagtgcttttggaagtcacctacctttttaacacagccgaactagtcccaacgcgtttgcaaatattcccctggtagcctacttccttacccccgaatattggtaagatcgagcaatggcttcaggacatgggttctcttctcctgtgatcattcaagtgctcactgcatgaagactggcttgtctcagtgttttcaacctcaccagggctgtctcttggtccacacctcgctccctgttagtgccgtatgacagcccccatcaaatgaccttggccaagtcacggtttctctgtggtcaaggttggttggctgattggtggaaagtagggtggaccaaaggaggccacgtgagcagtcagcaccagttctgcaccagcagcgcctccgtcctagtgggtgttcctgtttctcctggccctgggtgggctagggcctgattcgggaagatgcctttgcagggaggggaggataagtgggatctaccaattgattctggcaaaacaatttctaagatttttttgctttatgtgggaaacagatctaaatctcattttatgctgtattttatatcttagttgtgtttgaaaacgttttgatttttggaaacacatcaaaataaataatggcgtttgttgtaaaaa

SEQ ID NO: 13149 - DNA, 2201 bp, Homo sapiens
  misc_feature (1)...(2201): n = a,t,c or g
ggggccccgtgatctcaacggtcctgccctcggtctccctctaaacccgccccgccctgggccaggtgttcgaatcccgactccagaactggcggcgtcccagtcccgcgggcgtggagcgctggaggacccgccctcgggctcatggcggccccggtccgcatgggccggaagcgcctgctgcctgcctgtcccaacccgctcttcgttcgctggctgaccgagtggcgggacgaggcgacccgcagcaggcaccgcacgcgcttcgtatttcagaaggcgctgcgttccctccgacggtacccactgccgctgcgcagcgggaaggaagctaagatcctacagcacttcggagacgggctctgccggatgctggacgagcggctgcagcggcaccgaacatcgggcggtgaccatgccccggactcaccatctggagagaacagtccagccccgcaggggcgacttgcggaagtccaggactcttccatgccagttcctgcccagcccaaagcgggaggctctggcagctactggccagctcggcactcaggagcccgagtgatactgctggtgctctaccgggagcacctgaatcctaatggtcaccacttcttaaccaaggaggagctgctgcagaggtgtgctcagaagtcccccagggtagcccctgggagtgccccaccctggccagccctccgctccctccttcacaggaacctggtcctcaggacacaccagccagccaggtactcattgaccccagagggcctggagctggcccagaagttggccgagtcagaaggcctgagcttgctgaatgtgggcatcgggcccaagnngccccctggggaggagacagcagtgccaggagcagcttcagcagagcttgccagtgaagcaggggtccagcagcagccactggagctgaggcctggagagtacagggtgctgttgtgtgtggacattggcgagacccgggaggccgggcacaggccggagctgctccgagagctacagcggctgcacgtgacccacacggtgcgcaagctgcacgttggagattttgtgtgggtggctcaggagaccaatcctagagacccagcaaaccctggggagttggtactggatcacattgtggagccaagcgactggatgacctttgcagcagcatcatcgacggccgcttccgggagcagaagttccgactgaagcgctgtggtctggagcgccgggtatacctggtggaagagcatggttccgtccacaacctcagccttcctgagagcacactgctgcaggctgtcaccaacactcaggtcattgatggcttttttgtgaagcgcacagcagacattaaggagtcagccgcctacctggccctcttgactcggggcctgcagagactctaccagggccacaccctacgcagccgcccctggggaacccctgggaaccctgaatcaggggccatgacctctccaaaccctctctgctcactcctcaccttcagtgacttcaacgcaggagccatcaagaataaggcccagtcggtgcgagaagtgtttgcccggcagctgatgcaggtgcgcggagtgagtggggagaaggcagcagccctggtggatcgatacagcacccctgccagcctcctggccgcctatgatgcctgtgccacccccaaggaacaagagacactgctgagcaccattaagtgtgggcgtctacagaggaatctggggcctgctctgagcaggaccttatcccagctctactgcagctacggccccttgacctgagcttatgccgtgaaacagcccccagcccccgtctgtcccccaacccaggctagccagccttttaacaacatcttttggggtacaattagaatctaagtgtttgcagccatatgtgtcatgtagaagatgcctagccctggggaccttgtgaaatacgcaggaaccagggataccatctggtccagtggtttttaaacaaagctgcttagcacctggaattccctggtcagggagatggagtcagtggggcattgcagcttggaatctattttatgtcaccagttggtcctcatcaaataaaatttccttaggagtgcagagggctcattgggaaaataaaaataataaaaataaataaaacttcctaaaagaaaagattgaaaaccaaaaaaaaaaaaaaaa

SEQ ID NO: 13150 - DNA, 1302 bp, Homo sapiens
ttttaacatttatataccaagtttattgagacctcctgagacttaaaccctgtagaaaacagatgaatcaaacccaggccccattctcgggaagctcacagtgtgaaaataggtaactacaaaaacacagccaataagtgctttgaaacaaggaagaacataaaaaagatgtagtgttcgaaaacctggaatcaaaaactaaccgcggagaaaggtaggaggatgttctagactcccagagaagagctggggaacatccagaaaggctcttgctgccgacacagccacatcccctaggtctctggagttcactgcaggctggcccattgcagggaggtgtagaccaccttaccatcaggctgcggagaacagaggagcagggtctttctgacgctggttccaaggcgcccagcagcaaccaggtcttggagtgggatggtgtcctcaggggcccagcactgagcgatataatgggcgtggaagcggagggggtcaccaggatagaccaggaagtcacctccgaacttgccagccgcactgaggaagaagcctcgctcccacaggtctctgtagatactgtagcgcagctcgtgggcagggcggccggcgtggggccagtctttagactggacacgccagtccaggggccctggccttgaccggtcgaggcctggcagtggccagctggacaaggagagcagatctgggcaagggggctaccccatttgagggtcctgcttgggaagacgaggggccagcttcctcctgctctcccgaagcctggccatcactggtctcatcctctttggcagcctggctcgagccggcctcctggcttgagctggcccctgaagcctgttctagtttctgcttcttagcagcctggccctccgtaatcttctccaggagctcctgacgacgggtctcccgggcctcagctgccaaggcgctctgctcctggaagctctcctcttcgtggcgcttgaaggatgtcagggccaggctgtggtgccgagagtctggacgcggggcgctgaccagagtcacggcccgatcatcggccaagagccgcgcctcttcgggcatcagcagcagcgggaggcccaggcgcgagttctggcgggcccgcggggcagggcgcctaccgtgcggccccccacacccaggcgctcccggagggcctgcaccgcctcggctccccacaccagggagcggccgttcgccacctccaccaccagcatcctctgcgggagccgggaggcaaagcagttaccgaaacacgtgcgcgccgcagaccgctca

SEQ ID NO: 13151 - DNA, 1780 bp, Homo sapiens
gcggcacgagcagtgagcccctcaacaagagcctgcgccgctcccgcccgctctcccactactcttcttttggcagcagtggtggtagtggcggtggcagcatgatgggcggagagtctgctgacaaggccactgcggctgcagccgctgcctccctgttggccaatgggcatgacctggcggcggccatggcggtggacaaaagcaaccctacctcaaagcacaaaagtggtgctgtggccagcctgctgagcaaggcagagcgggccacggagctggcagccgagggacagctgacgctgcagcagtttgcgcagtccacagagatgctgaagcgcgtggtgcaggagcatctcccgctgatgagcgaggcgggtgctggcctgcctgacatggaggctgtggcaggtgccgaagccctcaatggccagtccgacttcccctacctgggcgctttccccatcaacccaggcctcttcattatgaccccggcaggtgtgttcctggccgagagcgcgctgcacatggcgggcctggctgagtaccccatgcagggagagctggcctctgccatcagctccggcaagaagaagcggaaacgctgcgggcatgtgcgcgccctgccggcggcgcatcaactgcgagcagtgcagcagttgtaggaatcgaaagactggccatcagatttgcaaattcagaaaatgtgaggaactcaaaaagaagccttccgctgctctggagaaggtgatgcttccgacgggagccgccttccggtggtttcagtgacggcggcggaacccaaagctgccctctccgtgcaatgtcactgctcgtgtggtctccagcaagggattcgggcgaagacaaacggatgcacccgtctttagaaccaaaaatattctctcacagatttcattcctgtttttatatatatattttttgttgtcgttttaacatctccacgtccctagcataaaaagaaaaagaaaaaaatttaaactgctttttcggaagaacaacaacaaaaaagaggtaaagacgaatctataaagtaccgagacttcctgggcaaagaatggacaatcagtttccttcctgtgtcgatgtcgatgttgtctgtgcaggagatgcagtttttgtgtagagaatgtaaattttctgtaaccttttgaaatctagttactaataagcactactgtaatttagcacagtttaactccaccctcatttaaacttcctttgattctttccgaccatgaaatagtgcatagtttgcctgggagaatccactcacgttcataaagagaatgttgatggcgccgtgtagaagccgctctgtatccatccacggcgtgcagagctgccagcagggagctcacagaaggggagggagcaccaggccagctgagctgcacccacagtcccgagactgggatcccccaccccaacagtgattttggaaaaaaaaatgaaagttctgttcgtttatccattgcgatctggggagccccatctcgatatttccaatcctggctacttttcttagagaaaataagtcctttttttctggccttgctaatggcaacagaagaaagggcttctttgcgtggtcccctgctggtgggggtgggtccccagggggccccctgcggcctgggcccccctggcccacggccagcttcctgctgatgaacatgctgtttgtattgttttaggaaaccaggctgttttgtgaataaaacgaatgcatgtttgtgtcacgaaaaaaaaaaaaaaaaaa

SEQ ID NO: 13152 - DNA, 1886 bp, Homo sapiens
ggcacgagccttccctagctgctgcggttgccattgcttcttgcctgttctggcatcaggcacctggattgagttgcacagctttgctttatccgggcttgtgtgcagggcccggctgggctccccatctgcacatcctgaggacagaaaaagctgggtcttgctgtgccctcccaggcttagtgttccctccctcaaagactgacagccatcgttctgcacggggctttctgcatgtgcacgccagctaagcatagtaagaagtccagcctaggaagggaaggattttggaggtaggtggctttggtgacacactcacttctttctcagcctccaggacactatggcctgttttaagagacatcttatttttctaaaggtgaattctcagatgataggtgaacctgagttgcagatataccaacttctgcttgtatttcttaaatgacaaagattacctagctaagaaacttcctagggaactagggaacctatgtgttccctcagtgtggtttcctgaagccagtgatatgggggttaggataggaagaactttctcggtaatgataaggagaatctcttgtttcctcccacctgtgttgtaaagataaactgacgatatacaggcacattatgtaaacatacacacgcaatgaaaccgaagcttggcggcctgggcgtggtcttgcaaaatgcttccaaagccaccttagcctgttctattcagcggcaaccccaaagcacctgttaagactcctgacccccaagtggcatgcagcccccatgcccaccgggacctggtcagcacagatcttgatgacttccctttctagggcagactgggagggtatccaggaatcggcccctgccccacgggcgttttcatgctgtacagtgacctaaagttggtaagatgtcataatggaccagtccatgtgatttcagtatatacaactccaccagacccctccaacccatataacaccccacccctgttcgcttcctgtatggtgatatcatatgtaacatttactcctgtttctgctgattgtttttttaatgttttggtttgtttttgacatcagctgtaatcattcctgtgctgtgttttttattacccttggtaggtattagacttgcactttttttaaaaaaaggtttctgcatcgtggaagcatttgacccagagtggaacgcgtggcctatgcaggtggattccttcaggtctttcctttggttctttgagcatctttgctttcattcgtctcccgtctttggttctccagttcaaattattgcaaagtaaaggatctttgagtaggttcggtctgaaaggtgtggcctttatatttgatccacacacgttggtcttttaaccgtgctgagcagaaaacaaaacaggttaagaagagccgggtggcagctgacagaggaagcccgctcaaataccttcacaataaatagtggcaatatatatatagtttaaggaaggctctccatttggcatcgtttaatttatatgttatgttctaagcacagctctcttctcctattttcatcctgcaagcaactcaaaatatttaaaataaagtttacattgtagttattttcaaatctttgcttgataagtattaagaaatattggacttgctgccgtaatttaaagctctgttgattttgtttccgtttggatttttgggggaggggagcactgtgtttatgctggaatatgaagtctgagaccttccggtgctgggaacacacaagagttgttgaaagttgacaagcagactgcgcatgtctctgatgctttgtatcattcttgagcaatcgctcggtccgtggacaataaacagtattatcaaagagaaaaaaaaaaaaaaaaa

SEQ ID NO: 13153 - DNA, 725 bp, Homo sapiens
tttttttttttttttatgaatgaaacaatgaacacatgaagtctccatttattctgggatgggttagagtaagcctctgaggctgccatcaggctggctgagttgttgcccaacattgtatccagcagtctcaggcccgcgcagtgcacagccagcatggggctcacaggtgcagatggaatccagaagctcccaactatgctgcaaaggccaggcctaggggtccgggtacatgcagtgagtccttggggcagggccagccctgctgactacacaagcaaggttggtggtgagacaaggggtgtatgtttccccgccaggacagagggcaacacacaggtgggtggcgaccctcaaggctgacggcatccctgcccagagtgacgaccagggcctactagctctactaaattcagggtggcggaaatcctggatgtgccccttgtcatggctcaggggcctcctttcatcctagttcatgaagccccaacacttcctccctgggatcagtaccaatcccctgcaaggccctgcccctccctccaacttcatcccagtcaaccacacacgtccaatcgtgtagtctgttgcccttctttccttcctggggcatcctgagccctctgggatggcgtgtgcccagttccagctcacggacctccatggcccatccaccaagcaccccatcgtatcaacttgccatgtaagggtgtggacctcgtgcc

SEQ ID NO: 13154 - DNA, 376 bp, Homo sapiens
gggcaggaagagcagcaagtaaagaaaaacacagattgagttgacaagaaggtgccagcaaaaaagaccaataaggagtccggaaaagcagaagaaaaaccaggagaatgtggtatcgtggcacccaagagaaggttttttctaggaggaggaagtgatccattgtgtaagcagaccttgggacctgtgagcgctgcatccaattaaccatgggaagggtcagcaccagccaccagccccttaggtgaggactctgcctggggctctgctgatggttccgaatcatggagctgcgcgcggcactggtcctggtggtcctcctcatcgccgggggtctcttcatgttcacctacaagtccacacagttcaacgtgga

SEQ ID NO: 13155 - DNA, 1744 bp, Homo sapiens
  misc_feature (1)...(1744): n = a,t,c or g
gtcgacctggaagctgctgaagggttttaagcagtggcctgacatgatcagtttgtgttttaaaaggtcactttggtggcagttcatggatcaatagcttgaggtgacaagacagcagacacgacgtgggtctctgggactgcctgtgccgttgtgggcagcccctccagagccctgagtcacgcagccttcagaggcacccatggctacgagaagcacagtctctgcctgaggctccagagcggccctttttccccagcagcagaccttgggacctgtgagcgctgcatccaattaaccatgggaagggtcagcaccagccaccagccccttaggtgaggactctgcctggggctctgctgatggttccgaatcatggagctgcgcgcggcactggtcctggtggtcctcctcatcgccgggggtctcttcatgttcacctacaagtccacacagttcaacgtggagggcttcgctttggtgctgggggcctcgttcatcggtggcattcgctggaccctcacccagatgctcctgcagaaggctgaactcggcctccagaatcccatcgacaccatgttccacctgcagccactcatgttcctggggctcttccctctctttgctgtatttgaaggtctccatttgtccacatctgagaaaatcttccgtttccaggacacagggctgctcctgcgggtacttgggagcctcttccttggcgggattctcgcctttggtttgggcttctctgagttcctcctggtctccagaacctccagcctcactctctccattgccggcatttttaaggaagtctgcactttgctgttggcagctcatctgctgggcgatcagatcagcctcctgaactgggctgggcttcgccctctgcctctcgggaatatccctccacgttgccctcaaagccctgcattccagaggtgatggtggccccaaggccttgaaggggctgggctccagccccgacctggagctgctgctccggagcagccagcgggaggaaggtgacaatgaggaggaggagtactttgtggcccagggcaagcagtgaccagccagggcaaatggcttagaagcaggccactccccagcctgctgcccagcactcactgtgctcaagccgccagggctcatcatggtagctgggagctgtggacgggagtcaccaggtggtggggcccaagccagggactcatgacttttgcccctcccttcagagcctggtcacacaaggggcgagcaccaggccagccctgggacttggccagagctgggccccaantgcgctggaatcgcagcaggagaggggagtgggctggttcttcccaccacttcccaggctctgacagccgagactcatttccaaggcacagcagctttctaaagggactgagtttggactgggttttggaccctcccaggggctggagcttcatcacctgggcagtgtcttttctcagagagcaggtttctttatagtttggaaataaatggttcacggtccactggccgccttgtgttgctggagacgtgggggcagggaggggacagtgtgggcctggcctctcctttcctttccctgcctggagccttcttcaaatgtctggtcttaagccaggcctccttcattttctcgctcctgttagaacaccagtcccctcaccagtggggccccactgcacctgctggcaggaaataaatgaatgtttactgagtactg

SEQ ID NO: 13156 - DNA, 1565 bp, Homo sapiens
aagatttgattttcttttatttgtggcactaaaagacagatagctgtgatgaagagcaattggctggtagctcgtgcctcaccaagagtttagcaacgttaatcagtgaatgcagaacagcttccattctacctgaggcctagatctgagatcgctgtgaaacattaaagtgacctcaccatacttgttttctcactcagatacacattttatttcatcaacacatcttgatttctattacttttttcaatataacaaaatgttttagagatatatatgaaaaactactgctgtagttagacctcattataaatattggtgactgggcaccatgtgagaacgaccacgatatcatacaaagggagccaatgagctgttggacaaacgcgtcaaggctgaaccaaaattgtgacgctctcagcgcaactttgatctgaactcttgacaggtgggcatccaacatccctgctccttgaccctctgcaggattccagaaggctcccagtgaagtcatcaggctccgtacacaggcaccgtgggggaggcctatgtcacttcatagcctggggaatggctgtccatgtggggcactgcccatccactccagtggtggtgtgacctcagccacccgccacccttgcaggactcgggcatgccctggccacatgatcacgtaggactgttttctgggtggtaatagttgatttttaaaagcttagttggtcagatcatggactgtgaccctctgtgaagtgttagccccaaatatttgaggaagaagaatccagcagttttactacctaacaaagccacctttgaaaagcctcccaatttttttttctactaccaaaacacacagcatcatggagcatatcacattcagattgttccatctgattcatatgttttttctaaaattcaaaagatcttaaatcagtaagtagtttcatccatctgtatgtggtaaaagtctcaaaggtccaaaatcagtctaaggcatgattctttttactttgcccataaatataattaagtgtgagtgctgggctccagcatttatagtcccattaacctgccaacaagaatcgtttattagcaacttaagatattcagaggcaaaacacatttccttggcacacgagctgcggcagcgacacagcatcttctcctttcctttcaagccgttatacaggaacacaccgaaaatcaactgtgcgcattttggcctgtagacaagaaagtaacaccaaaacttgatgttcctggctatgcagactccttgagtgacgcctgtgggcatattacaggtgggtttctgcaattctctggcctctgttcattcacacgagcaagggcaccttcctcaggctgcaggtgccgctgtgcccgcggatagctgccagcagtgcagatcgttcgccctctgcctccgtgtaggacagtttcgctggcctgccctccccggtgtgttctgccgtcttgcgtagtctgtccttccctcccgcagagtggatggcttccatcagggcagagtgcagggatgtgtcttttgggactggtctctg

SEQ ID NO: 13157 - DNA, 1848 bp, Homo sapiens
gcccgtttttcccgtttcccccgtttattttcctcgttttctttctgaaagtttccttttatgtccataaaatacaaatatattgttcataaaaaattagtacccttttgtttggttgctgagtcacctgaaccttaattttaattggtaattacagcccctaaaaaaaacacatttcaaataggcttcccactaaactctatattttagtgtaaaccaggaattggcacactttttttagaatgggccagatggtaaatatttatgcttcacggtccatacagtctctgtcacaactattcagttctgctagtatagcgtgaaagcagctatacacaatacagaaatgaatgagtgtggttatgttctaataaaacttatttataaaaacaaggggaggctgggtttagcctgtgggccatagtttgtcaaccactggtgtaaaaccttagttatatatgatctgcattttcttgaactgatcattgaaaacttataaacctaacagaaaagccacataatatttagtgtcattatgcaataatcacattgcctttgtgttaatagtcaaatacttacctttggagaatacttacctttggaggaatgtataaaatttctcaggcagagtcctggatataggaaaaagtaatttatgaagtaaacttcagttgcttaatcaaactaatgatagtctaacaactgagcaagatcctcatctgagagtgcttaaaatgggatccccagagaccattaaccaatactggaactggtatctagctactgatgtcttactttgagtttatttatgcttcagaatacagttgtttgccctgtgcatggaatatacccatatttgtgtgtgggatatgtgaagcttttccaaatagagctctcagaagaattaagtttttacttctaattattttgcattactttgagttaaatttgaatagagtattaaatataaagttgtagattcttatgtgtttttgtattagcccagacatctgtaatgtttttgcactggtgacagacaaaatctgttttaaaatcatatccagcacaaaaactatttctggctgaatagcacagaaaagtattttaacctacctgtagagatcctcgtcatggaaaggtgccaaactgttttgaatggaaggacaagtaagagtgaggccacaggttcccaccacacgagggcttttgtattgttctactttttcagccctttactttctggctgaagcatccccttggagtgccatgtataagttgggctattagagttcatggaacatagaacaaccatgaatgagtggcatgatccgtgcttaatgatcaagtgttacttatctaataatcctctagaaagaaccctgttaagatcttggtttgtgataaaaatataaagacagaagacatgaggaaaaacaaaaggtttgaggaaatcaggcatatgactttatacttaacatcagatcttttctataatatcctactactttggttttcctagctccataccacacacctaaacctgtattatgaattacatattacaaagtcataaatgtgccatatggatatacagtacattctagttggaatcgtttactctgctagaatttaggtgcgagattttttgtttcccaggtatagccaggcttatgtttggtggcattaaattggtttctttaaaatgctttggtggcacttttgtaaacagattgcttctagattgttacaaaccaagcctaagacacatctgtgaatacttagatttgtagcttaatcacattctagacttgtgagttgaatgacaaagcagttgaacaaaaattatgg

SEQ ID NO: 13158 - DNA, 307 bp, Homo sapiens
gaaagatcctagaatctcccattttaaggggtagtatagaaagcaaatgctaactgccttcagtgatggtgagaaaacaaattgggcctcttgattatctagttcagaacttttaagtaaatgaacaaggcgatactctgttcttatggaaatcaactttaatggccccatagattaatgttcgtgagggacctggcactggggtttgctaaggtttatataacccttgacttaaccgcctggtgggttgtgggtctggcagcatggggctattcttctcaactttgctgtaaaaccatttgtgtct

SEQ ID NO: 13159 - DNA, 2552 bp, Homo sapiens
tttttttttttttttaaaatgagacttggagtttaattaaaaacagaacagggatacattaaacaaacaaacaaaaattacttttctgattatcaattttttttgagactcaaagcatccccaaaacattggagatccagcttattcctgagacatcaaccatcacaaaaggttttcactctgaactattcacatttttgtggcagaaaacagaacaaagttctgcagacatccttcctctctttctaaaatatattcacaaacagggtcttttcatagttcaaaagaaaaacaaacaggtttctttcttggccaaatggcctgttactctcaccctgggatctgatttcttaataaaaaagttcagggcaccaaatccaaccagaaattcccaggacaccagtggctacttaactatgaggggatggatgcttttgtctttctatgaggggaatcattctcccgggattattatgctgctcaacagccccaggacaggtaggtgggaaggagggtgaatgcaaaagcgaaagggtcacagaaaagaatgaggctttcttgaacaacccatagcaaggcagaatggtccagttttacaaaccacccactacaaactccaaacatgcacacccaaaactagaggggaaaggaaagagctcctgggggactaggggagacaaaagatggtgacatagaacagcagacttgcctatgaacgtttctcaacttcctaacactggaagatgtttaattaaaaagttgctgttcaaaattgtactgaaaacatatctaaaaataggtctgtagtcatcttaaaaataaaaggtcacttctcagataagaggagtgacagatattctcagataccaacacttcaggtatctttgatgtaaatttgaaaaatggcctggtagagaaaaaggaaggaaaggaaggagagaggaagaaagtgagggaggtagggagagaaattcagagtacaacaggaaaggcaagaaaactgggaggaacacattttttaagcccatgcttatctatcccagcagccaaacaaagcagatccacaaaggaaaaaaatgcagttcttttctaagaacattctgaaaatcaacttcaaactcaaaacataagaaactgcaatctaagaacaactaccacaatgctcactggacttaaaaatgacgactgagaccgggtactcaaatgggtcaacgttcttcagcggtcattcttaggcattatctgacagaatactatgatcaggccttacccaccaagtggaagctaaagtgcctctattacttggtatggacctgctctaggagcagacaaaatcactttgctttcttgaagtacaagaggactctgccaggcaacgagatgcaagcagggaggagtggcagaagaagagcaaaactggttaccaagggctctcttctgatgtacagagttaaaaatatctgcacaaatgcactaagtaaaagaatgggaagatgaactataataccaaagacagaagacattcctcccagaggaaagaaaggaagtggacctcaaaacagtgtcacagggtaacgctacccagagtttgcacaagctgtgcctctgtcccgagggacgaatacctcaaggtaaaagggaaagcagctctctttttatcatttccccctgctggttttaaagaccccaagcccagactcttgcaacactgaacccataggtgggatacagggaggagagacagagggtaaggaatatgaatggtgttaggcccaccaagctctgtatcccttccccagacttcccagcccaggcagttgttggtaggttgatatttgatttgggacaaaattacagggtatgagggtggctctcaataaaaaaacaactaggaaagtcagagttgaactgttttcctctaagggctgcttagctctacagaaatacagcaagggccttcaatctaacctgtttaactgggaaggggaacaggagacagggagaagaaatggtcagatgaagctcatcttcccatcatttggcacccagaggaagacggggaggtggagactgtaatggggactgctggtattgcctcttctgtcttttcactgttgatcctattggccaaatcaggtgcacacaagtatcagtgttgctgcttttcttctaatccttgcaggagagtcagatgtccatctcgaactgagcatcatccccaactgcatgtttcctgtcgtgattgttcaagttgttcaaattgtttacttctactttggagtcttcaattaaggtgccagggctagtgactcctgggatattgggcaggtggcagggtggggtctgagccatgggagaattgcgacgatcaaacagaaactttctgtcataaatgattcgagttcatcacggtgtggtggagaagagcgtcccccaggacgtggtgcaatagtcatgaggtagctgcacgcagtccgtggatggccacggtgcagggtggggatggcacggctctggcttgggctggtggcgctgcagcttgacaaggacat

SEQ ID NO: 13160 - DNA, 891 bp, Homo sapiens
  misc_feature (1)...(891): n = a,t,c or g
ctttcctactggaacctgggcttggctcctggctgttgtctctctcccctaggttcccgctgggaaggcttgataacaaaagcaggcttttaccagacaagcaaagatcaaaaaaagatgcaaacctttgtttgtttaatggaaattcctcagggttgctttcctgtgtattccaaagctatgacggaatagtttgaatagtgtgtgctcttgactcatccatgacccctaagctcccaagatctcccaaatccgcaggccccgtttggcagagttgtggctcatggggatgacagagcagaatgtttagggtttctgcccaagagggagaccaataaaaatagggatggacaaagccttacgatgtcccctacttcctaaagagaaggtaagaaatccccgtgctgaacatccactaggttctgggtatatactttatacacacatggcccctttattcctctcagtgaccctcagggtaggtctcactacccaagtgttagagtgaaggacgctgagactcaagaagaggaacaggtcagggtcagacagagctggaatttggacacagttctgtctgactccagatattccttgtatcacacaatactgtcttctgaagcaagtgattgtccccaacacacacacacacacacacacactctctctctctctctctctctctctnctnccagcagagctgagggataaagaggaatatcctgcacacttcttccttctgtgtcagggaacatttgcttgtctacagctcgagtatttgttaaacactcagtagcacccaaaccctggagcccttagcagtttccttttgcttgttttactaggcaagagtaggcatgtcgggggncggtggggacattgaatcaaact

SEQ ID NO: 13161 - DNA, 287 bp, Homo sapiens
tataagaaagcgtttcataaaaaaataaagcagaagcatctttctcagggttaaacaaggcagaagatgggacctctgtagggtggcatgggtttgaggaatggagttgccccccagcaggctgtgagctattcagggttaaggaccatatcacatccatcttttatttcttgcaattgtaacagtacttgttacatagtagtttctccaaagtattacatttaggtctagacacctggcaggcactgcctgtagtctcagctgcccggaaggctgaggcaagagga

SEQ ID NO: 13162 - DNA, 1231 bp, Homo sapiens
gcagaaattgccgtgagatattgtaaaacatgcctttattactaaattcaatgacattactgcagatgtctacagtgaatatagagccagtcttgcttttgaccttgttagcagccgacagaaaaatgcatacactgattacagtgactctgtagcacggaggatgggctttattcctctcccactagctgttttactcatcagagttgtaacaagctcaattaaagtgcaaggaatcctgtcttatgcctgtgtcatactcttctattttgggttgatatccctgaaagtacttaatagcatcgtgctgttggggaaatcgtgccagtatgtggaagggaagccaaaatggaagagaagctgtcgaatcctcccgcaacctgcactccaggcaagccgtccagtaaatcacagaacaaatgtaaaccctctcaaggcctttccacagaagaaaacctgtctgcctccatcaccaaacaacctattcatcaaaaggaaaatatcataccattacttgtgacaagcaattctgatcagtttttgacaactccagatggtgacgagaaggacataacgcaggacaattctgaattaaaacacagatcctcaaagaaagatttgttagagatagacaggttcacaatttgtggaaaccgaattgactgaatctgtggcttcatgcgctgaagaagctgggtcctggggcaacaagtgctgtgttgccaggacaaatagatgctaaacatggcacttaaatatttatttaaaaacttaaattattattggcaagcaaatcttagtatctttcttccagtaatatggcctggctgagggtcagaccacaggacagggagcgacctccggccttgactgtctgggaagcttgatggattataaaacttcctcctgcctggccaagcagcagcatcatttccaggacccaacaaaggcaacatcaaaatctgttttgctttgtcagtctgggcttccagaatgttgaatttgcctcaaggcctcttcagtataaggaaatacctggaaaactgtgaaacttttaccacgacgtaatctttccagtctcatactattttcacaaacagttttcaaacgttacttcatctgccaaagcattaaaaaaattaaacataagtcaagataaatgttcttaccaccagaataacccttaaagatgtatcttaattaatcagaataaaaggctaccttaaataag

SEQ ID NO: 13163 - DNA, 576 bp, Homo sapiens
  misc_feature (1)...(576): n = a,t,c or g
gcaattctttgaactgttgaaagatctcctgacaaattgttactgatattgtgttaagcaataatcttaaccttcccagtaaatgaactggaatgcccaattttaagtttctctatttatgaagaaacaaaatacaggggtcatagtcaggatactgcctatggtacattttaaaatttctgggtctactaggatataatctttcttaacctcttttgagatttgatgtcagttcaagggaagcattccattgatgtcaggaaggcagctatttgttgactgaaattctggtactctggcataagctcgttctaaaaatccacaaatatgttgttaatagaatgggaccatacttttcacttgggggcctacccgctagaggtgagatgcatccttgagatgttggaaaacttgngagaattttttctttgcaactanacgtgcgccacttnttgacctaatngactccaggggaattccttggaacttactagcnatccctgnaccacatgcggttaaattaaagctcnaatttagaaaatgntattcttatacttaatacttaacangggttag

SEQ ID NO: 13164 - DNA, 676 bp, Homo sapiens
  misc_feature (1)...(676): n = a,t,c or g
cttttaactcaagttacagtcgatcctgggagagcaaggagccagcaagtctagacattccagagccacaggccctggattctatccaagccacgagggattttatgccctgggcttagattatggtgcgtcagggcagccttccaccctttagcacagagcttggtgttccaaagaccacaaggggttttagacccttgaccctggacatattccaagactcttttacattatgtcagaatgcaagccctgcctcagcttctctcccaacactcagcttttctcccaatacaggaacttttggaggtcacttctggggcctttgctgagcaggccactccttgcttctcctgcagatgacaaggtttccagcatgattattgctatgactgatggaacaatgatgaaacatccatctttggacactctcaaagaaaatcctaccatgtggttattcatggaaatggctttcagaatctaaagaaacgggatgaacgttatttgcagatttatcttcagtgaaagcactatcattgggagtacttcattgaagtcagcttgaacaacggcaaaacattcaagagcaatgtcagcatcaccagcaccacatgtgggcaatctggatatcttccgtgacctctctnacccaagctggtgccaggtgccatggatgtgg

SEQ ID NO: 13165 - DNA, 1787 bp, Homo sapiens
cggacgcaagatggcgacggcgaccatagctctccaggtcaatggccagcaaggaggggggtccgagccggcggcggcggcggcagtggtggcagcgggagacaaatggaaacctccacagggcacagactccatcaagatggagaacgggcagagcacagccgccaagctggggctgcctcccctgacgcccgagcagcaggaggcccttcagaaggccaagaagtacgccatggagcagagcatcaagagtgtgctggtgaagcagaccatcgcgcaccagcagcagcagctcaccaacctgcagatggcggctcagcggcagcgggcgctggccatcatgtgccgcgtctacgtgggctctatctactatgagctgggggaggacaccatccgccaggcctttgccccctttggccccatcaagagcatcgacatgtcctggggactccgtcaccatgaagcacaagggctttgccttcgtggagtatgaggtccccgaagctgcacagctggccttggagcagatgaactcggtgatgctggggggcaggaacatcaaggtgggcagacccagcaacatagggcaggcccagcccatcatagaccagttggctgaggaggcacgggccttcaaccgcatctactgtggcctctgtgcaccaggacctctcagacgatgacatcaagagcgtgtttgaggcctttggcaagatcaagtcctgcacactggcccgggaccccacaactggcaagcacaagggctacggcttcattgagtacgagaaggcccagtcgtcccaagatgctgtgtcttccatgaacctctttgacctgggtggccagtacttgcgggtgggcaaggctgtcacaccgcccatgcccctactcacaccagccacgcctgggaggcctcccacctgccgctgctgtggcagctggctgcagccactgccaagatcacagctcaggaagcagtggccggagcagcggtgctggggtaccctgggcacacctggactggtgtccccagcactgaccctggcccagcccctgggcactttgccccaggctgtcatggctgcccaggcacctggagtcatcacagggtgtgaccccagcccgtcctcctatcccggtcaccatcccctcggtgggagtggtgaaccccatcctgggccagccctccaacgctgggtctcctggagcccaagaaggagaaggaagaagaggagctgtttcccgagtcagagcggccagagatgctgagcgagcaggagcacatgagcatctcgggcagtagcgcccgacacatggtgatgcagaagctgctccgcaagcaggagtctacagtgatggttctgcgcaacatggtggaccccaaggacatcgatgatgacctggaaggggaggtgacagaggagtgtggcaagttcggggccgtgaaccgcgtcatcatctaccaagagaaacaaggcgaggaggaggatgcagaaatcattgtcaagatctttgtggagttttccatagcctctgagactcataaggccatccaggccctcaatggccgctggtttctggccgcaaggtggtggctgaagtgtacgaccaggagcgttttgataacagtgacctctctgcgtgacagtggtccctctccccggacttgcacttgttccttgtttcctctgggttttatagtgatacagtggtgtccccggggccaggcgcgctctgcccagcccagcctacagtgcggataaaggtgcggatgctgctggccctga

SEQ ID NO: 13166 - DNA, 1036 bp, Homo sapiens
tccatatgctcaaaagttaaattttatttaccctgttcactggcccaaacttaaaatccttatatcacataaagatttcatggaccgttccctctccctgccaaaaatacgtattaggaacaaattaagagtaagagttgggttttaaactgcactttatttgttactgtaacattcttttttaactgatcaaccataagcatgcaaaaagttctctgaaactgcttccactgcctgttgtatagaaatgggtaaattataaaggtgattcaatttggagctctttccttttttatagcacttctaagctgtgtgcgcgacacacaccacagaggtaggaaggaccacctttaataaattatcttcttaatcgcagagaatttctgaagataaaactgacaaaatgctaaaccaaggctttgatgagtcccaaaggaccacagatccatcggctcctatttgaagaattcatcccctgtagtgttctagcctttgtagggcactggattacaagatccaccagggctctgaacaactgcgctaagaagccttctaaccactctcatttgccgattctttggaccacccagtcctgctggcagagagggcagcgattgttctgtttcacccacagggacatgcagcagttgtggaaggaatgattacattctccccagaccacaacacagtcctcttgtttgttttcagcttgacatctaagacaggcattgacacagaagccttcctttagcaactcataagaagcaactttttactttctaccctaagacacttgagagttcctctaaaataaactgctttgtatgcttccaataggttgctaccgatggtcatccagacaaggctggtgagaagccagtgagacagaggggacagcgagggctgtggagccagatctacagtcaaatcccatttcactggcatttattaggttcagggcctcggaccaattacgaactccaattccctcatccatcacctggaccctgcagatggcgcacgtatcgcactccac

SEQ ID NO: 13167 - DNA, 1213 bp, Homo sapiens
ccgggaacaagccatggtggcggcgacggtggcagcggcgtggctgctcctgtgggctgcggcctgcgcgcagcaggtagcaggacttctacgacttcaaggcggtcaacatccggggcaaactggtgtcgctggagaagtaccgcggatcggtgtccctggtggtgaatgtggccagcgagtgcggcttcacagaccagcactaccgagccctgcagcagctgcagcgagacctgggcccccaccacttcaacgtgctcgccttcccctgcaaccagtttggccaacaggagcctgacagcaacaaggagattgagagctttgcccgccgcacctacagtgtctcattccccatgtttagcaagattgcagtcaccggtactgggtgcccatcctgccttcaagtacctggcccagacttctgggaaggagcccacctggaacttctggaagtacctagtagccccagatggaaaggtggtaggggcttgggacccaactgtgtcagtggaggaggtcagaccccagatcacagcgctcgtgaggaagctcatcctactgaagcgagaagacttataaccaccgcgtctcctcctccaccacctcatcccgcccacctgtgtggggctgaccaatgcaaactcaaatggtgcttcaaagggagagacccactgactctccttcctttactcttatgccattggtcccatcattcttgtgggggaaaaattctagtattttgattatttgaatcttacagcaacaaataggaactcctggccaatgagagctcttgaccagtgaatcaccagccgatacgaacgtcttgccaacaaaaatgtgtggcaaatagaagtatatcaagcaataatctcccacccaaggcttctgtaaactgggaccaatgattacctcatagggctgttgtgaggattaggatgaaatacctgtgaaagtgcctaggcagtgccagccaaataggaggcattcaatgaacattttttgcatataaaacaaaaaataacttgttatcaataaaaacttgcatccaacatgaatttccagccgatgataatccaggccaaaggtttagttgttgttatttcctctgtattattttcttcattacaaaagaaatgcaagttcattgtaacaatccaaacaatacctcacgatataaaataaaaatgaaagtatcctcctcaaaaaaaaa

SEQ ID NO: 13168 - DNA, 1092 bp, Homo sapiens
tttggtctcagggaagtagcaggcgccggttgagagaactacggccctgtcggaaggtaacctccggtgcaaacgaccatcggcggcaggcgagcggtacgcttggcgtccgggccttcctgggccgtctgaggaaacttgctgctcgaggccaggctgcctaggacctgtcccttttttctatactggctcccacatccgggttttttctccgggacggcccttcggatgcttgggccaatgggaatcgccatttagggtgctccgcccaccgggttcgcgtagagcatcctgggaagtcgtagtaaatctctcgagagttctctccgcacgcgggctgggagaagcgggtcctacgcacgctttgttgtcgcgctttgcctccgtccttccccctactcccgccttaacctgaattcctttttggaaggaagatccttgagcagccgacgttgggacaaaggatttggagaaacccagggctaaagtcacgtttttcctcctttaagacttacctcaacacttcactccatggcagttcccgagacccgccctaaccacactatttatatcaacaacctcaatgagaagatcaagaaggatgagctaaaaaagtccctgtacgccatcttctcccagtttgggccagatcctgggatatcctggtatcacggagcctgaagatgagggggccaggcctttgtcatcttcaaggaggtcagcagcgccaccaacgccctgcgctccatgcagggtttccctttctatgacaaacctatgcgtatccagtatgccaagaccgactcagatatcattgccaagatgaaaggcaccttcgtggagcgggaccgcaagcgggagaagaggaagcccaagagccaggagaccccggccaccaagaaggctgtgcaaggcgggggagcccacccccgtggtgggggctgtccaggggcctgtcccgggcatgccgccgatgactcaggcgccccgcattatgcaccacatgccgggccagccgccctaacatgccgccccctggtatgattcccccgtcaggccttgcacctggggcagatcccaccaggggccatg

SEQ ID NO: 13169 - DNA, 6069 bp, Homo sapiens
  misc_feature (1)...(6069): n = a,t,c or g
ccctaacatccttcagctccagaaccaatgccaaatcacctaactccaggttatatgacaaaaaaaaacatctgtttaggacattctttagtgggatttgtttttctggtcacagtcacaatgacggatttaaaaaaaaaagagtatctcaacttcctattgggagtacatgttttcccctgattttaaactcatgggacaaaaagaaagtgttgactggcatctggcaagataattaaatatctgaaacaccctgaaggaaacaaagagggtactgtggtcaagagtaaggtggacaggataccatagaagatatatccagtgtatataatgataactgctaaaacaccctcaaaactcactagcagaatgtaatcaagtttattttcttgttcaaagtccaatatggatgtttttggtcaagtagctattatgccctaaatagtaactcaggtattcagacttcttctatgctatgactccatcaccgtcaaaacatgtgcttcaaggttaccttgaagaggaaggaggaagagaataatggaaatggctcagccaccctttaactgccttggtctagtattgaaacatcacttccactcattttccactgttgagaactactcacataggcctagatgcatggagctgggaaatgcagtttacctgtgtccagaaagaggacatttgggtgagcatctggccagtttcttccacagaagcaaaggtaatagtggtatgaattcaggaagatgaaaatgagctcactggggaaagagtattcaaggaagatggagcatgtgcaaagactctcagtacaaacagtttggaaagcttgaggaataaaaagcaagtctgtgtggctggagttttgtgaaaggggaggagtgggttaagatgcagatggtgatggtgacggaggcctgggcaagatcacacggggcctgaaaagtttgtcttttgttctcgaggcagtgagaatccattgaaggattttaagcagagaagtgacataagctgatttacattttaaaaagatcacatggctgtgtggaaaattaattgctttagggacacgagtagaagcaattagaccaccagtaaggcagttactgcaggagttgggtatcctaaaacccagatggctggtcagagaattcacctgggaaggaggatgaccaggggatgaaaggttctaattactggtctctgtgaaaagctgtagagagttttgtgcagttacataaatggttgggtttggagctgagcggtgtctctgccaagatcatgttgtttcttttagaactgtgttcccttaggactggactatattatgggaacagaagctggagcacaccaataactgcagaagcagtaactatttatttggagaactctcaaagggatgctgaacaagcatgaggcacggataaccaaacccaattttattcttgtctcttaccaccctccaaattttattcactgggaggtactctccctgctatggagaaaagctgcagcgaggttgtgatgttcttaatagatagtcctgtgatcagtttaaggaacaaacataatctcaattaattagaatgtctaatcctgtgtaacaataatctgcacctgttgcagttttaaatccctttttcctctcccagctctgccccagctaagtctaggagcctgcactgggaaagggaggagtgattggtatgctcttccctctcctcggctcctctctacctaatcactgctgattgctctgggcccaagtgatgaggagaggtaaacagataaatcattttgccctgactgggtatttctatgcactgtgggcctggaagatatttcctctcccctattctcactctcaaatgataaactggcttcctgctcccctgaaaaaaaatcaaagcaatcagaaatgaacttctggggccctatcaggaactctggaagagggctttcataatggagcaacctcttaccactgccatttacctcaaacaggccctccacattactcagcaatccttaccccactgcattctgagttctctctcatctcaatagcactcgacagctaacaacctgcccatcnnnnnnnnnnnnnnnnnnnnnnnnnnnnnnnnnnnnnnnnnnnnnnnnnnnnnnnnnnnnnnnnnnnnnnnnnnnnnnnnnnnnnnnnnnnnnnnnnnnnnnnnnnnnnnnnnnnnnnnnnnnnnnnnnnnnnnnnnnnnnnnnnnnnnnnnnnnnnnnnnnnnnnnnnnnnnnnnnnnnnnnnnnnnnnnnnnnnnnnnnnnnnnnnnnnnnnnnnnnnnnnnnnnnnnnnnnnnnnnnnnnnnnnnnnnnnnnnnnnnnnnnnnnnnnnnnnnnnnnnnnnnnnnnnnnnnnnnnnnnnnnnnnnnnnnnnnnnnnnnnnnnnnnnnnnnnnnnntaactctcctggttttactcctacatctctgggtgaaccttctcctcttccatcaccttcactgcttcattttcctttacccatccatgacatgctcctcagttctattctgagccattttctcttctcattatcttaccctgaatatctcatctattctgactttaattaccacctctaggctgctgattcccagacccccagcacagatttcacgcatgtcccacttcctaaaatccaacactttgaatggcatcaccagcctacccacagttgagcaacctggaacttacttcagattcctctcttaccaacctcaacatcccaccaattctacctaatgaagttctcctgtctgcctacttcttccatcatgactagtcaacagtgccctcatcttgtgccctagtacctgggtttctataacacccctgttctcatctatcccactcaactggaccctgtcattccttatctctccctaggtgaataagtacactggctatatctcaaatgacaagctccgggaatacaaagataaacatggcttgagaaaacaacagccaaatgcacaaaggaatcacaatgcaatatttagaagctgaagtagcactcttcacatagtactttgagagtacagatgaagaactgattttgctttgggagtagaataggaaacaactaggctgttcggaaagatgagcaaactgccagtccgatgaatatccagcagaaagaacagtacgtgtagaggcactgtgtagtgcctgcctaatgattcacagcccagcctccaaacatgccctctggactacagcctgtttcaaaacctccatccccttattagaggcatccaactggctcagggcatagaacctatgatctcccaatgggtactgtcaggtattcctggaaacaagtacaagaggccatatctttatacctgggcacatggcagataccttttgggggaggcctagaatctatcattcaaactcaccttccctcagcaccttgcctatagctttcccaggacatgctgatctgagtccactgcaaggcagagatagtggacagactcttccgccaatgaacagcccaatgcccccaagcccacatggcatcaacaagttgtttatgaacagagacccagctccctcactacccctccaaggacagaagctcagaatctattaaaagtcattaaatagcctatgaagcaggcctgttgaaaggtctagcctctcccagaggcttccttagtcaacaaatccattctttacccctcagcctccaaccagcctagggaagatcttcaaaaaacaataaggcttacaacacataatagtcatagctagtttactgagcacctcctatgttcccagccctggctacagatttctccagttaacccacacaaccaccctgcaagacaaaaattctaccattttccaaatgaggaatgtgatatacagagattaaatgactttaagtgcctctgggtagcaggccaagaattaaatccaggtctacctgattccaaaatctgtgctctcagctatatacatcccaaagtcccacaggacaataggtgttgggagtggcttgatgctatatggttccaaaaatggagatgaggggagaggggaaagataaaccactagaaatgctcggtatggggacaaccaaacagtctcaagttggtggctcagactgatgtcttgagccaagatgttggtggacaaccagttgcctcagagtcaaacagcaacagctgcctgtctgcaaccttgaaggcctgggcaaactgaagctgaaggagcagaagctatgggtgagcagaggaagctgatctgtagacagatcagatgacagcagagtggagatggcaggacaggaaggccatgtggcttcttagttggaaagaagagcaaaacctaaagatgccttgaattccaaaccatctagttttcataacacctgaagtgtcatgagacagatatccccatgttctcacaataaactctttattgtttagctagccccagtgactttatgcatcttataaccaagaagccttcagtagagcaagtctgagccagaggttttatcacactttgtcctcagggtccaccaggaaccaggtcttggctcacagccaggctggaaacagtcttcacagttctgagcctggagtttgagatctgcctcccctttcaaggaagatccagaggtcacctgcgcttgtagagacatggctgaagctgcaggcctgaaagctgagccttgggccctaccagaggggggcccagtcttttggaaatcaaacaagaagaaatggctgttggtcaggtccttggagacaatcttgaagcctagcttggtcacagcccgcagaaaggttcgaacatcctcaaagcggctgctgacctcagccactttcaggagaccccctggcttcagtactctatttgcctcctctaggaagtccctgatgttgggttcccatcagtgaaaggcaaaacacagccacatccacagactcatcctccagaggaacctgggccatgtcacacacagtgaccctagggtccagagaagccaagtcaaagcaatgcacagggttccggatacttgaagccaagcggcaatccccacagccgaagtcagccaccactagggatgcaggccgctggcgaagatccctggcgatgcggtcccactggctgcagtggccacttcttcacttggctctggaagccgcggtggtagagaagaaaagcctcagggtcttcctggaagagacgctgtgcagcactgctgggccctgagtacaactgttcattgaggtagcgaaatcgggccccatccagccgctgtgccatgcgggctcgcaaagcccctgcccgagcctcatggctgtctgtcctgggaacaggagacacctctgtcttctctgtgggggcctcagctggggcctggtctggcacctgaggtggctgaaacttgttcttacatcttctcttgttcttttgccggttccgccactgcttgcggcttaatgtatgagggggtttaggggaagtggacccagggctttgctttggtggatcatttgtagtactacccttccaggctttgggacctgtttggtcaacattgtccaggtgctgggctgaatttataggggcatgtttctggcatttcctctttcttttctcatcttcagcagagtcactgccaacaagagcctgtttgtggcatttcttcttcctttctacttcttcctcagagtcactgcaaggtgggccctgtttttgacatttcttcttccctttcttccctacttcagcagaggcactggcaaatgatgcctttttggggcatttcttcttcctttcctcctcctcctcctcagagtcacttatacataggctggggggatgctgggaaagagatgctgcctctagggcccgtaatgtggccaagagctggcggcgcttggagcccttgttttgcgaggaggccgcaggcggaggtcgtgagattacgggcccaaggcccgcggctactggggccgcctcggcccactcaggctcttcgaacatgagggtcgggagggcagggtcgcc

SEQ ID NO: 13170 - DNA, 754 bp, Homo sapiens
  misc_feature (1)...(754): n = a,t,c or g
ttttttttttagcattagcaattttttatttttccttttttgttgcataggaaatgcagtacttgcttccagtaattgtattgtaatgtgagaaggtggtagcactaatggttgaatacaagagttaaactaatccacaccagctcaaaaaacctgtggagatttagttgaataagaatggacgcccacagtgattctcaaccaattacaaattttcacagaacacagtaaaactaaaagggtaactatgagagtcaatacaagtatactagaggcacagggggcccggctcataaaaacagatttcagaccaagttattaacacggggggtgtttcgtttcataacagatctcttaccatcactggaagtgttccatcccctccccctacaatttgaaatggaaaacagaggtattccgagtggacagatttccatgtgtggtgggaaaagtccccagtgaattttgctctggtgagagggcagggctaagggtggggcgggggatcagggatttgcctttgagagtcttcctaaaggacctcctagaacctgataaagctcctagtctaggtctagttagtatctcagtggtgaggctaccaaatgccttcgcagtgcagagacgatggtctgagaccagggagaaggcaccgagccgttagttctctcaagcctctgtcccagcggagctagcggccttatgncttcggttgcaatgtcaaaagaaaaacaaacaaacaaaaaaaaaagcc

SEQ ID NO: 13171 - DNA, 272 bp, Homo sapiens
ggcacgagtacccatatatgtcatctctcaataaactgaattttttaaaaattaaaggaatttacttaattgcaacaagaggactggaaaggaaaggctgccgagcatcttggcctgctgtacccctcttccttcaaaggagggtgtggccacgtccgacagcagagttgaatgaagcctgcatgcttgcacaacatcagaactgtcagaatgtcaagatggaatactttcaattgagttttacaaaaagacaagaaatttgctgggtgtgg

SEQ ID NO: 13172 - DNA, 1358 bp, Homo sapiens
gtatcaagggccaattttgaacttaccagtgtcacacaatttgctgctcatcaagaaaacaagagactggttggttttgtcatccgtgttcctgaatccactggagaagaatctctgagtacatacatttttgaaagcaactcagaaggcgaaaagatatgttatgctattaatttgggaaaagaaattattgaggttcagaaggatccagaagcactggctcaattaatgctgtccataccactaaccaatgatggaaaatatgtactgttaaacgatcaaccagatgacgatgatggaaatccaaatgaacatagaggcgcagaatccgaagcataactcacttgcgcctgtgggggaagagcaaacaggaaggagagctaccctcctaagggttttaacgtctctgacatacaggcacactgacctgatttccgaaggctgacaatcgtttgtggaatgtaatcttgatgccttgatactgagacttgggagggaaactaagaaatggttgacagcgttcccacccatctacaatgttattttaggtgctttgtggtaagtcttttttcttagattgcgctaaaatttcttagattgttcagcgctcagaacaaaagtttgaaaaatgcattgttcatatgaatgtcatctcttttcagtttccagtatcctttttaaaaaatggcaaaagcctagatttacaatttgatgaacactaaatatttcttattaatataatctatttttgtattttacttaatgagctttaagtgcctgtcgttctgaaaattgtgtatttataattcagcttatctcacaattggacctaatagcatttctttgtgcagttaggtgacgagcactgctttgaggcccaagcactagtagagatgcgcgatacaggtctagtttcggtaactgttccagacatcaagcaataaaaaaatgaataccacaaaagatgtttgattttacagtggagccttactgaaccagcattcagaagtttaaggtcctcctaggtatgagtatttttagtagtggatcactgtggacagggtgcagctctaccagttcctgtttcttctgagccagaccctcttcagggaagggaccaattaattttaaaactcacttgaagcacagctggtcatggggcttggtataaagttcctatttccaccctgatacttccaattcctggaaccccagcccactcccccatccctcctccctatcaaactagtataatgattttgaatcggtacagtgtgtttaactgtaactaagttcaacagactattattatctttgtaataaattaacctagcaataaaaattattctgtttcttta

SEQ ID NO: 13173 - DNA, 1774 bp, Homo sapiens
tttttttttttttttttaatatcataactttattcaggagataatcaaatacaatacagggctgacactgacacacagctatgcataaaaattatataaatctccttgctagattttccagaagaggcccagtcataaaaaataaagagaaaccaggagagtgcctaaatgactgcagtgtttcaagcgtaacgatttccacactcccttgtactgaaggcagccccaggtgaaggtggtcccactagcaggaagattaggaggcagcagctatgcagaagccatgtctccctgggccctgccagagctcaacggtagaccttgctgaactcctggagggcccaccgcttgttctctgttgcctgcttgagtacggtgtactctttcaccagcctgtcaaactcctccccaaggacctcataggagttcaggacctgtcttgagttctccatgtcctgctcctgtaggtgaatggctccctccaaacggtccctaatcagacgatgaacttccactttctcaacagtgtaagtgtcggacaaaatctttagctcctccatcctcagcttaaggatcatagcaccgcacttgacttccaggtactgggcattgatgcggtctagctcggattgagtcttcagccggtgttcttgaagaagcctctgcaggcaaagtgaggcagcggagaagcacctgggagtaagcagcactcttcttctccagcagcaacatctgctccttctgctggctcttggcatcctggcactgctgctgctcacccaccaggacctctgcgagtttccacacctttgctgccttcacgggtttcactgtcagcatctgaattgggatcatagtagcagagcaagaagtgaaaacatttcctttttgaagctggctccctcctaacttccttgctgtaagccgaagccctcatcccacacaaaatcctctgagagtggcatgagttccagaaggtccgctttctccagccccagcagtggaggtatctccctctcctggctaggacctaagagccgcatcagttcagttacaagcagccgctgttcaagggtctcatgaaactttttgtcctcagaagttacatttgtgtcttgtatcttcacatagtagtccacaagcaactcttgaatgactctgtgtaaaatctcagacctcaaccatgttgtcttatgcagtcgaacttccttccatgcctgagcctgctcctttgctagggtgaggcttaagccactctcatccacatgctgtgagagattcaggagaagcttgctgaagtatgggttctgtaacaggtcctctttactcaggttacaaggaggaagttgtttgctgcacacttgttgaagtatttccatcccttctccaggtgagcagaaatccccggatgccatttgattttcttgggattctaatctgtggaacagggcccgagatgaatcaaaatgcagaacgggctctccggcgcctacttcccttctgtctgggcggccaaggattcccaagagcgacgacggtctccggccactggccggaatgactctcccagagctcctcttccccgaagctccgcccgccgaccctctaaagcaaacctgcacaccctggggcagctgaagctctcaaggcggtgccgagaacctcggctggggagggctggccagcagcgtctacaccccagaacccgcccgcgccggggctccggaacctctcgttcgggccgggcgcaggggctgggggaagcgaggcccgg

SEQ ID NO: 13174 - DNA, 1949 bp, Homo sapiens
gaggtcagcctcgactgtgagcgcatggaacagacagactcttcctgtggaaacagcaggcacggtgaaagtaacgtctgacagaagcatgtgcacttcgggaagcaggcctgcatcttacctgtacagtatttgcattccacagatggaacggtttggagaagcactttttcatacttttgtgaaagtatacatgttggcccagtctctcgtatctgtacctttgtccctagtactgtaactgccaatctgtctgtgtaagctggaatctgtggcaactattaccctgtgttgtatttcccaagtgtctggatggatggagaggtactcaaacaagttactttcagttgtcctgctggattttaaaaaaatagaaaaagaatctcaaaactactgttttacatagattgtttgaagagtccttcctcttgtgcttctgtaccactttcccagctcttagatgtggtagctaaaggcacggaatttagacggccttgtaaatagggcatgaggaactcatctgtgtattgggatggtattagagagagaatcaggaaagaccaactcatgaagtgaacttggtttgatcttactcaactagaaagcttgaaaacatccctggggattctgaaggcttaattttgcaaaggaggatgcattgtctgaactttgcaacttcatccagtgcaagtttgatgcaagaatgtattaggacataaaatagaggctgaccttaaaagggccaggacagaagcggctgccagctctgaatctttaactgaaatgcacatggcaccaggaggtgtctctcatagttggttgctagcctaaaacatcagaatagaacccaaagggcttaggaaggccctgccaggataacaagaaggccctgtattcattgtgtttcatctgcctaggcctactcattattttagagaatgaatgaagcaacaaggaagagagaccatgactctatcgatgacactgtttatagaaacacaggagaggaagaatttggaatgaaaagcacttcgtcagaaccttctgtgggagccattgagagaaaagcatggtccagtgccttctgagaaaggccagagctttgggctttcctgctctgcttttggggtcgtcagtttgccatctctggttctgtgctataatcagaattgtaattatgttctccagaggccaatttcattaactctgattaattagaatcagctagccagattagtaacctctttgtccagccttgatttacagtgcagggtaaagtgcagaccttaaaaacagctaagtacctagaagagctccctgctagtgtaaatattaaggaggacctgtgcaaaattatacccacaccagcactagtggtaattattctaaattattgccaaaaagttttttttaatctgtctttcaagtttacagaaaagaaagcagtaaatgcattgatgtcattttattatgtacatatatcatgtgcattcaagctgtgtgacaagatatatcaatataaaaacaaggtatatactttattattttttgaaaacaaggatattgtgatcaattttaccctgtaaaacatatttctgtatttataggtcttaaacatgatgaattttttctattacaagtttatttaaaactgctttctcaagtcgttattgatacagcaagtgaacctgctgcagacagaagcagaggaaagccaagaacagcctttattggtgaagaaaagaatgaatgattctttgtaggcgccatcagccacttttagaagccatcagccagtgtgttgggaaaagaggtttgtcaagtgttggcctatgggaaggtggtcaatgaatgttttgatgaaatgaatgtttttgtataatggccttaaacttttctggaagtatttcaaataaattacattattaagtcatcctcaaaaaaaaaaa

SEQ ID NO: 13175 - DNA, 1295 bp, Homo sapiens
gccaggacatccagcgcggggtgacaagtgccgtgaacatcatgcacagcagcctccagcaaggcaaatttgacacaaaaggcatcgagagtactgacgaggcgaagatgtccttcctggtgactctgaacaacgtggaagtctgcagtgaaaacatctccactctgaagaagacactggagagtgactgcaccaagctcttcagccagggcattggaggggagcaggcccaggccaagtttgacagctgcctttctgacttggccgccgtgtccaacaaattccgagacctcttgcaggaagggctgacggagctcaacagcacagccatcaagccacaggtgcagccttggatcaacagctttttctccgtctcccacaacatcgaggaggaagaattcaatgactatgaggccaacgacccttgggtacaacagttcatccttaacctggagcagcaaatggcagagttcaaggccagcctgtccccggtcatctacgacagcctaaccggcctcatgactagccttgttgccgtcgagttggagaaagtggtgctgaaatccacctttaaccggctgggtggtctgcagtttgacaaggagctgaggtcactcattgcctaccttaccacggtgaccacctgggaccatccgagacaagtttgcccggctctcccagatggccaccatcctcaatctggagcgggtgaccgagatcctcgattactgggggacccaattccggcccattgacgtggcgcctcacccctgctgaagtgcgccaggtgctggccctgcggatagacttccgcagtgaagatatcaagaggctgcgcctgtagctgcctggatgagcacacctggctcatcacacttgcaggcctgttccctaaggggccccagccaaggagctgagcgaggctgtcgggcttgggggagatctgacagcccagacctttctacggctggcagcagagaaacaaagtctggacccactccatgctctgccctcagacctggccaggtgatgctctgggggcagcatctccccaccgagagaagcgggctcctaatgaggtgggaaagccacggcaggcagcgagcagcccaggccagctttctgcatggatggtcagtctcttgccctcaaacactacagcaaacaagctacccctgccagtcctagacaacttgggtacatctggggacctagcagttaggcttgactttgaggagaggctgtgatgtttatgatccctgaataaagctactccttggagaaaaaaaaaaaaa

SEQ ID NO: 13176 - DNA, 610 bp, Homo sapiens
ttttttttaagattctgaccaaaacatttaattaacaaaaaaatattacaatagcagagaaaataataataataacaataaagagaaattagaagtgggagtcagggtagaaaaaaatgcaaaggccttggtccctaggagaccaacactccagctgagctggccttagccccagccccttctgagttttccttggctgctgggcttctcatcttctcccatgagacgaatgttgtgcttttcccggaattcatttagttcttttccctttgcctgaagctgctgtgtcagtgtctcaatgatcttctgtatctgctccttgttgttctccaaagcgggcagcacctctttgacagttcgctccaccagcactcctccaaccatgcggtagcacttacgagtttcatctacctccttcagtgtatcgatcactaggctgtgctcattcaactccatctccaactcagctgctttggatgccaggcctcgctgttcctgccgaaggcggttgaagccagcaatcacctgctctgcggacaccgcccccttcacgcgcgcgtcccgctgctcttgccggcgcgaccgctgttctccgccatcttcgccgccc

SEQ ID NO: 13177 - DNA, 6201 bp, Homo sapiens
  misc_feature (1)...(6201): n = a,t,c or g
ctcctccttcccttcaccacagcgttttagccagtctggacagagctatgatggcagttacaatgtgaatgctggatctcagtatgaaggacacaatgtgggttctaatgcacaggcttatggaacacaatccaattacagctatcagcctcaatctatgaagaattttgaacaggcaaagattccacaagggacccaacaggggcagcagcagcagcaaccgcagcaacaacaacacccttctcagcatgtgatgcagtatactaacgctgccaccaagctgcccctgcaaagccaagtggggcagtacaaccagcctgaggttcctgtgaggtcccccatgcagtttcaccagaacttcagccccatttctaacccttctccagctgcctctgtggttcagtctccaagctgtagttctaccccatctcctctcatgcagactggggagaatctccagtgtgggcaaggcagtgtgcctatgggttccagaaacagaattttacagttaatgcctcaactcagtccaaccccatcaatgatgcccagtcctaattctcatgctgcaggcttcaaagggtttggactagaaggggtaccagaaaagcgactgacagatcctgggttgagtagtttgagtgctctgagtactcaagtggccaatcttcctaacactgtccagcacatgttactttctgatgccctgactcctcagaagaagacctccaagagggccctcatcttccaagaaagcagatagctgcacaaattctgaaggctcctcacaacctgaagaacagctgaagtcccctatggcagagtcattagatgggagggttgctccagcagttcagaggatcaaggcgagagagtgcggcaactaagtggccagagcaccagctctgacaccacctacaagggtggagcctctgagaaagctggctcctcaccggcacaaggtgctcagaatgaaccccccagactcaatgctagtcctgccgcaagagaagaggccacctcaccaggcgctaaggacatgccattgtcatccgacgggaaccccaaaggttaatgagaagactgttggggtgattgtctcccgggaagccatgacaggtcgggtagaaaagcctggtggacaagataaaggctcccaagaggatgatcctgcagccactcaaaggccacctagcaatggtggggcaaaggaaaccagtcatgcatcacttccccagccagagcctccaggaggaggagggagcaaaggaaacaagaatggcgataacaactccaaccataatggagaaggaaatggccagagtggccactctgcagcgggccctggttttacgagcagaactgagcctagcaaatctcctggaagtctgcgctatagttacaaagatagtttcgggtcagccgtgccacgaaatgtcagtggctttcctcagtatcctacagggcaagaaaagggagatttcactggccatggggaacgaaagggtagaaatgaaaaattcccaagcctcctgcaggaagtgcttcagggttaccaccaccaccctgacaggagatattctaggagtactcaagagcatcaggggatggctggtagcctagaaggaaccacaaggcccaatgtcttggttagtcaaaccaatgaattagctagcaggggccttctgaacaaaagcattgggtctctattagaaaatccccactggggcccctgggaaaggaaatcaagcagcacagctcctgaaatgaaacagatcaatttgactgactatccaattcccagaaagtttgaaatagagcctcagtcatcagcacatgagcctgggggttccctctctgaaagaagatcagtgatctgtgatatttctccactaagacagattgtcagggacccaggggctcactcactgggacacatgagtgccgacaccagaattgggaggaatgaccgtctcaatccaactttaagtcagtcggtcattcttcctggtggtttggtgtccatggaaaccaagctgaaatcccagagcgggcagataaaagaggaagactttgaacagtctaaatctcaagctagtttcaacaacaagaaatctggagaccactgccatcctcctagcatcaagcatgagtcttaccgcggcaatgccagccctggagcagcaacccatgattccctttcagactatggcccgcaagacagcagacccacgccaatgcggcgggtccctggcagagttggtggtcgggagggcatgaggggtcggtccccttctcaatatcatgactttgcagaaaaattgaaaatgtctcctgggcggagcagaggcccagggggagaccctcatcacatgaatccacacatgaccttttcagagagggctaaccggagttctttacacactcccttttctcccaactcagaaaccctggcctctgcttatcatgcaaatactcgggctcatgcttatggggaccctaacgcaggtttgaattctcagctgcattataagagacagatgtaccaacagcaaccagaggagtataaagactggagcagcggttctgctcagggagtaattgctgcagcacagcacaggcaggaggggccacggaagagtccaaggcagcagcagtttcttgacagagtacggagccctctgaaaaatgacaaagatggtatgatgtatggcccaccagtggggacttaccatgaccccagtgcccaggaggctgggcgctgcctaatgtctagtgatggtctgcctaacaagggcatggaattaaagcatggctcccagaagttacaagaatcctgttgggatctttctcggcaaacttctccagccaaaagcagcggtcctccaggaatgtccagtcaaaaaaggtatgggccgccccatgagactgatggacatggactagctgaggctacacagtcatccaaacctggtagtgttatgctgagacttccaggccaggaggatcattcttctcaaaaccccttaatcatgaggaggcgtgttcgttcttttatctctcccattcccagtaagagacagtcacaagatgtaaagaacagtagcactgaagataaaggtcgcctccttcactcatcaaaagaaggcgctgataaagcattcaattcctatgcccatctttctcacagtcaggatatcaagtctatccctaagagagattcctccaaggaccttccaagtccagatagtagaaactgccctgctgttaccctcacaagccctgctaagaccaaaatactgcccccacggaaaggacggggattgaaattggaagctatagttcagaagattacatccccaaatattaggaggagcgcatcttcgaacagtgcggaggctgggggagacacggttacgcttgatgatatactgtctttgaagagtggtcctcctgaaggtgggagtgttgctgttcaggatgctgacatagagaagagaaaaggtgaggtggcttcggacctagtcagtccagcaaaccaggagttgcacgtagagaaacctcttccaaggtcttcagaagagtggcgtggcagcgtggatgacaaagtgaagacagagacacatgcagaaacagttactgccggaaaggaaccccctggtgccatgacatccacaacctcacagaagcctggtagtaaccaagggagaccagatggttccctgggtggaacagcacctttaatctttccagactcaaagaatgtacctccagtgggcatattggcccctgaggcaaaccccaaggctgaagagaaggagaacgatacagtgacgatttcaccgaagcaagagggtttccctccaaagggatatttcccatcaggaaagaagaaggggagacccattggtagtgtgaataagcaaaagaaacagcagcagccaccgcctccaccccctcagcccccacagataccagaaggttctgcagatggagagccaaagccaaaaaaacagaggcaaaggagggagagaaggaagcctggggcccagccgaggaagcgaaaaaccaaacaagcagttcccattgtgggaaccccaagaacctgagatcaaactaaaatatgccacccagccactggataaaactgatgccaagaacaagtctttttacccttacatccatgtagtaaataagtgtgaacttggagccgtttgtacaatcatcaatgctgaggaagaagaacagaccaaattagtgaggggcaggaagggtcagaggtcactgacccctccacctagcagcactgaaagcaaggcgctcccggcctcgtcctttatgctgcagggacctgttgtgacagagtcttcggttatggggcacctggtttgctgtctgtgtggcaagtgggccagttaccggaacatgggtgacctctttggacctttttatccccaagattatgcagccactctcccgaagaatccacctcctaagagggccacagaaatgcagagcaaagttaaggtacggcacaaaagtgcttctaatggctccaagacggacactgaggaggaggaagagcagcagccagcagccagaaggagcagagaagcctggcccgcacaccccaggtttaagcggcgccaccgctcggaagactgtggtggaggccctcggtccctgtccagggggctcccttgtaaaaaagcagccactgagggcagcagtgaaaagactgttttggactcgaagccctccgtgcccaccacttcagaaggtggccctgagctggagttacaaatccctgaactacctcttgacagcaatgaattttgggtccatgagggttgtattctctgggccaatggaatctacctggtttgtggcaggctctatggcctgcaggaagcgctggaaatagccagagagatgaaatgttcccactgccaggaggcaggcgccaccttgggctgctacaacaaaggctgctccttccgataccattacccgtgtgccattgatgcagattgtttgctacatgaggagaacttctcggtgaggtgccctaagcacaagcctccccttccgtgccctctcccccccttgcagaacaagaccgcgaaaggcagcctcagcacagagcagtcggagcgggggtgaggggggcagtgtgctcgtgggaatggaaaggacagcaagcacaggtgagactgtggagatgagaaggtggtggacactcgtgatggaatggaaatcgtcctaccgtgcagccacaccctgccctgccccgccccgccccgcccgcgtgcctgcccatgccagcacttccttaagttctcacatcacactcaaaccagtgacaccacaggaaagaaagacccaagacgttggaatggctgtttccatggacacaatctccatagtgacaatgtggggggaggggggaggggtgggatgatggggaaagggtggggggaattaaaagggagggataaatatatatatataaatctatttttagtctggaaagactttgtttaaatgaaaggtgcgctatcccttttgattctgttttaaaattatctcgttaaagatctccaaatttgttccgatgacaagtgaaatttaaatgtgagattgaactgaacaaaccctcatctcatgaaggacggggtgtgtgtgtggcgttgatctttagcctgtctcacaccagttcagaaaacactagacccaggattgaaaaagcaaaccacagcagaaccatccttttgtcattaatttgtctcaaagtgggaaggttttgggggagggggaaatacagggatggtccatgttttcaagagtaggggaatgatgtttaaacacaaaaataaattttttttcatttccagaaacactatttatttatggttttttttttttaattttttctttttgggggtgaaattggcagatgcctgaggtcatagctgtgtcctgggtcactgtggctggtgaggacctcaaggaccccatcaagtgtacacagcagcagcaaaatcaagggatgaccctcctctggggccccctgtcctcagcacattccaggcagctgtgccctgacccacagggacccgtggggatgggaggaggtccaggcctgtgttgccagagctggcagtgtgagctgtaggcagggacggggagggactgtcctntgat

SEQ ID NO: 13178 - DNA, 1892 bp, Homo sapiens
  misc_feature (1)...(1892): n = a,t,c or g
cgcggagctcgtgcacttcctcttcgggcctctggacctgatcgtcaacacctgcagtggcccagacatcgcacgctccgtgtcctgcccactgttctcccgagatgccgtggacttcctgcgcggccacctggtccctaaggagatgtcgctgtgggagtcactgggagagagctggatgcggccccgttccgagtggccgcgggagccacaggtgcccctctacgtgcccaagttccacagcggctgggagcctcctgtggatgtgctgcaggaggccccctgggaggtggaggggctggcgtctgcccccatcgaggaggtgagtccagtgagccgacagtccataagaaactcccagaagcacagccccacttcagagcccacccccccgggggatgccctaccaccagtcagctccccacatactcacaggggctaccagccaacaccagccatggccaagtacgtcaagatcctgtatgacttcacagcccgaaatgccaacgagctatcggtgctcaaggatgaggtcctagaggtgctggaggacggccggcagtggtggaagctgcgcagccgcagcggccaggcggggtacgtgccctgcaacatcctaggcgaggcgcgaccggagacnctggcnccccgttcgagcaggccggtcagaagtacttgggaacaccgcagcccgacccacaagctacccccaagcttcccggggaacaaagacgagctcatgcagcacatggacgaggtcaacgacgagctcatccggaaaatcagcaacatcagggcgcagccacagaggcacttccgcgtggagcgcagccagcccgtgagccagccgctcacctacgagtcgggtccggacgaggtccgcgcctggctggaagccaaagccttcagcccgcggatcgtggagaacctgggcatcctgaccgggccgcagctcttctccctcaacaaggaggagctgaagaaagtgtgcggcgaggagggcgtccgcgtgtacagccagctcaccatgcagaaggccttcctggagaagcagcaaagtgggtcggagctggaagaactcatgaacaagtttcattccatgaatcagaggaggggggaggacagctaggcccagctgccttgggctggggcctgcggaggggaagcccacccacaatgcatggagtattatttttatatgtgtatgtattttgtatcaaggacacggagggggtgtggtgctggctagaggtccctgcccctgtctggaggcacaacgcccatccttaggccaaacagtacccaaggcctcagcccacaccaagactaatctcagccaaacctgctgcttggtggtgccagccccttggtggtgccagccccttgtccaccttctcttgaggccacagaactccctggggctggggcctctttctctggcctcccctgtgcacctggggggtcctggcccctgcgatgctcccccatccccacccacttctacatccatccacaccccagggtgagctggagctccaggctggccagggttgaacctcgcacacacgcagagttctgctccctgaggggggcccgggaggggctccagcaggaggccgtgggtgccattcgggggaaagtgggggaacgacacacacttcacctgcaagggccgacaacgcaggggacaccgtgccggcttcagacactcccagcgcccactcttacaggcccaggactggagctttctctggccaagtttcaggccaatgatccccgcatggtgttgggggtgctggtgtgtcttggtgcctggacttgagtctcaccctacagatgagaggtggctgaggcaccagggctaagcaattaaaccagttaagtctcccagg

SEQ ID NO: 13179 - DNA, 2544 bp, Homo sapiens
ctagcgctcgctctactctctctaacgggaaagcagcggaatacaagagactgaactgtatctgcctctatttccaaaagactcacgttcaactttcgctcacacaaagccgggaaaattttattagtcctttttttaaaaaaagttaatataaaattatagcaaaaaaaaaaaggaacctgaactttagtaacacagctggaacaatccgcaagcggcggcggcagcggcggggagaagaggtttaatttagttgattttctgtggttgtgggttgtgcgctagtctcacggtgatgaaacctgcaaattttttcgaggggaccgagaagctgctggaaggtatggttctcccggcagcagcccggacgcaaacacaggatctggggatcttcgccgtatcccaggatctgattgggacatacttttgagtgatgttcaaggttcaatcgtaagtgtggcaaaacctggcaagcaggaatgttattgtactacttgagagaaacatgtttgtctccaagagacgtttcattttgaagacatgtggtaccaccctcttgctgaaagcactggttcccctgttgaagcttgctagggattacagtgggtttgactcaattcaaagcttcttttattccccttaagaatttcatggaagctttctcaccaggggttcccacaccggaatttccaggaagaaatggagtttcttatgccaatttccccaaatggcgcagcatttggtatgggccgttggaattctgactgttggtacttatatactctggatttcccagagagtcggggtaatcagtcagccagatcaaaccttggaaattctgatgagtgagcttgacccagcagttatggaccagttctacatgaaagatggtgttactgcaaaggatgtcactcgtgagagtggaattcgtgacctgataccaggttctgtcattgatgccacaatgttcaatccttgtgggtattcgatgaatggaatgaaatcggatggaacttattggactattcacatcactccagaaccagaattttcttatgttagctttgaaacaaacttaagtcagacctcctatgatgacctgatcaggaaagttgtagaagtcttcaagccaggaaaatttgtgaccaccttgtttgttaatcagagttctaaatgtcgcacagtgcttgcttcgccccagaagattgaaggttttaagcgtcttgattgccagagtgctatgttcaatgattacaattttgtttttaccagttttgctaagaagcagcaacaacagcagagttgattaagaaaaatgaagaaaaaacgcaaaaagagaacacatgtagaaggtggtggatgcttcctagatgtcgatgctggggggcagtgctttccataaccacccactgtgtagttgcggaaggccccagatggtaatgatagtgtaatcattttgaattgtatgcattattatatcaaggagttagatatcttgcatgaatgctctcttctgtgtttaggtattctctgccactcttgctgtgaaattgaagtgcatgtagaaaaaaccttttactatatgaaactttacaacacttgtgaaagcaactcaatttggtttatgcacagtgtaatatttctccaagtatcatccaaaattccccacagacaaggctttcgtcctcattaggtgttggcctcagcctaaccctctaggactgttctattaaattgctgccagaattttacatccagttacctccactttctagaacatattctttactaatgttattgaaaccaatttctacttcatactgatgtttttggaaacagcaattaaagtttttcttccatgagttgagtccttaagaaaatgattccagttactcattttgcatatttgctattttaacattattggaccctgcatttatagtcctttgatttcttccctctccctggtgtctcccccaagaccccaaataaagcaatacactgttaacactgtgggtttatatactaattctataccccagatggggaaatgggggagatggtccctgggcttaatattctttaaagggcatgggaatttagcctctcttttattgtaatgtgctcttttggaaaatagttggttagcagggaagacccagagttgtagattgagattagggtgtactggctgaactgtggaaaacatacaattctgtgttcctcagtaaatgagattagcgtctaatgagtagcacccctttactaacttagtagtagtataaaatcatttttatttagttaattaccagagagatttagcataattttgttctggattcagtaaatcaagtcagcttggatcattcaccttaacttttcctttagcagccatttccactagtttccattaagtagtgttctataaactttgatccaaagcagaatcaatgtcttttccatctcgtgacttaaagttctgtggactgtggatggcatgtgagtgttccgacttcatctgttcctctttaactacgggtgttt

SEQ ID NO: 13180 - DNA, 679 bp, Homo sapiens
tttgactggctactaagggactctaggagtcagaaactaaatgctgagtctctcaaaggcgtagagagaatttcagagggccttaccatgacatgaggattaaactccagttctgcccgattctcatcacgaaatccttatcccatgcctcattgtgtttggtgtccccttgcctaggggacagtcctcctgggtaagatcagcaagataactcttcagtcacattccatttgatactttgaatactctggggtccttacccaccaaatggatggaattcagctgctcaatcactgcctttctcagaactcggttgtccaaccacaattccctttcccttaggatagggctatattgggcaaaatgccgcccgaacagactgctgacagtaaaccaaatattagtttctctcaccttcttgaaggcatttacagtctttgtaagcttttctcctagattttccctttcctgttcctgcttagattctaagaatgaagtgcatccttctccttttcttcattaggtgaagtgggatttacccattaccatatattcaccaccaggtcactgacgagagactccaagtgaatcgctttccctctgcattcctctccttgtacagactagagggtcacattggtgtaaaagccctaacataagcctggcaaaagagatctgg

SEQ ID NO: 13181 - DNA, 937 bp, Homo sapiens
  misc_feature (1)...(937): n = a,t,c or g
ctcagattcagagcacccaggggcccagtttcccatgaaatgggagcatgaagttgaagtgagggctgagcagaggggagcagacacgctcggggactgtctatgggcattgaaaatgtataaccattttagcaacaggcggcgagtcaaaaaacaaagtgtgtttatctaaactgggcaattccacttctaggaatttatcctaagggttggttgggggaataatcaaagctgtaaccaaatctttataacaagggtggttagctcagcattattagtgatgggagaaaactggaaaaaatccaaatatctaccagaaagggtgtgaaaaagcacaattgtatttgggggactgttgttgtttttgtttnnnnnnnnnnnnnnnnnnnnnnnnnnnnnnnnnnnnnnnnnnnnnnnnnnnnnnnnnnnnnnnnnnnnnnnnnnnnnnnnnnnnnnnnnnnnnnnnnnnnnnnnnnnnnnnnnnnnnnnnnnnnnnnnnnnnnnnnnnnnnnnnnnnnnnngattaggattattattagtttagagacagagcctcgctatattgctcaggcctgtctcaaattcctaagctcaagcaatctttnnnnnnnnnnnnnnnnnnnnnnnnnnnnnnnnnnnnnnnnnnnnnnnnnnnnnncaactgtgtttttaaagtatatatgcattttcaaaaacctgtcagaaaatatagaaaaatgtcaatggtgtgtctggctggctgatgtgatttcacctaattttaatgtggctttataattttctggttttgtgaagttgttcacaaaaagagacatttcttctaatataatttttaatacaacagtaatgtactcatgtgcattactctttttgtaatgagtatattacaaaatgtaatgacttttgtacattactcttttttcttgccaaaaaaaaa

SEQ ID NO: 13182 - DNA, 1281 bp, Homo sapiens
ttttttttttttttcattttgcccaaatctgagttttatttttgctggaatcaggtcatctggcctggctgtcccaccaacccagctgggagcctctgagtggcctgccagcagcatctcattacaaaacagccccctggaaccaggtagccaaggaagcggcccacctgaaaggcatttagattgagaagaaaaactgcaccttacctgacaaaggtcaggggttcacggtgaagggagggctgctgggatcacagggacagcagcatcttctagcagcttggccataccagccactgaggtcctaactgcagccaaggggccgttctgcacatgtcgctcaccctctgtgctctgttccccacagagcaaacgcacatggcaacgttggtccgctcagccactggttctgtggtggaacggtggatgtctgcactgtgacatcagctgagtaagtaacaacgactgaggatgccgctgacccagggctggggaaggggactcccagctcagacaggcttggctgtggtttgctttgggaggagagtgaacatcacagggaatggctcatgtcagccccaggagggtgggctggcccactggtccccgggctccttctggccctgcaggcgatagagagcctcaacctgctgccgcttctccttggcccgggtgatggccgtctggaagagcctgcagtagaggtgcacagccagcggagagtccgtcattgccgggtacagggtaggtgatgaggcaggggttgcagttggtgtccacgatgcccactgtggggatgttcatcttggctgcgtctcctcacggccacgtgtggctcaaagatgttgttgagcgtgtgcaggaagatgatgaggtccggcaggcggaccgtggggccaaagaggaggcgcgcgttggtcagcatgccgcccctgaagtagcgagtgtgggcgtactcgccacagtcacgggccatgttctcaatcaggtacgagaactgccggttgcggcttataaacaagatgatgcccttgcggtaggccatgtgggcggtgaagttcaaggccagctggaggtgcgtggctgtctgttccaggtcgatgatgtcgtggtccaggcggctcccaaagatgtacggctccataaacctgtgccgacagccagctttgtgtcccagatggactcgggcatcgaagaggcttctcacggaaaacagttccttgacattgaagaagtcagagtgcttgaggggctcattcaaaatcttgtcgttgaaatcgc

SEQ ID NO: 13183 - DNA, 785 bp, Homo sapiens
tccgtctgtgtgttcgagtggacaaaatggcgaagatcgccaagactcacgaagatattgaagcacagattcgagaaattcaaggcaagaaggcagctcttgatgaagctcaaggagtgggcctcgattctacaggttattatgaccaggaaatttatggtggaagtgacagcagatttgctggatacgtgacatcaattgctgcaactgaacttgaagatgatgacgatgactattcatcatctacgagtttgcttggtcagaagaagccaggatatcatgcccctgtggcattgcttaatgatataccacagtcaacagaacagtatgatccatttgctgagcacagacctccaaagattgcagaccgggaagatgaatacaaaaagcataggcggaccatgataatttccccagagcgtcttgatccttttgcagatggcttctattctgctgcttgaagtcagaactgctgatggagacaaaggcacgaaagtgtacgtattccggattagcaacccaggaacccatcacttctgaagactctaaactgtgctgtcattttgtttttatatgcattaaaatatttgttttaaactgctgtagatgtttgtgttcaaacaggttaaattgatcagcaaactcaataaaaagtaagatgtataattattaaagttttccatcaaaaaataatttaaatgattatggaataacataatatttagagcagggcagataaatcagttgaacctgcttattttttatttattgtactctttttcccg

SEQ ID NO: 13184 - DNA, 1438 bp, Homo sapiens
  misc_feature (1)...(1438): n = a,t,c or g
ctggagcaggagaagcaccggccccatgaggtgggctccgtgcagtgggccgggagcacctttgggcctatgcagaagagtcggctgggggagcatgagtttgaggccctcatgaggatgctggacaacctgggctacagaacaggttacacgtatcgccacccctttgttcaagagaaaaccaaacacaaaagtgaggtggagattccagccacggtcacagccttcgtgtttgaggaggacggtgccccggtgcccgccctgcgacagcatgcccagaagcagcagaaggagaagacccgctggctcaatacgcccaacacctacctgcgggtcaatgtggccgatgaggtccagaggagcatgggcagcccccgacccaagaccacgtggatgaaggctgacgaggtggagaaatccagcagtggcatgccgattcgcatcgaaaacccaaaccaatttgtgcctctctatactgacccccaggaagtactggagatgaggaacaagattcgagaacaaaaccgacaagatgtgaagtcagcggggcctcagtcccagctcctggcgagcgtcattgccgagaagagccgaagcccgtctacagagagccagctgatgtccaagggagacgaggataccaaagacgattcagaggagacggtgcccaaccccttcagccaactcactgaccaggagttggaggagtacaagaaagaggtggagaggaagaaactagaacttgatgagacaggacaggaacgagagccaggctctggtccggccgtgtgcgagttcttcagcgttgccctccacatctggagtaacatattggagagaaagaaactgccccagaagagcctggctcacctgcaaagtctgcacctgcttctccagtgcagagcccagcgaaggaggcagagacaaagagccctttagtctctccttccaagtctttagaggaaggtactaagaagacagaaacaagcaaagccgccaccacagagcccgaaacaacccagccggaaggggtggtggtcaacgggagggaggaggagcagacggcagaggaaatcctcagcaaaggcctgagccagatgaccaccagtgctgacacggatgttgatacctctaaggacaaaaccgagtcggtcaccagcggccccatgtccccagagggctcaccttccaagtctccctcaaagaagaaaaagaaattccgaaccccctccttcctgaaaaagagcaaaaagaaggagaaagtggagtcctgattcatgacacccttgggctccctcctgcctcctctctctcctcccctttcccttcttcccattttctgttccctggcaaggcacaggggcttaagggaggggataggaggtaggggaccntggggatttattcattcaattaaaacattgtttaccaggccaaa

SEQ ID NO: 13185 - DNA, 427 bp, Homo sapiens
tgagtttggtccgcttttcctttctgctcctcaggggagcattgcttccttctctcgcagtgaccatgacgaaattagcgcagtggctttggggactagcgatcctgggctccacctgggtggccctgaccacgggagccttgggcctggagctgcccttgtcctgccaggaagtcctgtggccactgcccgcctacttgctggtgtccgccggctgctatgccctgggcactgtgggctatcgtgtggccacttttcatgactgcgaggacgccgcacgcgagctgcagagccagatacaggaggcccgagccgacttagcccgcaggggcgtgcgcttctgacagcctaaccccattcctgtgcggacagcccttcctcccatttcccattaaagagccagtttattttctaaaaaaaaaaaaaa

SEQ ID NO: 13186 - DNA, 1034 bp, Homo sapiens
gaccgccagtcgcaggtgtgctgctgaggcgtgagaatggcgtcccgcggccggcgtccggagcatggcggacccccagagctgttttatgacgagacagaagcccggaaatacgttcgcaactcacggatgattgatatccagaccaggatggctgggcgagcattggagcttctttatctgccagagaataagccctgttacctgctggatattggctgtggcactgggctgagtggaagttatctgtcagatgaagggcactattgggtgggcctggatatcagccctgccatgctggatgaggctgtggaccgagagatagagggagacctgctgctggggggatatgggccaggggcatcccatttcaagccagggcacattttgatggtttgcatcagcattttctgctgtgcagtggctctgtaaatgctaacaagaagtctgaaaaccctgccaagcgcctgtactgcttttttgcttctcttttttctgttctcgtccggggatcccgagctgtcctgcagctgtaccctgagaactcagagcagttggagctgatcacaacccaggccacaaaggcaggcttctccggtggcatggtggtagactaccctaacagtgccaaagcaaagaaattctacctctgcttgttttctgggccttcgacctttataccagaggggctgagtgaaaatcaggatgaagttgaacccagggagtctgtgttcaccaatgagaggttcccattaaggatgtcgaggcggggaatggtgaggaagagtcgggcatgggtgctggagaagaaggagcggcacaggcgccagggcagggaagtcagacctgacacccagtacaccggccgcaagcgcaagccccgcttctaagtcaccacgcggttctggaaaggcacttgcctctgcacttttctatattgttcagctgacaaagtagtattttagaaaagttctaaagttataaaaatgttttctgcagtaaaaaaaaagttctctggaaaaaaaaaaaaaaaa

SEQ ID NO: 13187 - DNA, 3789 bp, Homo sapiens
agcagcaggtaggtgccatcagggacaagaacagcacctcccagggtgggagaccccaggcctttctggcagcaggtctggatggaaagtggacaggaggctcacccgtctgcatcccctgctcctgcccctgctcggctacaaaaaccaaagggacagcagctgaccacaccccggtagccactcctgcataaagctctcccctcctgtgaccagctgaggacctcaggctgcagcggagccatgcccagatacacggtgcacgtacgtggggaatggctggcagtgccctgccaggacgcgcagctcactgtgggctggctgggccgggaggccgtgaggcgctatatcaagaataagcccgacaatggtggcttcacctccgtggatgacgcgcacttccttgtgcgccggtgcaagggcctgggcctgctggacaacgaggaccggctcgaggtggccctagagaacaacgagttcgtggaagtggttatagagggtgatgccatgtctcctgacttcattccatctcaaccagaaggagtttatctatacagcaagtaccgggagcctgaaaagtacatcgagttagatggagaccgtctgaccacggaggatctggtcaacttgggaaagggacgctacaaaataaagctcaccccaacagctgagaagagggtgcagaaatccagggaggtcatagatagcatcataaaagagaaaacagttgtttacggtattactacaggttttgggaaatttgccagaactgtaattcctatcaataagctacaggagcttcaggtcaacttagtacgctcacattcttcaggtgttgggaaaccactaagtcctgagaggtgtcggatgctcttggctttaaggatcaatgtcttagccaaaggatacagtggcatttccctggagaccctcaaacaagtcatagaaatgtttaatgcctcctgcctgccctatgtcccagagaaaggaaccgttggtgccagtggagaccttgccccactctctcatcttgctcttgggctagttggagaagggaagatgtggtctccgaagagtggctgggctgatgctaaatacgtgctagaagcccatggattgaaaccagttattttaaaaccaaaagagggcctggcactcatcaatgggacgcagatgatcacatccctgggctgtgaagctgtagagcgagccagtgctattgcacggcaggctgacattgtggcagccctgacccttgaggtgctgaagggcaccaccaaagcctttgacactgacattcatgctcttcgacctcaccgtgggcaaattgaagttgcttttcggtttcggtcactcttggactcagatcaccacccatcagaaatagcagagagtcacaggttctgtgatcgcgtccaggatgcatacaccttgcgctgctgtccacaggtccatggtgtggtgaatgatacaatagcatttgtgaagaacatcattaccacagaactgaacagcgcaacagataatcctatggtctttgccaataggggagagacagtttctggaggaaacttccatggtgaatacccagccaaagccctagactacttggccattggcatccatgaacttgctgcaatcagtgagagaagaatcgagcggctctgcaatccctccctcagtgagctgcctgccttcctggtggctgaaggtggtctgaactctgggttcatgatagctcactgcacggcagcagcccttgtttctgagaacaaggctctgtgccatccctcgtctgttgactccctctccaccagcgcagccacggaggaccacgtctccatgggaggatgggcagcaaggaaagccctcagggtcatcgagcatgtggagcaagtgctggccatcgagctccttgcagcctgccagggcatagagtttctacgtcccctgaaaacaaccactccgctggagaaggtctatgacctggtgcgctctgttgtaaggccctggataaaagatcgcttcatggccccggacatcgaggcagcccacaggctgctcctggagcagaaggtttgggaagtagctgctccatacattgaaaaatacagaatggagcatattccagaatcaagacctctttctccaacagccttttcactgcaatttctgcacaagaaatccaccaaaatcccggagtctgaggacctttaatgggctttgtcatgaagtagcagatgagagggcagtcagtttagcacaaagcaatactaggctgaaggagagacctgagaactttcctaggtagatcaatccattgtatcattcagttcttctaaagcctacgttggttaggctgatggcagtattatagttgctaaattcagcactgtgttcctgttgtcggtggttcaagacccaccaggtattttcagattataaaacttttctttctttcttaacagtttcaacaggccactcactcttaagggtgagaagaataaccacaattgtatgtgcctgttttttactcttagcattagatgaattcaaatttggaaacagattgatagcaattttttctaaaaacattagacttttgttaacctttttttttttttttaaatttgcttcaacaagctctccaccagttgactttctttggctaattttactttgcatgatatgccttaatatgccttcataaataaccattttaagtcataatttgtccttaagctgcttttttcttctattaattggatcatagtaaagagtagtcaatagggtcttcagctattaattgtagaggtgattaaaaccaacaaggagtttcatgtgcaaaggagataaggaatgaatataaagattgctatttgggtggctcttattaaactgtgtattttgtacttatcactacacgtatcccccaaatgcttacatgggagtttgaggttagtattttcacttccttggtgttagtactctattcacattcttattgtaaccttcctcatttcacagataaggaatctttggggattaaccaacctcctttctgtaatggtaatcattaaaataagtcctattgataaaggtcagatggagccctagagtgtattactgcatctatttttttccccgagaagataaaggaccttcagggatggcttaagtgtatctgtccagatgaaggatgggtcacatgacctcttggcttcccaagtctaagctctgtgactttgcaccagtgtgtgcatatatgtgcaaggcccttcaagtggtctgaaaccgtggctctaaaaaccacagctggtggagaggaggacagacacacttgccaccttgcctacctaattgccatctaaaatgggccgaacagtggatttcacaatagagttttcaccctttagatttacaacctgtcaggtggaaactgaagtgaaaactgctgcccacagcaattcagggagcaaaaaatgtgctgaggagactgtttacctaaaggttgttcttggtgctattctttgtcaaaatgtgaacacacacaaatgaggtttgtgcattgtcatccgtgggctgccattgagccagtaacccccagtggtctcatggtgctcttcgctccagtttggggaatgctggattctttcagcccctgcagccctccaggtcaaaatgacactttgtcactgagttttctacacagctctattagtaactgacagcacacgccttcaagggaacttcaagggaaacatggaataaactaagtctcaattgcaa

SEQ ID NO: 13188 - DNA, 1381 bp, Homo sapiens
gccctttccatgtctatccccagcctgggatgcagcgattccgaactgaggcggcaatgcggctcctcagaggtcccagtcacctctgcggggcatgccagaaaccactcagccagataaacagtgtggacaggtggcagcggcggcggcagcccagcccccagcctcccacggacctgagcggtcccagtctccagctgcctctgactgctcatcctcatcctcctcggccagcctgccttcctccggcaggagcagcctgggcagtcaccagctcccgcgggggtacatctccattccggtgatacacgagcagaacgttacccggccagcagcccagccctccttccaccaagcccagaagacgcacaccgtggtcgacaggcctcagcagcccatgacccatcgagaaactgcacctgtttcccagcctgaaaacaaaccagaaagtaagccaggcccagttggaccagaactccctcctggacacatcccaattcaagtgatccgcaaagaggtggattctaaacctgtttcccagaagcccccacctccctctgagaaggtagaggtgaaagttccccctgctccagttccttgtcctcctcccagccctggcccttctgctgtcccctcttcccccaagagtgtggctacagaagagagggcagcccccagcactgcccctgcagaagctacacctccaaaaccaggagaagccgaggctcccccaaaacatccaggagtgctgaaagtggaagccatcctggagaaggtgcaggggctggagcaggctgtagacaactttgaaggcaagaagactgacaaaaagtacctgatgatcgaagagtatttgaccaaagagctgctgggccctggattcagtgggaccccgagggacgagccgatgtgcgtcaggccaggagagacggtgtcaggaaggttcagaccatcttggaaaaacttgaacagaaagccattgatgtcccaggtcaagtccaggtctatgaactccagcccagcaaccttgaagcagatcagccactgcaggcaatcatggagatgggtgccgtggcagcagacaagggcaagaaaaatgctggaaatgcagaagatccccacacagaaacccagcagccagaagccacagcagcagcgacttcaaaccccagcagcatgacagacacccctggtaacccagcagcaccgtagcctctgccctgtaaaaatcagactcggaaccgatgtgtgctttagggaattttaagttgcatgcatttcagagactttaagtcagttggtttttattagctgcttggtatgcagtaacttgggtggaggcaaaacactaataaaagggctaaaaaggaaaaaaaaaaaa

SEQ ID NO: 13189 - DNA, 1285 bp, Homo sapiens
tttttttcttactgtttgagatgtttatttctagtttttagtgttaaaccccagctccatatttattccttaagtgtttcccctcaccctgggaagaagcttgttgtcgtttttgattgtcctctgccagcagatctgcacgagatgtgtttcttcagtctttcccacttgtgagacaaatctccattaaagtctcaacaaatgcaactgtcccttgtagagtaagcaagcctaagagtgctgcttctctgccctggccctggctggtcagagtactaggagttcttggatttccgctctttttctgccctggaggccatgaggctgaagaagagcccaggagccagagttcgaagataaacagccaaggaaggcagtaagtcagccaggatcacatctttcttcttcttccccacagcagcaagaacatcctgggccacctccacagggcttcggccctgggctgtggtggtgtccataactccatacctagatccatccgcggtgatggcatttacagagaggttggtgtggatgtagccggggctgatgacggtcacctcaatttcatactgttccatctcggcacgcagacagtcaaagaaagcctgggttgcgtgcttggaggctggcatatgcctgatcgaaaaggaatgctcatcttgccctggatgctgctgatggcgacaatgtggccttgcctcctcttgatcatggagggcaggagtgctttcgttagagcaactgggccaaagtagtttgtctccatgaccctcttgtccacatccactgtggtgtccatgatggtaccacggtagctgatcccagcattgttgacaagtatgtcgacatagccaaagcactgcaggatctcagctgctgctgcaactatggccccagagtctgtgaggtcgaaggtcaccaagtaaggcttgtgtgtctgcaccttggtggcatgagaagcggtgagttctctgatgagctcttctagggccccaccattccggccacagagcaccagtttagcacccgcagcatagaagacttttgcacattctttgcccagccctgaggtggcgcctgtgatcaccaccacagcattccgcaggtaggccttcccgcgcacccactgcagcagccggaagaggccgaagacgcccaggcagccgaacagcaggggcaggatggctgtggcaggtgatgaagtccatggccttcaccttcggcagactcttcctggtagccggagagacagtagtcaatcaacttcatcctcccgctctgg

SEQ ID NO: 13190 - DNA, 238 bp, Homo sapiens
taggactatcctgatttagatgggcactcaagtacaagaatcaaaataccactattattcttggatgactacctaatacaatttgttattttttccccgttttcctttttgcaagtaataagggctcattaaagacaatatagataataaatgtagaaaaataaaaaattaaaatcggctggatactgtggttcaagcctgtaatcccacaatgttaggaggctaaagtttagaatgt

SEQ ID NO: 13191 - DNA, 1785 bp, Homo sapiens
gcggctcagccctcggcccgcaggatggatggcgggtcagggggcctggggtctggggacaacgccccgaccactgaggctcttttcgtggcactgggcgcgggcgtgacggcgctcagccatcccctgctctacgtgaagctgctcatccaggtgggtcatgagccgatgccccccacccttgggaccaatgtgctggggaggaaggtcctctatctgccgagcttcttcacctacgccaagtacatcgtgcaagtggatggtaagatagggctgttccgaggcctgagtccccggctgatgtccaacgccctctctactgtgactcggggtagcatgaagaaggttttccctccagatgagattgagcaggtttccaacaaggatgatatgaagacttccctgaagaaagttgtgaaggagacctcctacgagatgatgatgcagtgtgtgtcccgcatgttggcccaccccctgcatgtcatctcaatgcgctgcatggtccagtttgtgggacgggaggccaagtacagtggtgtgctgagctccattgggaagattttcaaagaggaagggctgctgggattcttcgttggattaatccctcacctcctgggcgatgtggttttcttgtggggctgtaacctgctggcccacttcatcaatgcctacctggtggatgacagcgtgagtgacaccccaggggggctgggaaacgaccagaatccaggttcccagttcagccaggccctggccatccggagctataccaagttcgtgatggggattgcagtgagcatgctgacctaccccttcctgctagttggcgacctcatggctgtgaacaactgcgggctgcaagctgggctccccccttactccccagtgttcaaatcctggattcactgctggaagtacctgagtgtgcagggccagctcttccgaggctccagcctgcttttccgccgggtgtcatcaggatcatgctttgccctgggagtaacctgaatcatctaaaaaacacggtcttcaacctggccaccgtgggtgaggcctgaccaccttgggacacctgcaagacgactccaacccaacaacaaccagatgtgctccagcccagccgggctttcagttccatatttgccatgtgtctgtccagatgtggggttgagcgggggtggggctgcacccagtggattgggtcacccggcagacctagggaaggtgaggcgaggtggggagttggcagaatccccatacctcgcagatttgctgagtctgtcttgtgcagagggccagagaatggcttatgggggcccaggttggatggggaaaggctaatggggtcagaccccaccccgtctacccctccagtcagcccagcgcccatcctgcagctcagctgggagcatcattctcctgctttgtacatagggtgtggtcccctggcacgtggccaccatcatgtctaggcctatgctaggaggcaaatggccaggctctgcctgtgtttttctcaacactacttttctgatatgagggcagcacctgcctctgaatgggaaatcatgcaactactcagaatgtgtcctcctcatctaatgctcatctgtttaatggtgatgcctcgcgtacaggatctggttacctgtgcagttgtgaatacccagaggttgggcagatcagtgtctctagtcctacccagttttaaagttcatggtaagatttgacctcatctcccgcaaataaatgtattggtgatttggaaaaaaaaaaaaaaaaaaa

SEQ ID NO: 13192 - DNA, 969 bp, Homo sapiens
gggatctacagcagccaaagcttagtccctgactttatatgggctgctcctggcgagcgactgagtcgtccgtgaggaaaaagaggcgaggcttttccgagatcgtctcagcgatggcgcttcggtcgcagttttgggggttctcggtttgcaggaaccctgggtgcaggttcgcagccctgtcaaccagctccgagccggcagcgaaacctgaagtggaccctgtggaaaatgaagctgtcgccccagaattcaccaaccggaacccccggaacctggagcttttatctgtagccaggaaagagcggggctggcggacggtgtttccctcccgtgagttctggcacaggttgcgagttataaggactcagcatcatgtagaagcacttgtggagcatcagaatggcaaggttgtggtttcggcctccactcgtgagtgggctattaaaaagcacctttatagtaccagaaatgtggtggcttgtgagagtataggacgagtgctggcacagagatgcttagaggcgggaatcaacttcatggtctaccaaccaaccccgtgggaggcagcctcagactcgatgaaacgactacaaagtgccatgacagaaggtggtgtggttctacgggaacctcagagaatctatgaataaatggaagcattaattgttttgaacatgtaaatataaatctgtcagccactacagccatcaaaagagagcatctggaagaacagccagcttggaagttttacagcaataatgttgcagtggaatattatttgtagttaaggtcatcctcctcccctttctgtttttttaaatcaagaactacgttctgcccctctcttgggcttcagaagcatctaagaaaagcagtcatcaattataattaactttcaaagggcaagtcagaagttgtttataaattacaaaataaaggcatattatgaactcttaaaaaaaaaaa

SEQ ID NO: 13193 - DNA, 1521 bp, Homo sapiens
  misc_feature (1)...(1521): n = a,t,c or g
ttttttttttttttttacaaaagaaaacacaaaaccagaatttattgaaagtaggtaccagctctgattagaacaatcagctcaaagataccattactcagaacaatatatacaaaaatctcagggaaaggagaataaaagaacttaaaagaatacaacttgaacaggactgttttactaaaatggtcttgttgcaaaataataacaaataccacagagagccctacatgagaaagccatgtgccttcaagcctggggatgaggactctagttctcaaattcttagaacatagcacatgattctccagggcagagaggctggctggagaatgaggacctcactgctgactctgcttaacaaagtccatgccccaggcacaggcacacatggaatgaggccaccaagcaagtcacacccacccctgttcccatgaaccccataagagagaagtgctctctgaagtctacagacttggcagggaccactggaccatggatagcttagagacagttattctgtggccaatgacataaaacctccagaatctgggccctacagttcccttatccaaatttccactaactagggaggtagaagagcaagacatggaagttgtctccaaaccagtatttggtcttcagtaaacagggataaacataaaacactgctccacaagcagacttcagaactactgggcacagcaggtgaaagatccctaagtcccactgaccaccttcccacaggaggaggaggaggaggaagaggagggcttggtagggggaggtgtcatgagtgcgagagggtagacggacatgttccctactgaggtcactgctgccaactgtcctgtctgctgatctgtacagttccccccaccttctggacctaccctctcatggcccagagctcacttatctgagcctaaactcccggtctcaagcatagagagcagaaatgccagatgcagaggttctctgggtagcggtggtggaggcagtcttcctgagaacacagggttcttcttcgccccctcaactgaaggcagggcagggtgaagaggatgttgagttgcaggaggcaaaaggcagcagctcagagagcagggaggattcagctgggagactgatgggaagcttccatggcatggccccagcaagcagtgactgggatcagctgggatgggagggtgaacagacagctctacctaactggtgtgggaatagcacgtctgaattcctgaattcccttagaggaacatggctccttgctctggaacttcacactcaaacaataagcctgaagggaagaagtctcttcagggtcccagaagtgccccattaaaagtccatcctgtcaactttggtgtctcatttgtgggtccgtatgctgctgcagatttgggcgagacggttggagagcttcttaatgtttcccaaggcctctggatccagctgggcaatactgtgcctctgcaagtcactggcctaataactgcaggctctctccgccgccccanctga

SEQ ID NO: 13194 - DNA, 1897 bp, Homo sapiens
attcggcacggggggagcgaggagcgcgcggagcggccatggcaaggtcagcttccaaacagtttcataatgaggtcctgaaggcccacaatgagtaccggcagaagcacggcgtccccccactgaagctctgcaagaacctcaaccgggaggctcaacagtattctgaggccctggccagcacgaggatcctcaagcacagcccggagtccagccgtggccagtgtggggagaaccttgcatgggcatcctatgatcagacaggaaaggaggtggctgatagatggtacagtgaaatcaagaactataacttccagcagcctggcttcacctcggggactggacacttcacggccatggtatggaagaacaccaagaagatgggcgtggggaaggcgtccgcaagtgacgggtcctcctttgtggtggccagatacttcccagcggggaatgttgtcaatgagggcttcttcgaagaaaacgtcctgccgccgaagaagtaacttgttaaatgtaatgggaaggtggcagacttaagaacgtggatatgaagtgcctagaaccaccacaacctggctgtgcgtctgtccctgtgggtgtatgtgcttgtgtgtgtgatgcatgtgagcgtctctggcacacacacttggacatacagttctgtgtgcgctcattcttattacaggagtgagcaaaggaagcatttaccccgatggttacctagaccacgattatttggattggggggaggggggatccgttttttttttttaattttttgttatttctaagcaaacctcttttgtacttttcttacttctaatatccatccctggactttttgtattccaaatgtttgtgatgctgagaagtgaagttgattttatgtgatcttcatgcgtcgtaatctacttttggtagataattaagattattaaaccctcatttaaatgtgacataaaatacagctttaagcacataaatacaaagcagcttccatcaggaacatggagcaggcagggactccattttacagaattactgagatttctcagttgtaaaacatgatgtcatcctgcatgcctcctggaattctccaatggggtcgccaaacaacaaatggagaaaaaaagttttacttccttgcattcttctacctttaaatagcaaagtaccactaccaccaccacctcttgcccccttccctcttttcttaaacttctggcatttcagagctcagcagggctacccctgggtttctggagagttggggctaggcctgaagctccccctcccccacctctgctaggcagcccaggcctgggtctgggagacagccccttcaccctgcctgggctcttgggccaaggcggccttggatggatgaagtcagagaggtggggtgagggtgagcttactcagggcccccagaggaagccctcagcctctgccctccccccacacagggcgggagcccaggcctgttcctggcagctgtggctgcagctgtgctcctgctccctcctggaatgtgcgacaagcccaaatgttccggggaggcggccggggcagggggcttagaagtgctaatatggttctgtgttttgcctgaaacgataccaggttcccctgaatagcaactttacaaggtccatgtgggagggaccaacccagatgccctgctgagtgtccctgaaaccatggcagctccatctgtcaagatggcaggggccggagtgagggggctgctggcttaacagcaggcatctgggcaggccagtcctcaaagcagctcctgaaggtctgtgttgcactgtcaccagtctcaagctatgcctctaatttcaccagggatattgactaagaagacaataaaatctttttctttgtgtaaaaa

SEQ ID NO: 13195 - DNA, 2521 bp, Homo sapiens
  misc_feature (1)...(2521): n = a,t,c or g
catttataattgaaaatataatttgcataacaacagtaaattctacacatgaaggcaaacgtccgtggttgacagaaattacactggccagaatccccagtccccatgaggcttgtccagacgcagtgaaccagtcgcagctgataacacacagaccattcccgatcccagaggtgcatttcaggattcattctatttcatcaggtgacgttttaacagaaacaaaaccgcaggcagcgggtggggggagctggaggttggaatcacaccaacattatagcattattactctaaaaaaaattacttttttggctgggtgctgtggctcacacctataattgggnnnnnnnnnnnnnnnnnnnnnnnnnnnnnnnnnnnnnnnnnnnnagggttggaattgcagatgtgaggtaatgtccagttccttgccttatttataaaatgtaatttattttttgaactttttcctcttcagagccttccattcgccttcctgtgtagccaggctgttaaaaagctgctttactttccgctttctttccgcatcccgttccatgatttctgagagttgcatcctcgccaggaactgattgtccttgcggatttctcgaacggcccctttaaattcacgcttgtgtttgtggatcagcctcttcctttcctgttcctccttactactgccttgttttcttccaaactcgaggactttgaccagccggggtgtgaaaagcttcagtgggacaggcttgctcttctcacaggtcagcggccggcagagctgcttctggctttccatttcggtcagtgtgctctgacacagctcctggagctcctgcgggtggctgcagtccgccaggtgatccgtgaggagggcttggagaggccccatgatggcgtggaaggatggcagggacccgtacatgagcacgcagcgcttcagcagggccaggcccacagccaggcaggacagtcggatgtgattggcctctgtcgaagttggggccctcagtctactcgcccagcggagggagaggctgctctgctgccacgtggccacatcctctctagcagacaccacgagcagttccgagttcttcccaagcgctctgaaagggtgcaccagagtggaaccttggcttgctttgtttggagttgctatgtaaagaatcccaagaagaaaattaataagctcaggtataaacctctgggacaaagccacatactcccaggaacaggcagcacacgaacaggcccttcaccacgtcctggagggacaggatggggcacttggtgagcagctgactgaggcacacgagggcaggggtcaccactgggtgccagaagtcggaagttggaaatagcagcccagtgattttcaaataaatgagcacatccaaccctggcaatgccgcccggcctttggtctcaatcatttcttccatctcatgcatcgcatctcggagaaacaaatttgatagcgtcacttgcagattcaggaaacatctggcaaagatgatataagtgcacaaccaacttatcaatgactgtgaggtctggtgggtcatctgtagccaaatcgccaacgtattccaaaagaaagccaaacagtttttctaattttgctttgtttccttctgcgagactcgggtggttgcacttctgaattctctccaccaccaaaagctgctcttccatcgatcttcctaacaacagagatctcagttcctcataggattcaggggctgcgaacgtgtagggcagctcgtctctggtagcttttccagctctttccttgccgcttatcaaccctttcccaggagtctgcctctgctcttttgctggcttctcgttttcttcctcactctccacgttggattccaggtccaagtggctatctgggctgtcgctctcctctgtgtcctccccgcctgaactgtcaccttcttcctcgttgctctcagggtcactggcttccttgctttgctcttcctggacatcttcctcgacattcatctttccatctttgtaggaaagcaaacgcctgtcatctttatctagcacgaagccatcattcagatcatctgctgacatatgttttggtttcttaacattttcatcctcatcctttccaagcattcttcgaagtctctcagcctccagcttcctgaggtgctcctgctcttcctttgccaattctgcctccgtcttcatcctgttagagggctgcgccttcatttcaaagccaagctcgcgaaccatcatgtcatatgcatcgggcttgggtttttcctttttgtctctgttctctgacttgggagttttgtgggacaggagagtctgaatttctttccagtcttggtctagcttctccgtgagctcgagggcatcttctcgttgagcttgtctctccctcttctcttgttttgacttggcaatgagctcttcaatcagctctttccgggacttcggtttctcccgctcctcgccttcctgttgagtcttcttgtgaaggagcccaccg

SEQ ID NO: 13196 - DNA, 671 bp, Homo sapiens
gggcatttccaaaaggtgacgagttttttaaataaaaattttgtgaaaaataaaatccaaaatcggcaaagcacaaaacagcaaaagaacatgaaatgctgctccaagcaggaccctggatagggaccttcattgctgatgggatgacacaaattaactgtacgagaagtctgggagacgctggaaccgatggtggcttcgcatgttcctgtcaacccactgagtcagactgtatctttgcagatgtttctgtcggcgggcgtagtttcgcgtggtgaggtccgaaggatgctgccattttgagtgctgcatatgatgaacttgatccatcaaggcacaaagctcccccgagatacctgtgatacagagggatcagtggttaggaacagctgagtgaactatgtcagccaacgtcaaagtatgtgttttcagggaaagagaaaacaggcactgttctcaacaatatatacttacgattatcacaagcagtgagcacagaaactataaaccagaatggggagattactcttggagggtgaaggtgaagcaataatagcagccaccattcattcattcaacacttagctcctacaatatacagggaactttacttgtccctaggaatatggcagtgaacaagacactacctcaatgaagtttatacaggagac

SEQ ID NO: 13197 - DNA, 3081 bp, Homo sapiens
agagatttgtcctggtacttcagaaagaattttcatgagtgttcttaattggctggaaaagcaccagctgacgttttggaagaatctatccatgtgtctgcctccatatgcatctgggcatttcatcttcagtcccctcattagactgtagcattaggatgtgtggagagaggagaaatgatttagcacccagattcacactcctatgcctggaagggggacatctttgaagaagaggaattagggctgtggacactgtcttgaggatgtggacttccttagtgagctccacattacttgatggtaaccacttcaaaaggatcagaatccacgtaatgaaaaaggtccctctagaggatggagctgatgtgaagctgccaatggatgaaaagcctcagaaagcaactcaaaggactcaaagcaacggacaacacaagagttgtcttcagcccagttgacacctctgatgtcccctgggaagctttgtgctaacctgggactgcctgacttccttttagcctgggtcccttgctactaccttgaactgttttatctaacctctctttttctgtttaattctttgctactgccattgaccctgctgcaggatttgtgtcattttcctgcctggttgctgagactccattttgctgccacacacagagatgtaagaggcaggctttaattgccaaagcacagtttgagcagtagaaaacaacatggtgtatatctcaaattgcctgacatgaagaggagtctaacggtgaagtttcacttttcatcagcatcatctttcacatgttcattatcatccgctcttattcttgcatgtttaaacacttaaaatttttagtataatttttagtgtgttttgaagtggtgactaggctttcaaaaacttccattgaattacaaagcactatccagttcttattgttaaactaagtaaaaatgataagtaacatagtgtaaaatattcctttactgtgaacttcttacaatgctgtgaatgagaggctcctcagaactggagcatttgtataataattcatcctgttcatcttcaattttaacatcatatataatttcaattctatcaattgggcctttaaaaatcatataaaaggatataaaatttgaaaagagaaacctaattggctatttaatccaaaacaactttttttttccttcaatggaatcagaaagcttgtcaatcactcatgtgttttagagtaattacttttaaaatggtgcatttgtgcttctgaactattttgaagagtcacttctgtttacctcaagtatcaattcatcctccatacatttgaattcaagttgttttttgtcaaatttacagttgtcaattgatcttcaagctgcagggtgcctagaaatgggccgttgtctgtagccctggcatgtgcacacggacatttgccaccactgcaagcaaaagtctggagaagttcaccaacgacaagaacgattagggaaaatatgctgctgtgggttaacaactcagaaagtccctgatccacatttggctgtttactaaagcttgtgattaactttttggcagtgtgtactatgctctattgctatatatgctatctataaatgtagatgttaaggataagtaattctaaatttattattctatagttttgaagtttggttaagtttcctttcactcaattgatttattttgttgttaatcaaatttatgttaattggatcctttaaattttttttggcattttccaacaaaaatggctttattcataagaaaggaaaaaaatcaatggaatttgatatctaaagaagttagaaagggagcaaaataaaaaacataaaggagatagatgaattagtaagcaaatcagtagtcgagtttttcaaactggcaaaattaattaattgacttttagcccaaatttacattgttaattaaatcaagaagggaaggaagatctaaggagctccccttggatagggcaagcctaggaggaggactaggcttaaatttatccatgctagggtatttgaaacacagaaagtttacatacatttatgaagggtcaatttagtttggacagtgaggtatttgtcttagtggaaaaaaggagaattagtctgatcaaatcgtgaagtaatacagtgaacttggcaggtgcacaaaataagagggccacatctatatggtggcagtctggaattctgtttaagtttgtaggtacctcttggacttctgaattgatccagttgtcatccaccacagacatctcacatcagatacagacagttccaagattgacaacagagaacaacctgctggaaagacctgggcagaaatggagagccctgcggaaccatgctacattttcatctaaagagagaatgcacatctgatgagactgaaagttctttgttgttttagattgtaggaatggtattgaattggtctgtggaaaattggcattgcttttatttctttgtgtaatcaagtttaagtaataggggatatataatcataagcattttagggtgggagggactattaagtaattttaagtgggtggggttatttagaatgttagaataatattatgtattagatatcgctataagtggacatgcgtacttacttggtaaccctttaccctataattgctatccttaaagatttcaaataaactcggagggaacctgcagggagacccaacttatttagagcgaattggacatgggataaaaaccccagtgggagaaagttcaaaggtgattagattaaataatttaaatagaggatgagtgacctctgataaattactgctagaatgaacttgtcaatgatggatggtaaattttcatggaagttataaaagtgataaataaaaacccttgcttttacccctgtcagtagccctcctcctaccactgaaccccattgcccctacccctccttctaactttattgctgtattctcttcactctatatttctctctatttgctaatattgcattgctgttacaataaaaattcaataaagatttagtggttaagtgcaaaaaaaaaaaaa

SEQ ID NO: 13198 - DNA, 639 bp, Homo sapiens
  misc_feature (1)...(639): n = a,t,c or g
ttacatttgcagaaggaaattcaccaggagaatcaattaccaccaaagtggaaacaaatcagaccaggggttctttgtctcctgagccaacccacttgctctcctcactctcctcatttcagcccaaaatatttacacaactacagggtttgcagttacaaccaaggtacacctctcctgatgaatcaccagctgtggtatcagtaaataaccagccgtcctctagtccttcaggacttctggatacaataggaagtgctgtaatgaataataattctctactgcttggtcaaagtcatagccttcaaagagatacatgcttaacccaaaacaatagtactgcctccaccatgggtaaccttccagaaccagatcaaaatctagttgcaatggacgagctggtagaagttggagatgttgaggatacagggaatctgggaagggaactgttcatcgggttctgttggggagatgtggcagactatttccaatacaggtttttaggacaaccactcaggntcttatttgaaggaaattccaggaaagttaccntttttgtggngccagtttaaacaggaaccccaaggaaccagcttgtccatgggaggcaaaaaaaccgtngggttttagggatttttc

SEQ ID NO: 13199 - DNA, 666 bp, Homo sapiens
tagtttgagtcatttccacatcttgcgagtccttccgaacgagtctcctttccttggggctcgcaaccacccaatgatcgattcaggagaaaagaagcctgggcggagagcagagcccgacctttctaaaagagctgcaggaagggacttcttggctactgatggcaaagctctacgaggcagtgaccttcaaggatgtggctgtggtcttcactgaggaggagctggggctgctggaccctgcccagaggaagctgtaccgagatgtgatgctggagaacttcaggaacctgctgtcagtggggcatccacccttcaaacaagatgtatcacctatagaaagaaatgagcagctttggataatgacgacagcaacccgaagacagggaaatttagataccttacttgtaaaagctcgttttgctctatgacctggctcaaacttaaacttggatttgaagttagaagaaatgttggaagtcatttatatatgaagaaatgttggaaggactcatatatgcatacattccttgagtgactatgaatgactgccgggcagtaacttctgggctgtggttgtaaactgtgagcactacaaaatgtttttccttattgataccatattatggtaggaaagacatggaataaaaaatttagatagtaaaa

SEQ ID NO: 13200 - DNA, 1342 bp, Homo sapiens
aaaatgttgaaccaattgtgaattacttatgtattattcatttctcatggggagagtaatgctgttgaagaacattacattgtaaactgccttcatttttggctctttgtttatgttcaggtttagtttacaaacccatttaagtatggaatgatttatatggggtcaggtgctccacaaaatagacctatgagaccaaaaatgacctaggctatttagacgacagcatgaaacttccacgttagttctcagtctataaaggcacttaccggtctctggtgtgggtatgaccaatagaaacaccttatagtttgctttggacctcattttggaaaaataatctgcctttctaattgttctgcataggttaaaatgataaatttacattctttgaacctataccagattgtggtgtccgagtgaccggcacactgtctgacacacagtcagtgtgcacgtatttgtctgagtgaatgaggagacctgagaaaccggtgacgtgggcacagggaagccagctggcccagggattccgtacatgggccgcaagcagactaacgcgttgacgctaaatttaatgtattttacctcacactaaggtcatgcttgataaagacgttaaactcaacttgtaaaatgggtagcccagtgctatgcacaggagtggggtgctcattagtgttgaatgaacacatttgtaatactacatgtaattccatctgactgctttgttaaattttcagttaggaacgtaggatactgttaaagtccacacacacattaaatcttgttttcctgaaagtatggcatcaaaaatacttgtagaaaaaccttgtcacaactgatttgaatgttcctattttcttttcctttgactttgatattggcttgtaatgtctcttttcatcatatgtaatatcagtggaacaggcagcgctactcaagtcctaaggattcctcagtgatcagtgatccagggccgttcatgaaccactgggctggatttgactgttgagtgtggcagttaatgcccctcaagaaatcaaaggatgtcttataagtgtcttccaaaaaaaagcaaatgctgaaatcctattggcaaagtaaactgaaattggctgctatattttatataatcatttctgcaaatcccattttttgaatactaatatttgacatggttaattcttattaatttgttgggaattgtttattgttaataatgcaaatagataatttttaattatccacaagtaacatttcactgttaatggtttgaaataggtgataagcaaaccaatttgaaataaaatataaacatgtgccattgttaaaaaaaaaa

SEQ ID NO: 13201 - DNA, 483 bp, Homo sapiens
  misc_feature (1)...(483): n = a,t,c or g
ccatcccgcccagcattgcccagctcacgggcctcaaggagctgtggctctaccacacagcggccaagattgaagcgcccgcgctggccttcctgcgcgagaacctgcgggcgctgcacatcaagttcaccgacatcaaggagatcccgctgtggatctatagcctgaagacactggaggagctgcacctgacgggcaacctgagcgcggagaacaaccgctacatcgtcatcgacgggctgcgggagctcaaacgcctcaaggtgctgcggctcaagagcaacctaagcaagctgccacaggtggtcacagatgtgggcgtgcacctgcaagaagctgtccatcaacaatgagggcaccaagctcatcgtcctcaacagcctcaagaagatggcgaacctgactgagctggagctgatccgctgtgacctgtncgcatccccactccatcttcagccttcacaacctgaggagattgacctt

SEQ ID NO: 13202 - DNA, 1936 bp, Homo sapiens
aatcagctttgaacacgtctgcaagcccaaagttgagcatctgattggttatgaggtatttgagtgcacccacaatatggcttacatgttgaaaaagcttctcatcagttacatatccattatttgtgtttatggctttatctgcctctacactctcttctggttattcaggatacctttgaaggaatattctttcgaaaaagtcagagaagagagcagttttagtgacattccagatgtcaaaaacgattttgcgttccttcttcacatggtagaccagtatgaccagctatattccaagcgttttggtgtgttcttgtcagaagttagtgaaaataaacttagggaaattagtttgaaccatgagtggacatttgaaaaactcaggcagcacatttcacgcaacgcccaggacaagcaggagttgcatctgttcatgctgtcgggggtgcccgatgctgtctttgacctcacagacctggatgtgctaaagcttgaactaattccagaagctaaaattcctgctaagatttctcaaatgactaacctccaagagctccacctctgccactgccctgcaaaagttgaacagactgcttttagctttcttcgcgatcacttgagatgccttcacgtgaagttcactgatgtggctgaaattcctgcctgggtgtatttgctcaaaaaccttcgagagttgtacttaataggcaatttgaactctgaaaacaataagatgataggacttgaatctctccgagagttgcggcaccttaagattctccacgtgaagagcaatttgaccaaagttccctccaacattacagatgtggctccacatcttacaaagttagtcattcataatgacggcactaaactcttggtactgaacagccttaagaaaatgatgaatgtcgctgagctggaactccagaactgtgagctagagagaatcccacatgctattttcagcctctctaatttacaggaactggatttaaagtccaataacattcgcacaattgaggaaatcatcagtttccagcatttaaaacgactgacttgtttaaaattatggcataacaaaattgttactattcctccctctattacccatgtcaaaaacttggagtcactttatttctctaacaacaagctcgaatccttaccagtggcagtatttagtttacagaaactcagatgcttagatgtgagctacaacaacatttcaatgattccaatagaaataggattgcttcagaacctgcagcatttgcatatcactgggaacaaagtggacattctgccaaaacaattgtttaaatgcataaagttgaggactttgaatctgggacagaactgcatcacctcactcccagagaaagttggtcagctctcccagctcactcagctggagctgaaggggaactgcttggaccgcctgccagcccagctgggccagtgtcggatgctcaagaaaagcgggcttgttgtggaagatcacctttttgataccctgccactcgaagtcaaagaggcattgaatcaagacataaatattccctttgcaaatgggatttaaactaagataatatatgcacagtgatgtgcaggaacaacttcctagattgcaagtgctcacgtacaagttattacaagataatgcattttaggagtagatacatcttttaaaataaaacagagaggatgcatagaaggctgatagaagacataactgaatgttcaatgtttgtagggttttaagtcattcatttccaaatcattttttttttcttttggggaaagggaaggaaaaattataatcactaatcttggttctttttaaattgtttgtaacttggatgctgccgctactgaatgtttacaaattgcttgcctgctaaagtaaatgattaaattgacattttcttactat

SEQ ID NO: 13203 - DNA, 587 bp, Homo sapiens
gtaaatctaggcagtctacattcagaatggaggagtccagagtataagtcaaataacatttttccttattcaggttttctccctaaaaaacaaaaccatttttaattgcacttccattttgtaatggctcataggattgctgtaaggtctcaattactaggggcttccagggcatttctgagaaataaccctgggtccttgtctagacccttatgccagaccccactccaaagagcggtaagaattccttagtgtcatagcccagacctgctgagctgcgaggcttaagtgtccctgatcaccaaatgtcctgtgcttcagggtagcgaggctccctcccagaaggtagttatacatgagggaaggacgctttacaactgggtatctaaactgatgagaacacatgttaagcatcactttaggactgagcctaggtagagttttattgtctcatttctacttgtcaattctgggaaagtgcctactgataagggagactcttcgatagaatgatgaatagtaattgggggggtcagcctttaaaaaggtcaacagcaatttaagtacttagcaatttaagtacaagc

SEQ ID NO: 13204 - DNA, 1109 bp, Homo sapiens
ctggcggtcccgggtgctgctggttagtgtgctctgagggagggtccgagccagccgctgttttgccggaggagcccctcaggccgtagtaagcattaataatgtctttcatctttgagtggatctacaatggcttcagcagtgtgctccagttcctaggactgtacaagaaatctggaaaacttgtattcttaggtttggataatgcaggcaaaaccactcttcttcacatgctcaaagatgacagattgggccaacatgttccaacactacatccgacatcagaagagctaacaattgctggaatgacctttacaacttttgatcttggtgggcacgagcaagcacgtcgcgtttggaaaaattatctcccagcaattaatgggattgtctttctggtggactgtgcagatcattctcgcctcgtggaatccaaagttgagcttaatgctttaatgactgatgaaacaatatccaatgtgccaatccttatcttgggtaacaaaattgacagaacagatgcaatcagtgaagaaaaactccgtgagatatttgggctttatggacagaccacaggaaaggggaatgtgaccctgaaggagctgaatgctcgccccatggaagtgttcatgtgcagtgtgctcaagaggcaaggttacggcgagggtttccgctggctctcccagtatattgactgatgtttggacggtgaaaataaaagagttttacttctctggactgatcctattcacagcttcctcatgaacttttctaatagaacaaggaaagctctccaaccatgtctggcgttgagaagccaagagtctctgtcaactctctcattgcccagtggtgacatgtgctcttctccacactgttgggaggtaatgctgccccacgtgctggtgcaggtcagtatcctgggacttggaagctggcaggatttgccgggtaaagctgtatgccatcatggggcacctgaaaagaaaaacacgtctcaccactgtggttgattcaaaagaaagtgattctattttttaaagaaagcgttgttaatgtaattggtatccctcctaactttttgagttcacaatttacttggtccagag

SEQ ID NO: 13205 - DNA, 1488 bp, Homo sapiens
tttccttttcacctcctggagtcctggacttccccacatctcccctgcccctcccacgtttccatagtccaagggccagagtaaatgaaaatacagcagccgccccaagcaatgggggcccatgctggggcttcagtcatcagcatcttcactggagtctgagttagctggcatcataggatcatcaatgagtgagaagtccctttctgagctatcatagccctgagataagtcatcatcatcttcttcatcctcatcgtcatcctcctcaggttgcagtggtggcaaccgtaagggtagtacccagaggcggtagtcactggtgaagaggggtagccaggggctctcttgcctggatggtgatggtggtgatggtggggtggggtggtggtggtggtgatgaacgatgtgctgagtctacatgagggatgatggtgcacacccatcacaaatggcataaaaggcaaagatgcagaagtggcactgctgtgacccaaagatgacacagactgtaggccactactgctgtgttggaacgtgttatgcagagatagagacccagtgcttccaccctgcatgagggccatcatcttagaaaggtctggtcgcatcctacgggcccgcttcttgctgctctctggtgcaataggccctggcaaaacccggttgaacaccgtttcagtgtgatgaccctttttcccatttctagagttagctgtctgtactggttccattcccaaacagttcaattctgccttattattttttttacatctttgccacttctgttttctgcgatcctccatatacgctagaaatcggggatcaacagcaaactctggatgaccctgtaaccacatctccagttcagcccggcgaggggcatcctcacccaccagcaaagtaccatccaccttattgatgacagggatccgggtctccaggtccacatcaaggtgattaggctcttccatgcactccacctccagctctactagcttctttctgttccccttcttcttatgaaacagtggatgtccatctcccattactccattcgccatcaacttgtgcttctggaatgttaacttcaatccttcctcatctttgatttgaactgtaaactccttttcatccatgcctcggcgaagtttggtgaactgggctgccgctgtgctgactgcagatgcttcctcctctgccatggaagctgcactactacttcgtggtgtggggactggagagtcaccatattctccagttcagcccggcgaggggcatcctcacccaccagcaaagtaccatccaccttattgatgacagggatccgggtctccaggtccacatcaaggtgattaggctcttccatgcactccacctccagctctactagcttctttctgttccccttcttcttatgaaacagtggatgtccatctcgggacatagtgagggacaggagactctcttcatcatagagctttgagc

SEQ ID NO: 13206 - DNA, 670 bp, Homo sapiens
tggcggcgccctgtgtgtcctacggcggagcagtttcgtaccggcttcttctctggggtaggggtagcctcgcccggaagcaaggcctctggaaaaccgcggcccctgagttgcaaacaaatgtcagatcccagatattaaggctaagacatactgcatttgtaataccaaagaaaaacgttcctacctcaaaacgtgaaacttacacagaggattttattaaaaagcagattgaagagttcaacataggaaagagacatttagccaacatgatgggagaagatccagaaactttcactcaagaagatattgacagagctattgcttaccttttcccaagtggtttgtttgagaaacgagccagggccagtaatgaagcatcctgaacagatttttccaagacaaagagcaatccagtggggagaagatggccgtccatttcactatctcttctatactggcaaacagtcatactattcattaatgcatgatgtatatggaatgttactcaatttagaaaaacatcaaagtcacttgcaagccaaaagtctgctcccagaaaaaactgtaaccagagacgtgattggcagcagatggctgattaaggaggaactagaagaaatgttagtggaaaactgtcagatctagattatatgcagttcattcggtg

SEQ ID NO: 13207 - DNA, 1026 bp, Homo sapiens
cggcacgagcggcacgagctgagattgagccccggggtgtgctaaagaggcagtacaccagtttcttccggccaggcctgcccacagagaaggtggctgccatccaccgcctgggcattggcaccaccgacaagatcttactggaattcgaggagcccttctggggccctgagtgcaacagcctacagtttgtgtgggaggacgaagcggagagccacaccctcacctacccacctgagctctggtaccgcaagatctgcggctttgatgtcctctacccgcctgagcgctacggccatgtgctgagcggctggatctgcggggaggaggccctcgtcatggagaagtgtgatgacgaggcagtggccgagatctgcacggagatgctgcgtcagttcacagggaaccccaacattccaaaacctcggcgaatcttgcgctcggcctggggcagcaacccttacttccgcggctcctattcatacacgcaggtgggctccagcggggcggatgtggagaagctggccaagcccctgccgtacacggagagctcaaagacagcgcccatgcaggtgctgttttccggtgaggccacccaccgcaagtactattccaccacccacggtgctctgctgtccggccagcgtgaggctgcccgcctcattgagatgtaccgagacctcttccagcaggggacctgagggctgtcctcgctgctgagaagagccactaactcgtgacctccagcctgccccttgctgccgtgtgctcctgccttcctgatcctctgtagaaaggatttttatcttctgtagagctagccgccctgactgccttcagacctggccctgtagcttttctttttctccaggctgggccgtgagcaggtgggccgttgagttacctctgtgctggatcccgtgcccccacttgcctaccctctgtcctgccttgttattgtaagtgccttcaatactttgcattttgggataataaaaaaggctccctcccctgcccctcaaaaaa

SEQ ID NO: 13208 - DNA, 2011 bp, Homo sapiens
gtcttgaggactcaggtctcctaaggatgaaaaaatcccttgcgaatgtatgaggctctttgctgcagagaacagcggcctctttgcgagcatcagtctactcagataacttttctttctgaactttggactctttttgaccttgggtgttctgtgggtcatgcgggagcgagttttgtgaaagcggtatttttttctggaatgtgaaattggtttagaagccttcatatttgtaactctagcctttgcactttctaaaatggaaatagcgtgggttaagtctttccatctgtctctcacctgtggtagggcttttgcagggctggaggtagaaggcgcgcccttggagaagggtttcagcacagagactgctgccttatgctcttgggtgaacgaaggcttggtgtagacggcgtttcccgctaacttctcaggcccctgctgtgtgtggggctgttccacctcccttggggctggactcccgagccttttttcttcggcagcgttctccacagatgcctgggcaccctgttccctcctgatgctctgccttcctacctctttgaagtgccttttctggatgctccttgggcccatgaggactctattcactttttggctggttttggcctacagtttgaaatctttgccaggctgtttcctgtggttggcagtttaatgaacggtaacaatattgattctgcacctagatttctcagtgagagataaggcaagatgtaacttagtgcgctgctaacatcactctcgtcattggtgtctagctgctcactcccaaagcctgacaagttgatgccactgctgtctgagggcgcctccgactcaatagtcagctcagtgctcatgtgctgcttccgggcttgtaacatcttcatgaatgctccttctggattccctacagatgcttcttcagctgtcaaaaaagaagagactgctttgatcatgaaagatgatgggatgggatgcatcagtccatagctgtacaccccagtcacacagagtaggagtcagcaaacattcgagtgccattcagagaggagaaacacacacccaatcctaaacctatgaaatggcaacaacaaaaggagaaaatatatcttttgaaaacacggccacctacttggaacattccatagtgtgacatagagtaactctgtttaggattatttcgttgatccccagaggccaattgcccagtgctcagtcaaagcccaaggtggaagacaagtgcttccctgatgagctggcctctctgcagactgctccgtaccctgtgctgtcctgcctcagatgcagagagagcacaaggctcctgctctcctcgtcctcggtgcacctgtgttcgtgctaccatcacagctgaatgcaatgaaaggcggtcctctgagaggagcagggtggagatgctaaagtggaggccccgtcccattgctgatagatcctcatctggcatgcgctccacccacccaccccattctctgctcccacatatcgtagccccatcacagaagatgcgacatggaaaaaagcactgtgtccaccctagttcttaaatttgggcagggatttggggtgtatgttaagagatttttaatttgccagattgcatgcctatgttgttaaatatacaatgaatctatggtatgatagcagtttctggataaacattacttgaggtcctaaaatgcagaagggaaaaagcagcttttgtcagatgcttactttgctttcatttcatctctaatattttggatggggaaccatccaaagcttctggccgcatgaaggtcaagtgtgccagtgtgcagctgggtttcttttccagaattaaaagtattttgggtggtgctgagggtcagaggaagaagtaaaaattgtgagaaaggagaaacatgggcttggggagaacccagaattggggacagaagacctggcactaagctatagcacttagcacctctgatcttgtttttcctcgtccgtaaaaggagat

SEQ ID NO: 13209 - DNA, 823 bp, Homo sapiens
gtgtgaaaggtgctgatggccctcatctccagctaactgtggagaagcccctgggggctccctgattaatggaggcttagctttctggatggcatctagccagaggctggagacaggtgtgcccctggtggtcacaggctgtgccttggtttcctgagccacctttactctgctctatgccaggctgtgctagcaacacccaaaggtggcctgcggggagccatcacctaggactgactcggcagtgtgcagtggtgcatgcactgtctcagccaacccgctccactacccggcagtacactattcgcacccctacttcacagaggaagaaacctggaaccagagggggcgtgcctgccaagctcacacagcaggaactgagccagaaacgcagattgggctggctctgaagccaagcctcttcttacttcacccggctgggctcctcatttttacgggtaacagtgaggctgggaaggggaacacagaccaggaagctcggtgagtgatggcagaacgatgcctgcaggcatggaactttttccgttatcacccaggcctgattcactggcctggcggagatgcttctaaggcatggtcgggggagagggccaacaactgtccctccttgagcaccagccccacccaagcaagcagacatttatcttttgggtctgtcctctctgttgcctttttacagccaacttttctagacctgttttgcttttgtaacttgaagatatttattctgggttttgtagcatttttattaatatggtgactttttaaaataaaaacaaacaaacgttgtcctaaaaaaaaa

SEQ ID NO: 13210 - DNA, 2021 bp, Homo sapiens
atttaataagtgctgctggaaggggattttccaagcctggaagggtattcagcagctgtggtggggaaacatttctcctgaaagactgaacgtgtttcttcatgacagctgctcaaagcaggtttctgagatagctgaccgagctctggtaaatctctttgtcaaattacgaaaacttcagggtgaaatcctatgcttccatgtacattacatggcttaagattaaacaaaaacatttttcaagtctctaactagagtgaactctagagcacagtagttcagaaactatttagagcttccaggatatatttcacagcttcaggcatgtgatcagttagagccgatgaaacctatgcccgcctgtatatatattagcagcttagctagttcataacctgtatattctaaagactgctaaggttttgttttcattttaaatcctagctgattgttgtgggtcaatgaaatacccagtttctgggagggccagggtgggaaatgctttcactggaccaacacacaaatgatcatcctgagggatctgagcttccctagactccacacaataaccttgggggcaccccttttagagaagactgttgaaacccacagcactcgttggggtatgaggaaaccagggcttggcacaggaagttcccctttgtagctaaaagtccagaaagaaagggttcatctttttgacttccaactgatattgggaagtttggttgaggttcaagtgtgactccttccagagccacaggtaggggagtgtgaagttgagggggaggaaagctggaaggactctgccttgggagattcccagctctgctttccagcgcttggtggaatctgggctggggaaagacggcaccgggaaactctgcttccccattgtttccatctgatcagctgtggtgtgaggacttctcagacaaaggcaaggcctcgtgcccctgcccagcccattcatggagccctgggccttcttggcttccatagatcctaagctcttgactgtagtttagccagacttgttttgctatcttataagcagttcagaattagggaatgctggttttgaagagcaaaggacaggtagtctagagagggtcgtctggcctgcttgctgggtctttgtaacccagcacttcctcttgccctcctggctttatgtttatggggagaggactcaatagctccaccccttcctggcaccagatggggcttggttagtttgcaataagcaccttgcagaggttaaagccagcgggtccctagtcttaggcccagcctgcttgtgtgggctctggcctggcctggtggctggcccagggggcagcagtgcttagagcttctgcagggcttctcttgtttacacagctgcatcagacaatgccatttctccccaccacggaaccttccatctaagatttcctctgcccttttccacctcccccttccatcccaccagctgccagtggctcccagaaagccttattgagccccttgttgacacttggggctgcggaggcctctccctactggtctggcctttcctgagaggcaggtcttccgtcctcagagcctttctggaacaaggagaatgcctgtgcaggtggacacacaggcctggcctgtcgctctcacttgtcttccagcggggagcttcacgttgccgagtggaagaaccatgacctccacttgcttccaaggtgctagggaagtttcagggtacgctggttcccctctccagctggaggccgagtttctggggactgcagatttttctactctgtgatcgattcaatgcccgatgcttctgtttcattcccgaccctttctactatgcattttccttttatcaggtgtataaagttaaatactgtgtatttatcactaaaaagtacatgaacttaagagacaactaagcctttcgtgtttttccacaggtgtttaagcttctctgtacagttgaaataaacagacagcaaaatggtgccaagcctgggcctcttggg

SEQ ID NO: 13211 - DNA, 623 bp, Homo sapiens
cagagcagggagggatgcaggtggtgttaggtgttaggaccttaactaagggcgagagtttggtgcaccaaataaaagagttgcttctgagaaccaatattctgggtctttactgccccacggaatgactattactctttatactgaaatccatcatgaaataaaagacagtgctctccatccacctgagcctactcatcacccacttggacaacaactgacttttatacccccaatttcctcagagttcctttccacccatccttatggtgatcctccttagggaaacccattcccctttccatagaattttatcctaaaatgtaatgtctagattaaaagaaacatttaaagtgtggccaaatagagcagaagggcagaaactcattttctagataaattcactatatcaaagcagctctaggtctcaatagcattttggcaacatttttatctagattaggattggcaaactttttctgtaaatggtctgataataaataatttaactttgtaaggcacatatattttctgctgtaactccttgattctgctgttgtagtgaaaaaagcagctatgataagtgaatgaccgtggccatgttccaataaagctttatatat

SEQ ID NO: 13212 - DNA, 393 bp, Homo sapiens
  misc_feature (1)...(393): n = a,t,c or g
ggttaaatgcccaggcatgccacagtaccaagcgttaccagtaccagctcacattcctttccttatttggaaagaggactaactttctagctcattacagacaccccttccccttcctctccactttcttttacatgcccaccctatctaaaaaaaaaananngnntnaccccggncagaggngaaaggntacaggggcnggacttgnatnaggaataaaggntctcgngcccctttgttcaggtgngctctcatggcaactggncaaggaggnacccctctgngcagaagtcaantgctttgctaagaatcctttgatagagngttcagtttccttaggattttgagcganattcctacatgctcanagataaacccnaagtgcccanaaaa

SEQ ID NO: 13213 - DNA, 319 bp, Homo sapiens
cttcctttctgtctttgttacatgcccagacatgccacagtaccaggcgttatcagtaccagctcacattcctttccttatttggaaagaggactaactttctagctcattacagacaccccttccccttcctctccactttcttttacatgcccaccctatctaaaaaaaaatcaaatgtttagccaaccgggattagtttagaatttacggcctgaacccagccaatggggaaagggtacaggcgcacttgcttcaggaataaaggctctcgtgcccctttgttcaggtgtgctctcatggcgactggccaaggagg

SEQ ID NO: 13214 - DNA, 729 bp, Homo sapiens
gctcattgtgtctgtgtcgaggcgtcgggagggcctaagtccgtgtgcggtgcccttcggccggcctgagccccagagtcagctcccctttctcgcccagcgcccccaggccgctcccggggctcacggaatagtaaagaaacacatcataaaacctcccaggacataaaggtgagcacagaccctgtttggatcaagtcagttcctggagcctgaatgatgactgctgaatcacgggaagccacgggtctgtccccacaggctgcacaggagaaggatggtatcgtaatagtgaaggtggaagaggaagatgaggaagaccacatgtgggggcaggattccaccctacaaggacacgcctcctccagacccagagatattccgccaacgcttcaggcgcttctgttaccagaacacttttggccccgagaggctctcagtcggctgaaggaactttgtcatcagtggctgcggccagaaataaacaccaaggaacagatcctggagcttctggtgctagagcagtttctttccatcctgcccaaggagctccaggtctggctgcaggaataccgccccgatagtggagaggaggccgtgacccttctagaagacttggagcttgatttatcaggacaacaggtcccaggtcaagttcatggacctgagatgctcgcaagggggatggtgcctctggatccagttcaggagtcctcgagctttgacctt

SEQ ID NO: 13215 - DNA, 2085 bp, Homo sapiens
  misc_feature (1)...(2085): n = a,t,c or g
gggaactggcatccatgaaccttgatatagttgacctgccttaaaaaggccaagttttcaccactctgattgcctttcaacctggctacttcatttcattgctactaactacctcatcttcagtcaaaagcctgaatttcagggatctttcagtggaagaacgcagtttttggttgaaaaagccacagatggccgtcgaatatgtacttgaagcagccttggnggaatacaggaagtatattcactcccggaaatgtccgttgcttagtaatgtaacctggagcttttatacactacatttcttttttattattatgaagaatgggataccctcccaggttccagtaaaattcttctgaccgaaacccaatgtgggtgttagaaaaattaccatatagcttaatatgtttattagttctctttggaaaaaactaccactgtggtcttaaaagggaacaaatataccataggctaaaactaaggctttcactctagaatgcaaaggttgttttgcagctgttttcccttaaagatgtcctgttgctttagtgatatttagacccctctcagttaagaaatgcttagattaaaaaaaaaaaattacgtaggattaatacagaaatttaatcatgtctgattaattgctctattaaaataaggggcatttaaagacccagcataaccatttgtataatgagaaatctaggggaaaaccaatcagtccaacatgagattttaggaatagaaatttgccggccatttggaaagtgaaatgccacttagttctcaattgatgacagtgtttgaatcatcataaaaaaaatacctgcttttcatctggacaacccaattgagccactttatctccttttggcaatctgagtaggcggggaacctaggcagggctggctttcttagcgtgtaacttgtgtagcagcacagggcccacacttagaagggaccccacacttgggttcaaggctctgctatagcggaaattcttaataatgtttgaagaaggggccccatgatttcattttgtgctgagccctcaaaattatgtctgtttcgtggtgggaaatatccccatgttttcttgctcaaacacctttctctctgaaagcagaaaaaggcactgatataaagggaagagaaggaggctcaccggagggaagagaacatagtgaagattcccgcctttggggaggtctggaccacccagggcctccactgccaccttggctggcaagggcagaaatgtgttgtgttgtcttagctttaaaacagtcacagttcttgctctatcatagatgaacaaatactttcttgatcattctgtaagaccaggaggttggtaagagtgactaaccagcctaactttaatacacatgtataaagatgttcacagagaaagatgctctgtagagaatttgctaccgaagttggctcaagaatttgtttttagtgttatttaccaagattaggacgtcagtggcttaaattctttgaattcttttcaaggactgcaagattatttgataaagagtagcctgaatcttgtgctctaatatttacacagtaagttcaaagaaaggatgtatgtcaaagacttgttacatagagggaaaatggactgggatagaggacagactgatagtttctttctttcatatcacatgtatagagaaataattatatcagaaactcacaaacctagacatggaaaaacagattactgtctattgtcagcatcattttcatctgtaagtcactactggaatatatttttcttttaatttccagtgactttagaatacacacagtttttccgacttttcaaaaatttgattaaatggttttatagtataatattgggaccccataccgttagcccttgtatgtataccaacactgccaaagtaaaacattaggtcaggcctgggtgggcttcagggcctgttaatccccagcatttttggggagggctggagggccaagtgggataaactttgagggtccatgagtttcggaaacccagccngggcccaaaacagtggaaaccccgtcttntactaaaattacatt

SEQ ID NO: 13216 - DNA, 2036 bp, Homo sapiens
  misc_feature (1)...(2036): n = a,t,c or g
tatctttgaatgccaagtctcttctgtactttcttttattaacatcatagtctttgcatcaagatacatagcaatgatagcaggtttctttttaaagcttagtattaaatattaaatatctttccccatttaaattttacattactctgccaagaaaaaaaaaaaattaaaactcaagttacttgaagcctggacacacttccatgattagccgggctaggtaaaagttggtggctttattcttcctgctctataagcagatccaggccctagaaagatgggaccagggtatataattgtttttgaaaagtgtgctacaaaaatggatggcctgttataagccaggatacaaagttaaggatgggggtaagggagggacattttcttccagaagaaaagacagaatttctgaagagtcccagtccataattttcccaaaatggttggaggagagggtaaaatctcaacatgagtttcaaagtactgtctctgtgaggggccggtagatgccttgctgaggaggggatggctaagtttgacccatgcccccatcccccacctaggagaatggaaatggaaagtttattgcccagtgggtgtgaaagtgggctgaagcttggttggtactgaattctctaagaggtttcttctagaaacagacaactcagactcttcctctcacttcagcaaagaagttatttttaaaagcacttgggaagttcctcctccaccccgcaggtgggaaggctcagagaagggtgtcatcagtacagccgccttctaggccgtaacggaattcctgaaggttggagactccatagaagtggacaaaggctgctgccaccaccaggacatggaaaatctgatgagactggaaccatatgtcaaattttccaggaaagaagcgctcaggaattcgagcagcataaaggccagctccagtgatgtacatcacagccatgaggaagaaccagcccatctggcccactgtggtggccttgacaaagccctcagcgatagtaaagtgcatggtgggcacgacgccactcaagccaagtcccaggaacacgcctgctcttgtctgccggtgcttaggagtggcaaaccggtcccactgcgccacaatgatggcagaaatgccccaggacacagacgatggagaggtagatgagccgtggctgtggggagcagtagaaggaataatagagccaggggaccaaagctccccataattagaagagcaatccctgaatagtccagtttggaaaaagtccgagagactttctctgaatgacaatagacggtgtgaaagagccaggagaagctgaggcagagcactgcacccaaaaagaacatcccaaaaaccaccttctcctgtagaggggccatgaagtacatatttggtctgagcatggtcaagattcccaaaaagagaaacagcacgaaaccaagcagatgggtccagatgttgccagtttctgtatgaatgcggaagatgctcttgaagcaagcccgaaaggagggcatgggaggtctatgaccatgtagcagatagtcgttgtcctttagccagtcagggagcacatcatatgggatgaccctccaacgtccctcccagaccttgtacacaaactcttccatcttctccatggcgtggtgggcttgcaggggaagtgtcagtacccgcacctcctcctcttcttcctggggcactgggcatgtttgctcttcttcagctttgggtgggttggcgattacccgtttgcccttctcttctagcaggggtcccagttcagccagttccaccgtgtcagcttccctgttactggcaggagccccattcccctgtgccaccacagatcctttgtgggaagacatctggctggtacctcaataccctgcagcttcagcttggggaaaggttggggtctctcagccccaggggggcagagatctccctctgatggtagacaagccgggcaggcgggctctgctgggggcggtccccngcgctacatcgcgcggcgctggangcg

SEQ ID NO: 13217 - DNA, 530 bp, Homo sapiens
gtctgtctggagcctaacctagaggaaaaaggggagcagagaccagtgaggccagggctagttgggagaggggcaggggctgcctattgaaaggttttgaattttgcgggtccccaggcttcaatgaccttctggtcccaagtgactgattattctgaccaatgctgacacctcctgccttccgtttatgatcatacaaacgttccaattatgaaaataatatgttgttgcgtataagaattcaggccatacagaaagggaaaaatgaaaatccttcctaaacctgtgagagaaactaaccaatgttaacattccattttgtgagtcttctggacatttatttttttgtacatctttaaactggatcacactaggactactttgtatagccttgttttaatgtatgatgggcatatttttgtaaataactgcagctttttgactactgcataattttccattttatagttgcattatttaacaagtccccttctgtagctcaattaaacttattgcaaatttttgctgtt

SEQ ID NO: 13218 - DNA, 468 bp, Homo sapiens
  misc_feature (1)...(468): n = a,t,c or g
ggttaaaagaacaacagcaaaacaaccttaaaagaggcttgacacaccaaagcagattaagcagaaattcagctgtcaccagttcctagaatcagagttaaagctaggtgaccagctggatataaaaccttccgcnnnnnnnnnnnnnnnnnnnnnnnnnnnnnnnnnnnnnnnnnnnnnnnnnnnnnnnnnnnnnnnnnnnnnnnnnnnnnnnnnnnnnnnnnnnnnnnnncaacatagcaaaacctcatctccatatatatgatgtatgtatatatatatatatatataaattaaccgggcttagtggcttatgccagtagtcctagatacttgggaaggtgatgcagcaagatcacttgagttcaagaattcaatgcttcagcgagctgaaattgtaccactacactctagcctgggtgacggagaattntggctctgaaaaaataaaataaaattgnaaaggcc

SEQ ID NO: 13219 - DNA, 990 bp, Homo sapiens
aaacttggctaagttgccctttattaacgaaaacatagagctttcggtcaattccaccacggagaacacaaaccagagataaaacccacaccaagggctatttcccaagctggggaatttgagaacacacgggcagagttcacgccacacaactacactgggctcgtccttgggaggcgttcacaggaagcaatcacgagcgccaagccacccacaaggcagtgcggcaaggctcccgggatccttacaggcatccaagcgaggtacagaaacctccacagcagtggggataaggggaaaatattttctcttgctaaagaatatccttagttctcaacataaacatgactacgtatatattcagcttcaaatgaaaaacaagtttacaaatcactactggatacttaaactctatgttgcttttctttttggcagcaccagcctaaactctgtgggtttgcaatatttcagaaacttcaggtacattacagtcttctgagaaaggcccagaacttcagaattcccggagcggccagaatgtttttggcttcttctgcatcctgcaaagggctctctccatattcttccttcagccactgccgatactgatggacctcatgcttctcaaactcctggagctgtctctggaagcccacgttggggttggcacaggatctcccagcacgcacggtgtgcagggcatcctcccagccaaagtcagtgacggtcatgatgtatgcgatcaccagtgtcacgctcctggagaccccggccaggcagtgtacaaggcagctctcaccgcggagccggcactcgtgaatgaatttaatactttctttgaaatgtcttgtcaggttttgagatggtgaatccgctgctgggatgcacaggtatttaactccctccaacataggcctggcactatcgtggacagacagaatatgtgtcaccttgttcttgctcaattgttccgcgtctctggcatctttc

SEQ ID NO: 13220 - DNA, 1463 bp, Homo sapiens
  misc_feature (1)...(1463): n = a,t,c or g
ggacctgctgctggaagagcagcggcccgagccgggccaatggcgaagctgctgaagctgcgtcctaggcccccggctctacaaaatctaccgggagagggactctgaaagggccccggccagcgtccctgagacgccaacggcagtcactgccccccattccagctcctgggatacgtactatcagccccgtgccctggagaaacatgctgacagcatcctgggcactggcttcagtattctggtccatctcttattactcctctcccttcgccttcttctacttgtacaggaaaggttacttgagtttgtccaaagtggtgccgttttctcactatgctgggacattgctgctacttctggcaggtgtggcctgcctccgaggcattggccgctggaccaacccccagtaccggcagttcatcaccatcttggaagcaacacatcggaaccagtcttcagaaaacaagaggcagcttgccaactacaactttgacttccggagctggccagtcgacttccactgggaagaacccagcagccggaatgaagtctcgagggggcccttcccgccggggtgtggccctgcttcgcccagagcccctgcaccgggggacagcagacaccctcctcaaccgggttaagaagctgccttgtcagatcaccagctacctggtggcgcacaccctagggcgccggatgctgtatccaggctctgtgtacctgctgcagaaggccctcatgcctgtgctgctgcagggccaggcccgactggtggaagagtgtaatgggcgccgggcaaagctgctggcctgtgatggcaatgagattgacaccatgtttgtggaccggcgggggacagctgagccccagggacagaagctggtgatctgctgtgaggggaatgctgggttttatgaggtgggctgcgtctccacgcccctggaagctggatattcagtcctgggctggaatcatccaggctttgctggaagcacgggggtgccattcccgcagaatgaggctaatgccatggatgtggtggtccagtttgccatccaccgcctaggcttccagccccaggacatcatcatctacgcctggtccatcggcggcttcactgccacgtgggcagccatgtcctacccagatgttagtgccatgatcctggatgcctcctttgatgacctggtgcccttggccttgaaggtcatgccagacagctggaggggcctggtgaccaggaccgtgaggcagcatctcaatctaaacaacgcgganagctgtncagataccagggtcctgtactgctgatccggagaaccaaggatgagatcatcaccaccacgtgagtcgtgggaatctcggccctcaggaaccccagagatggccaggaacttgtcccttctacctctgcccaccagaaacctgggtatctagacccttcctcctaacctccagcc

SEQ ID NO: 13221 - DNA, 2386 bp, Homo sapiens
gaagttgaggaattatctacagaacactgtttatttcaagtccaaaacacaaattactcatttttcttaacagaccgcataatttttactgcatgaatatttagggtttctctattcacaagtacagtttattactagactttaggcttgaatgattcatatatatagatatcagtttactacagaggacatgtacttttaacattttttgtttagaaaatattttacataaaaacacaaagcatttacccaacactccacaaccagtcttcagcaaagatttggctgaagataactttctacaaaacactccaagactgaatagaatgtagtattttacatactttagcttattgttgcagttaaaagctcccccttgtttgatggcttctgcatgtatctacaaagcagaagtcttaactggtgacctgttaaataacattgcctttttaagtgaacttgtccccagcccggaacctaagtagtcataatgaaataaagtaattgatatatgaggggcttttagtaagggctttttcaacctaataaaataataatttagtatctatcagtgcaatattcttttactgttttgtgttcaataaccacctggagtgctaattgtctagtataatcagttggcatcaaaatagaaagtaaaaagatgtacattttaatataccaattcttacctgaataatcttggatttctggagaagtgttccacaaagtggaatttcttcctaaagttatgctgaatgtggtacaatgtgtacaacttggttaaccagtgccctgcttttcatttccaaggtttttccttatcttgaatcaaatgcacaatcttacaactgtatcataatgcactggcttacagttctgtatataaagtccaactcaagcttattttggtttattgtacatgctttattaaaatggtacttgtatttacagtatctgcagaaagagtcccttccaaggcctcacacattcagacacatccatactgacacccactccacagccccatgcacccacaccagtgagatgtggagggtcagactcctaaaattaggcagctgttggggataagagttgatttgtttttcaatttttttgaaaacagaaaagcatgggggaatgcatttggccattacaatgctaattgagtttgtgtatattacatatatggcagttaacactgtaatattccttttacattctatatacacagaatgatatcaaggttttatggtcaacagaatattcccaacttcagtcttaatgctgcttgtagtgatttctgaattcattataggggctttccctaaaaataattcaagtctatgttaagtgaaataaggcacaattaatattgatttgatttagggaaagggaaggaaagagaagggataaaaactggtttcaaatgatctttctgttggggaactagctctgacttaaacccacctgaaattccttctcctaatttccaaagatttcctttaataaagatatttttcttttccctgacaaagccaaaaagaaaagtttgggaattcacattttaatgtttcagtagcctgaacaactcaaattgatgtgtacccccacctcccctgatcaggtcgcctccctcacccatgttaaaataaaaacacagtatgtgacacaggagtcccttgatgtttcttgaggagatctgtacacttgagtagcaaatacatatctggttgtcttcaatatattttaaaaagaaagaaagagaaagaagaaaggaaagaaggaaaaaaggaaggaaagaagtaatattgtgactttcttgctctttaaaaaaatccctgtctccttcttttcaggatgatgaagccccactagacattacaaacaactgcaacaaatgagtttggcagcataaataatgtctagttattcaaatcttcatagtgagattaatttatcttgtacacaatttgttgaatgtttttcgcagcaggtgaatcaaacccaaagactccggacagtctgtgaaagggagtaagaattgcagttctgaaggcccctgactttggttgtttacaaagttcaatcctgtttattgtgatccttggtatcttcttcatctgtatattctgatggttcttctcctggttttaggagtctgcctacataatcatatttttctttaaactgcatttcccattctcgaacactctccatttgtactgcattcaaatctgagagatcatcatattcatctctaagtgcatctttatctaggcaaaatgtggcccagtcctctggaggcatccctaccagcaaatattcccatatggacccgccgggccgtagaacttgctgcctttggtcacgtcgaagactttcc

SEQ ID NO: 13222 - DNA, 1206 bp, Homo sapiens
ggcgggctgccacggcatggagaatggctccgcttctgttgcagctggcggtgctcggcgcggcgctggcggccgcagccctcgtactgatttccatcgttgcatttacaactgctacaaaaatgccagcactccatcgacatgaagaagagaaattcttcttaaatgccaaaggccagaaagaaactttacccagcatatgggactcacctaccaaacaactttctgtcgttgtgccttcatacaatgaagaaaaacggttgcctgtgatgatgggatgaagctctgagctatgctagagaagagacagaaacgagatcctgcgttcacttatgaagtgatagtagttgatgatggcagtaaagatcagacctcaaaggtaggctttttaaatattgccagaaatatggaagtgacaaagtaccgtgtgataaccctggtgaagaatcgtggaaaaggtggagcgattagaatgggtatattcagttctcgaggagaaaagatccttatggcagatgctgatggagccacaaagtttccagatgttgagaaattagaaaaggggctaaatgatctacagccttggcctaatcaaatggctatagcatgtggatctcgagctcatttagaaaaagaatcaattgctcagcgttcttacttccgtactcttctcatgtatgggttccactttctggtgtggttcctttgtgtcaaaggaatcagggacacacagtgtgggttcaaattatttactcgagaagcagcttcacggacgttttcatctctacacgttgaacgatgggcatttgatgtagaactactgtacatagcacagttctttaaaattccaatagcagaaattgctgtcaactggacagaaattgaaggttctaaattagttccattctggagctggctacaaatgggtaaagacctactttttatacgacttcgatatttgactggtgcctggaggcttgagcaaactcggaaaatgaattaggttgtttgcagtcttcagttgtgttcttatgcttcagtgtcacatttcatttcatttgaaactaaaattttaagtaaagctgaaataaacttcttgtcattgtctgccttttgataattttaaagaaataactttccataagtaaaaaattatatatctctttggatataaatgatttttaaaagatgtttatttaaaaagtc

SEQ ID NO: 13223 - DNA, 622 bp, Homo sapiens
cgactcgctgttcactgccaagtttgttgcatacaatgaggaggaggaggaggaggactgcagcctagcaggaccaaactcttacccaggatctactggagcagctgttggagcccatgacgcctgtcgggatgcaaaagagaagcgctctaaaagccaagatgcagattcacctggaagttctggggcccctgaaaacttgacattcaaggaacgccagcgtcttttttcacaaggtcaagatgtatccaataaagtgaaagcttctcgtaaattaacagaactggagaatgaactgaacacaaagtgaaagaaaatgaggagaacactttgtatttaccccaaaatcttttcagttgtgggtttgtaggtgcgagtttgaagaggaaaagaggaagggggttatatttctaagtgatttacaatttctgtttctaaaattgttgggatttagaaatgtttcaattccaagaaattttattttactttaccatgagattgccatttatgtaatttaaacactgtctagtttcttaattatctaactcacacgagggtaagttttttgttggtttcttttttggagtcctgagttcaaaggggacagaactaagggctcaaa

SEQ ID NO: 13224 - DNA, 1640 bp, Homo sapiens
tttttttttttttttttaacaaatccaaagtttaattattaaggattacaaatatttttagcagtgtagttaggcaatccaagcctggacttccacttcattcctactaaactacttgcagagctgaggaggcaggagactagagtacagagagcattttagttctatcacaaggtctagaactgtctctacagtcacaggaagaaacaggtatggcaccgtggccagaagggggtaggtattcacagagagtgggtatcaaggtgtcaaactttgtcttctgatagttttccagagattcctgtagagaagggagcagggagagcctacttatccggaaaccattccctgaaccctcctgaattctgaagcatgtggatttctcagtcttgttctacccatcccctttcccagctttctgctccttcccactcacctttccttccccctggccattttcttcctcatcagagtctaaaaccaagtcccctatggtaatgacggagctgcacagagacggaggacacactgtaggagggaaaccagaatcaaactactacttctagatgaacacaggctcttgagagtccccaagagaggaggctgttgatccaatcctgactcagactacctacctggcttcctggccctaggaggtaataatgatagtctcagggggtccatgtagcaatccaagcaattcctgaggtgagagcaagcaaagaggataggatgaagggaaggcaggcaaagaatgtgctcctagtaagaagcaactctgttccactcactccttttgctctgtggcaggcaagtcaactgggttctccttcagagcccttccccccagggtctggcatggactcttagacttcccagtggaggctgctcttgtcccatggctaggtctgctgtgtatatcgcatgttcttccttgctctcaggcttagatatgacctgggttggtgagccgagattcctaaagggaaacagcatgactgtggggcgctccttatggcctcccctagtggaggcccattgggactgaactcttcgtcggcctagaggggccagattgaagtgtcggccagctagaggttctgggtgcgtccttgaagatggtccctgaggaagatgtgtgccaggcttggcttttggcaggggattgtggagtgctagtctttgttgctgaggaggattctgttccatgggctcagccaggttcactgagtcagtaacagagcactctggaagcagccaccccatgtccacaccatattgtctccaggcaagagaagaggtgatagagactccaggctgcatccaactcagcacatcctgaagctgctgtgctgcggtgtaggcagtgctttctccagctgacacaagtactcaaaaagcagcttttccatggcagccagaaagggttccccatactcttgttcaagttcctgcagcttcgaggccaaatccacaggagcctctgacagctgcttcacctgctggtaaaaagtttcctgtgcctccaaaattgtcctcagatcctgctttgtagccttgggatcccgcactataggtccagattctggaaagtggtgattcagggctttcaggactgtggccaaggccgccctgcagga

SEQ ID NO: 13225 - DNA, 810 bp, Homo sapiens
ttttatttttttcactttatcttttctactttattacttcaaattaacaaccacgataaagctcaaaaaagtccaatatttacacaggaaaaaagtacaaaattccccccaaagttcttcagttttttttttttcagttttttaaattacaaagtaataaaaagctttgctctttaattaaaaaaaaaaaggaaaaaggggaaacagaggtaaataaattaggaaaacacacacacggagaaaacaaacaaaaataaaataaaataaaaacaaaaaggtgttaactaggaaggatgggttaatccaaaacccagccctgactccagggggacaatggaaaagcccagcacgggaagtcagccactgtcatctcagagtgggtggggctgtgcgtatctcctggattctgaggctcggaaaactcggtgggaactgccttcaactgactacaccactccctgatgatgcttgagggccggctttggctctgggacctgtcacttctccgacacggacccgacccgttcctctccaggcaggtggtgggtgggggcaggaacaggaggccgggcaggccctggcgtctggctcctgtagcctggtgttgtcaggggagcatctggcagcctgaaggttgggggcagcgggcaccacaagggggcaagaatcctcagtgctgagggcatctcatcttcttccattggcaaagaaatcaaagaaacaaactccatcgtcggttttgtgctgggtttttttgttgttcttttgagtggtttatttttgccttttttttttttttttttttttaaa

SEQ ID NO: 13226 - DNA, 1104 bp, Homo sapiens
  misc_feature (1)...(1104): n = a,t,c or g
ggagattctgcatttccaacaagctcccaggatactttgtgtagaaaggctttggtgtattaactaactcgatcttcttaataatcctatgaaatactactgctattcccattttacagatgaggaaacagaggttaagcatatatgaacttacatcaaaataaatagactgcagggcaaggagggaggggagaatagtgtgggcagtgtacagtgcagaaacaaagttctaggcagaggaaaaaggatttacagaaagcctggcatacagggcagggggacggggcctgcacacggggctgtttcaccgttagacgttataagcacagtacttggggctatgggcttcctgaaggtcccaagtatttgagacctgaaaaaaatttagttgacacctacataggaaaagtgaacttttaaattaataattccaaaattcaaatcacgaattgtttcaaaaattttacatgatagaattcatatttagtaagcgatacgggtatattttaatgcatttgattttaaaaacggggtagggcctactaagaacaggccaagccctggccccagtgggtttggatataatcctgagggcagctgggaaccactgagagaagcaggagaatgttctctgtggctacagtgaggagaatggattggagggaggccagactggaggcccagtggctagagaccagataggcagttacagtcttccagactgcgagacaatctcttctttagtgccaagattaggcataaaatcatagcatttatattaacccaattatttctttggatttcctggcatccccaatctgactcagcattctaaatttacttaagatctggggacaagggtttttggcaaatccttgaaggcaaatgatgttacagtcaattcagtatatgccttggagccagacagacatgggtacgggcctcagttctgctgcttgctagctatgtgacttttgcacnagtgatttaacttctctggggcctngaatccctactggtaacacgagcataatcgattcctcacagattnaagtgagaaactatgtacgtangacctncttatggagtgggtacttagaaata

SEQ ID NO: 13227 - DNA, 1800 bp, Homo sapiens
tcttggaaggagctcagtaatgtcctctcagggatcttctgcgcctctctcaacttcatcgactccaccaacacagtcactcccactgcctccttcaaacccctgggtctggccaatgacactgaccactactttctgcgctatgctgtgctgccgcgggaggtggtctgcaccgaaaacctcaccccctggaagaagctcttgccctgtagttccaaggcaggcctctctgtgctgctgaaggcagatcgcttgttccacaccagctaccactcccaggcagtgcatatccgccctgtttgcagaaatgcacgctgtactagcatctcctgggagctgaggcagaccctgtcagttgtatttgatgccttcatcacggggcagggaaagaaagactggtccctcttccggatgttctcccgaaccctcacgggagccctgccccctggcttcagagagccgagtctatgtggacatcaccacctacaaccaggacaacgagacattagaggtgcacccacccccgaccactacatatcaggacgtcatcctaggcactcggaagacctatgccatctatgacttgcttgacaccgccatgatcaacaactctcgaaacctcaacatccagctcaagtggaagagacccccagagaatgaggcccccccagtgcccttcctgcatgcccagcggtacgtgagtggctatgggctgcagaagggggagctgagcacactgctgtacaacacccacccataccgggccttcccggtgctgctgctggacaccgtaccctggtatctgcggctgtatgtgcacaccctcaccatcacctccaagggcaaggagaacaaaccaagttacatccactaccagcctgcccaggaccggctgcaaccccacctcctggagatgctgattcagctgccggccaactcagtcaccaaggtttccatccagtttgagcgggcgctgctgaagtggaccgagtacacgccagatcctaaccatggcttctatgtcagcccatctgtcctcagcgcccttgtgcccagcatggtagcagccaagccagtggactgggaagagagtcccctcttcaacagcctgttcccagtctctgatggctctaactactttgtgcggctctacacggagccgctgctggtgaacctgccgacaccggacttcagcatgccctacaacgtgatctgcctcacgtgcactgtggtggccgtgtgctacggctccttctacaatctcctcacccgaaccttccacatcgaggagccccgcacaggtggcctggccaagcggctggccaaccttatccggcgcgcccgaggtgtccccccactctgattcttgccctttccagcagctgcagctgcccgtttctctctggggaggggagcccaagggctgtttctgccacttgctctcctcagagttggcttttgaaccaaagtgccctggaccaggtcagggcctacagctgtgttgtccagtacaggagccacgagccaaatgtggcatttgaatttgaattaacttagaaattcatttcctcacctgtagtggccacctctatattgaggtgctcaataagcaaaagtggtcggtggctgctgtattggacagcacagaaaaagatttccatcaccacagaaaggtcggctggcagcactggcccaaggtgatggggtgtgctacacagtgtatgtcactgtgtagtggatggagtttactgtttgtggaataaaaacggctgtttccgtgaaaaaaaaaaaaaaaaaaaa

SEQ ID NO: 13228 - DNA, 343 bp, Homo sapiens
gctacaacaacagccctttccacatctcccagtgcttcgtgctaaagcttagtgacctgcagtcagtcaatgtggggcttttcgaccagcatttccggctgacggcacctcatggtcgtgctgtcctctctggaacgcacgccctcgccggagcctgttgacaaggacttctactccgagtttgggaacaagaccacagggaagatggagaactacgagctgatccactctagtcgcgtcaagtttacctaccccagtgaggaggagattggggacctgacgttcactgtggcccaaaagatggctgagccagagaaggccccagccctcagcatcctgctgt

SEQ ID NO: 13229 - DNA, 1802 bp, Homo sapiens
cgagtgagcacctcatccaggccacctcggaggagaatcagatcccctcgcacttgcctgcctgcccgtcgctccggcacgtcgccagcctgcggggcagcgccagtcatcgagctcttccacagcagcattgctgaggttgaaaacgaggagctgaggcacctcatgtggtcctcggtggtgttctaccagaccccagggctggaggtgactgcctgcgtgctgctctccaccaaggctgtgtactttgtgctccacgacggcctccgccgctacttctcagagccactgcaggatttctggcatcagaaaaacaccgactacaacaacagccctttccacatctcccagtgcttcgtgctaaagcttagtgacctgcagtcagtcaatgtggggcttttcgaccagcatttccggctgacgggttccaccccgatgcaggtggtcacgtgcttgacgcgggacagctacctgacgcactgcttcctccagcacctcatggtcgtgctgtcctctctggaacgcacgccctcgccggagcctgttgacaaggacttctactccgagtttgggaacaagaccacagggaagatggagaactacgagctgatccactctagtcgcgtcaagtttacctaccccagtgaggaggagattggggacctgacgttcactgtggcccaaaagatggctgagccagagaagggccccagccctcagcatcctgctgtacgtgcaggccttccaggtgggcatgccaccccctgggtgctgcaggggccccctgcgccccaagacactcctgctcaccagctccgagatcttcctcctggatgaggactgtgtccactacccactgcccgagtttgccaaagagccgccgcagagagacaggtaccggctggacgatggccgccgcgtccgggacctggaccgagtgctcatgggctaccagacctacccgcaggccctcaccctcgtcttcgatgacgtgcaaggtcatgacctcatgggcagtgtcaccctggaccactttggggaggtgccaggtggcccggctagagccagccagggccgtgaagtccagtggcaggtgtttgtccccagtgctgagagcagagagaagctcatctcgctgttggctcgccagtgggaggccctgtgtggccgtgagctgcctgtcgagctcaccggctagcccaggccacagccagcctgtcgtgtccagcctgacgcctactggggcagggcagcaggcttttgtgttctctaaaaatgttttatcctccctttggtaccttaatttgactgtcctcgcagagaatgtgaacatgtgtgtgtgttgtgttaattctttctcatgttgggagtgagaatgccgggcccctcagggctgtcggtgtgctgtcagcctcccacaggtggtacagccgtgcacaccagtgtcgtgtctgctgttgtgggaccgttgttaacacgtgacactgtgggtctgactttctcttctacacgtcctttcctgaagtgtcgagtccagtcctttgttgctgttgctgttgctgttgctgttgctgttgctgttggcatcttgctgctaatcctgaggctggtagcagaatgcacattggaagctcccaccccatattgttcttcaaagtggaggtctcccctgatccagacaagtgggagagcccgtgggggcaggggacctggagctgccagcaccaagcgtgattcctgctgcctgtattctctattccaataaagcagagtttgacaccgtcaaaaaaaaaaaaaaaaaa

SEQ ID NO: 13230 - DNA, 295 bp, Homo sapiens
tggtagcacaaaaggagccatagacaatacataaagaaatgggagtgactgtgtttcaacaaaactttatttacaaaaacaggcagcaggctagatttggttcacaggctgtagcttgccaaccactagtctaatataaccttttagtacagttttccagcagttcacacacccccaaagacatcaacaaaaaacagattaagaccccctgatttagtagaagaaactcatgccaacatacagttacagtgatataacaggtgctataaatagaaacatttcaaaagtgctatgg

SEQ ID NO: 13231 - DNA, 452 bp, Homo sapiens
gtgcctgctgtgggaaatcatagtgagtgatttacaggaatccttctcctccaagctgcattggcttcttatatcctttgcgaccttgggctgaaagagaaacagctgcaaatgttgtgctgtctctttgaggttgtcttggggacagttccccgcaaaggtcattcctagcttttgaggtcaatgttgggtccataaggtaactgcattgtgccaaagaagtcagtcctgcctaacttttatgcaaagatagaaactgccacggtattttttaaaattagtttttaaaataaatgcccaagagtagatcttatatatatatatatgtatacatattttatatatatatatatttccatactcaaccacaacttcctctgtactcattgtttactacagtgggggacatcaagggttggaaggattataaagctttaaggctgggcgtgagt

SEQ ID NO: 13232 - DNA, 530 bp, Homo sapiens
gcctaacggtcacagctgtcgcccatcggagaggcaggactactgcgagcagttttaccgcgacctccggaggccggcgtgacaggctctgtcactaaaatagcaggaaccgaatattgtatctgacgcatcctgtaatactgaagagcaactgaagacagttgatgatgtccttattcattgccaggttatatatgatgctctgcaaaacctggataagaagattgatgtgattcgtagaaaggtttcaaaaatccaacgtttccatgcgagatccctgtggacaaatcataagcgatatggatataaaaagcattcttaccggcttgttaaaaagcttaaactccagaaaatgaagaaaaatgaggtttacgagacattctcctaccctgaaagttacagccccactttaccagtgtcaaggcgtgagaataattccccgagcaaccttccaaggccatccttttgcatggaagaataccagcgagctgagctggaggaggacccgattcctcagcccgcactccgag

SEQ ID NO: 13233 - DNA, 1068 bp, Homo sapiens
aggaactgggcagagctgtccaacaggaagccggccccctgacatgcgcgcctgcagcctggggccctgtgagagaacttggcgctggtacacagggccctggggtgagtgctcctccgaatgtggctctggcacacagcgtagagacatcatctgtgtatccaaactggggacggagttcaacgtgacttctccgagcaactgttctcacctccccaggccccctgccctgcagccctgtcaagggcaggcctgccaggaccgatggttttccacgccctggagcccatgttctcgctcctgccaagggggaacgcagacacgggaggtccagtgcctgagcaccaaccagaccctcagcacccgatgccctcctcaactgcggccctccaggaagcgcccctgtaacagccaaccctgcagccagcgccctgatgatcaatgcaaggacagctctccacattgccccctgggtggtacagggcccggctctgcgtctacccctactacacagccacctgttgccgctcttgcgcacatgtcctgggagcggtctccccaggatccctcctgaaaggggtccggggcaccttcacggttttctgtgccaccatcggtcacccattgatcggcccactctgaaccccctgggctctccagcctgtcccaggtctcagcagggatgtcctccaggtgacagagggtggcaaggtgactgacacaaagtgactttcagggctgtggtcaggcccatgtggtggtgtgatgggtgtgttgcacatatgcctcaggtgtgcttttgggactgcatggatatgtgtgtgctcaaacgtgtatcacttttcaaaaagaggttacacagactgagaaggacaagacctgtttccttgagactttcctaggtggaaaggaaagcaagtctgcagttccttgctaatctgagctacttagagtgtggtctccccaccaactccagttttgtgccctaagcctcatttctcatgttcagacctcacatcttctaagccgccctgtgtcttctggaccccttctcatttgcctagtatc

SEQ ID NO: 13234 - DNA, 625 bp, Homo sapiens
  misc_feature (1)...(625): n = a,t,c or g
gcggcacgagtgctggtttaaatagaattaaaaatttattttttgctggtgacctggagagtgtttcttaaaattataataatgaatacttttcatgctctgatttatgtataggaattattaagagcttcactctgataaagttatttaccacttggctactcaggggtggagtcatttcacaaaggatctgcagcgaatgaattagaccaggagtaacttcacccttctgcttgtcccagctggagcaggattaggactcattcagctgcagctggttcccaggaaaatgaaagcagttccttctggttttttcctttcatatgaaagtcatagttcccagcagatggctttcatcagccctgtacatgtatctgnaaattcaaggccaaggaattatttcaacttcattagggaacaggtgaagaaacccatttgtagtgtggcacctattttattaggagttgaaattaagcatagagattatagtagtatgcccattctgggtcaaaatagtttttaactgtcagcaatttaaagaaaaaaaaagactgctaaggaaaagtaagtctggctgtagtgttgattgaggtatcttttatggttgaattgtattatgcttacg

SEQ ID NO: 13235 - DNA, 747 bp, Homo sapiens
  misc_feature (1)...(747): n = a,t,c or g
gctttgggacctcccaagtgatgtgtctggtagtacgcgaatgagatgactgatagttaggggcttctgaatggcctcagaatagggtctggttgccacgggaaccaaccatgtgtttagagggttggaactttcagccccactcccagaccttggggaaggaagaggggctgaaggttgagtcgatcacaaatggataatgatttaatcaatcatgcctaagaataaagcttcccataaaaatctaaaggacaaggttcagagagcttctgcattgctcaatacatgaggagtggtgagcccaaaggggccgtggaagctccgtgccccttcccccaaacctgttcctgtgcctccatctggctgtttctgagttatattattttataatagactgatgcatagtaaataaagccctttcctgagttctgtgagctactctagcaaatggtgaaatctgngaaggaaatcatgggaacctctgctttgtagccacgtcagatagaagatgtgagtaactttggaacctactgcttgtgactggtgtctgaagttgggggagatcttatgggactgagctcttaacctgctggggatctgcacttaatgccgattaatgccagaattgaattgtatgatatccagttggtattggagaattggccagtgtgggagaaaacccacacagttggtggcaaggagtgttcagtgttgagtgtgaatgtcaataaaaaaaggtttgtttta

SEQ ID NO: 13236 - DNA, 426 bp, Homo sapiens
ttaaatatgagaggatgtaagatccttaagcatgtacaaattttcgtggcatctatcacagtcctgaatcctgaaagactattttctgttgagttagatctttccttataaatgctttctgggatggcccatgcatctctgacagttctcatgctgagtcataccttgttctgttaaatttatccattattggacaaagactggaagaatggatatgacattgggaagtgtgcaagacttccacagatcacttgtagagagggatgatttcattgtaatcctacctcactggacacctcaaacctgccagtctcatctgtaaagtgagcatttttatcccctttccttgggctctcttgggctccattctacagggcaacactcagggtgggacttctttaacttgaaggagaggagcgtaatatt

SEQ ID NO: 13237 - DNA, 1258 bp, Homo sapiens
  misc_feature (1)...(1258): n = a,t,c or g
ggaattaaaagcttaaacccaaaaattgttcatccatatataagaaattatcgaattaaaacttaatgtatgtcaattattttcaaatgtctaaattcctttggaaataaaaatatcagttttactttgaaattgctcaacttctgctattcatatggtctgattagtgacataagtagcagccgtttttcaacttcagtttcattcactaccattgtttccaaattatcaatctctgctagtaattatgaatttaagaccatattattatcaaaaacctagagaccaatcatatatctgaaaagaaatacccattaaaaattctgcctcctgtttattgagaactatgcattgaacattctgaatcattctaagcctctggagagactgtaatgatccattcatgagctggtatgaaatcagtgggaagcagaacaacagaaggaactttaaaagcaacaagcaattatgtaccatatatacactgtagcaaatattttatatttgagagtctttacagcttacatttccattccattattacaagtgatgaaaaacaaaaaattgcaagtagtatgcaaattataaatatacagtcttcccacttcactaaccaaattcctactttccagtgttacttcccaatttatgcaggaaacctcctgcaaagctgaaactgattagaaaattctttatattttaaaatagctctttctcatttttagagaagtcaaatagccaaccatcaaaattaagaataaattgaattgtcacagtccattacagttattgttgctagatccacctcatttgcagatgtccaaacttaaattcatctgttcttaaaatgctacttaaaactttggttgttttcctgtaatataaaagaaaaagttaatttatcaattgattgaatacagtttttactaattagtttatcaaaccaaatactgtgaacgtaccagggtgtttaccagatttaaatgcatgttaccataggaaactattaaagtaactagaactgtcaaataacaaaacgggcttcatgtttttaaaatatatgtaactcattttaaaatatattaaattgtattccaaacctgttcttctgtttctgtggcacctaggtttaaaatatgtattaatgtgtaaatcacaagtaaaatgaattctaatgtacaagtttgttttaaaaagtgtatgtcaagcttttatttacacaataaaatgttattaaagatggaaagtctatanaaat

SEQ ID NO: 13238 - DNA, 2543 bp, Homo sapiens
ggcgccgaggatgaggaggtgcaacagcggctccgggccgccgccgtcgctgctgctgctgctgctgtggctgctcgcggttcccggcgctaacgcggccccgcggtcggcgctctattcgccttccgacccgctgacgctgctgcaggcggacacggtgcgcggcgcggtgctgggctcccgcagcgcctgggccgtggagttcttcgcctcctggtgcggccactgcatcgccttcgccccgacgtggaaggcgctggccgaagacgtcaaagcctggaggccggccctgatatctcgccgccctggactgtgctgaggagaccaacagtgcagtctgcagagacttcaacatccctggcttcccgactgtgaggttcttcaaggcctttaccaagaacggctcgggagcagtatttccagtggctggtgctgacgtgcagacgctgcgggagaggctcattgacgccctggagtcccatcatgacacgtggcccccagcctgtcccccactggagcctgccaagctggaggagattgatggattctttgcgagaaataacgaagagtacctggctctgatctttgaaaagggaggctcctacctgggtagagaggtggctctggacctgtcccagcacaaaggcgtggcggtgcgcagggtgctgaacacagaggccaatgtggtgagaaagtttggtgtcaccgacttcccctcttgctacctgctgttccggaatggctctgtctcccgagtccccgtgctcatggaatccaggtccttctataccgcttacctgcagagactctctgggctcaccagggaggctgcccagaccacagttgcaccaaccactgctaacaagatagctcccactgtttggaaattggcagatcgctccaagatctacatggctgacctggaatctgcactgcactacatcctgcggatagaagtgggcaggttcccggtcctggaagggcagcgcctggtggccctgaaaaagtttgtggcagtgctggccaagtatttccctggccgggcccttagtccagaacttcctgcactccgtgaatgaatggctcaagaggcagaagagaaataaaattccctacagtttctttaaaactgccctggacgacaggaaagagggtgccgttcttgccaagaaggtgaactggattggctgccaggggagtgagccgcatttccggggctttccctgctccctgtgggtcctcttccacttcttgactgtgcaggcagctcggcaaaatgtagaccactcacaggaagcagccaaggccaaggaggtcctcccagccatccgaggctacgtgcactacttcttcggctgccgagactgcgctagccacttcgagcagatggctgctgcctccatgcaccgggtggggagtcccaacgccgctgtcctctggctctggtctagccacaacagggtcaatgctcgccttgcaggtgcccccagcgaggacccccagttccccaaggtgcagtggccaccccgtgaactttgttctgcctggccacaatgaacgcctggatgtgcccgtgtgggacgtggaagccaccctcaacttcctcaaggcccacttctccccaagcaacatcatcctggacttccctgcagctgggtcagctgcccggagggatgtgcagaatgtgggcagccgccccagagctggcgatgggagccctggagctggaaagccggaattcaactctggaccctgggaagcctgagatgatgaagtcccccacaaacaccaccccacatgtgccggctgagggacctgagcttatttgaagtcctgcctcattctcactggagcctcagtctctcctgcttggtcttggccctcaactggggcaagtgaagccagaggagggtcccccagctgggtgggctggaatggaactcctcactagctgctggggctccgcccaccctgctcccttccggacaatgaagaagcctttgcaccctgggaggaaggaccaccccgggccctctatgcctggccagcctccagctcctcagacctcctgggtggggtttggcttcagggtggggtttggaagcttctggaagtcgtgctggtctcccaggtgaggcaagccatggttgctgggctgtagggtgagtggcttgcttggtgggacctgacgagttggtggcatgggaaggatgtgggtctctagtgccttgccctggcttagctgcaggagaagatggctgctttcacttccccccattgagctctgctccctctgagcctggtcttttgtccttttttattttggtctccaagatgaatgctcatctttggagggtgccaggtagaagctagggaggggagtgtcttctctctccaggtttcaccttccagtgtgcagaagttagaagggtctggcgggggcagtgccttacacatgcttgattcccacgctaccccctgccttgggaggtgtgtggaataaattatttttgttaaggcaaaaaaaaaaaaaaaaaaaaaaa

SEQ ID NO: 13239 - DNA, 514 bp, Homo sapiens
  misc_feature (1)...(514): n = a,t,c or g
gcttccatgtaaaaggatgctcttatgttctatataagcctcatgggaagaataaaacagcaggagaaactgcaggggacctctctcaccacaggaagttgaatattggatcttaattggagaatcaagtagaaaacatcctgccattcactgtaaaaagtatgttaacttccctttattttctttaattgaggtaacatttagatacagtgaaatgcacagatcttagttgtatataattagtttgataaatgaatgcacctgtataatcaccacccaaacaggatatggtacacattcattgccatggaaaatactctcactctctactcctatcaatctccatagaaagcccctcttctgatttctgtcactacagatttgctttgcctcttcttgaattccatgtaanagagaatcagnnantantanttttgcaccaatatctaagtaacatttttgggattccccatgtgtcatgtgtatcaagagtttattanttttttantgctgg

SEQ ID NO: 13240 - DNA, 570 bp, Homo sapiens
ctccatttgaagatattaggtttggtcctttcacggggaatacaacacttatgaggtggtttagacaaattaatgaccacttccatgtaaaaggatgctcttatgttctatataagcctcatgggaagaataaaacagcaggagaaactgcttcaggggccctgtcaaagttaacccgtggattgaaagatgaatcgctggcttatatctatcattgccaaaatcactatttttgtccaattggcttcgaagcaacccctgttaaagctaataaagcattcagcaggggacctctctcaccacaggaagttgaatattggatcttaattggagaatcaagtagaaaacatcctgccattcactgtaaaaaatgggcagatattgttactgatctaaacactcaaaatccagaatacctggatatccggcacttagagaggggactgcagtatagaaaaacaaagaaggttgggggaaatttgcattgcatcatagcattccagagacttaactggcaaagatttggcctttggaactttccatttgggaacctttaggacaagaatcaca

SEQ ID NO: 13241 - DNA, 432 bp, Homo sapiens
  misc_feature (1)...(432): n = a,t,c or g
cacaaattcgaaacacaaatcaggcaatgcaaagaaacaagtttccaagagaaaaacttcagataaaaagggaagatatcagaaggaatgtcctcagcattctcctcttgaagatattaaacagcggaaagtattagacctcagacgatggtactgcataagccgaccacagtataagacttcttgtggcatctcttcattaatttcttgttggaatttcttatacagcacaatggggagctgggaaaccttccacctattacccaagaagaagctttacatattctgggctttcaacctccatttggaaggatattaggtttgggtccttttcacggggggattacaacacttatggagggtggtttaggaccaatttaatggaccactttccatgttaaaagggtggnccttanggttcncatattaagg

SEQ ID NO: 13242 - DNA, 1175 bp, Homo sapiens
gtggagggccggtctgaagagtggcgggactggcttcacttcctccgcggttcctcggagccgcctcgctcctcttcagggactttgctgagaagggctctcgggcgtccagaccccaccgcaaaggtgtttggcgatccgccgagaagttgttggccccaggagcatccctcggggccgagatgcgcagtggacgatgccccttctgacccaacagatccaagacgaggatgatcagtacagccttgtggccagccttgacaacgttaggaatctctccactatcttgaaagctattcatttccgagaacatgccacgtgtttcgcaactaaaaatggtatcaaagtaacagtggaaaatgcaaagtgtgtgcaagcaaatgcttttattcagggactttaactgcacttcgaatgtgttaccaaggttatggttaccctttgatgctgttcctggaagaaggaggagtggtgacagtctgcaaaatcaatacacaggaacctgaggagaccctggactttgatttctgcagcaccaatgttattaataaaattattctgcagtcagaggggctccgtgaagcattttctgaattggatatgacgagtgaagtcctacaaattaccatgtctcctgacaagccttatttcaggttatctacttttggaaatgcaggaagttcccaccttgactatcccaaagattctgatttgatggaagcatttcattgtaatcagacccaagtcaacagatacaagatttccttactgaaaccctctacaaaggcattagtcctatcttgtaaggtatctattcggacagataacagaggcttcctttcattacagtatatgattagaaatgaagatggacaaatatgttttgtggaatattactgctgccctgatgaagaagttcctgaatctgagtcttgagtatgacaattcactgatatttatgtgtacatttatgatagatgaagttcttattctgagtacagtactctttgtcatttcatattggattttctatagagaagaagcacaatggggaagataggagcaaggtcatgtaccctaatagttactatgttttgtaaatccattttgtagagggcatgtaaataaatgttttcctgtagtcatagattaaaaaaaaaaaaaaaaaaaaaaaa

SEQ ID NO: 13243 - DNA, 720 bp, Homo sapiens
ggcagaatgaggccaaatgcagagatgaggctaaggcaagaatatgccccaactaaagcatagattccccaaagtgagtctcatggtgggaggccactcaccttcctagctgctgctcgaaaaggttttgactgtgttggggtgggggttgggtaagggaatggtcaagactgagaaaggaatgaaatccattcaggaaatatcgacagggctacacgtgatgtccccaaactgctgctattgaagaacttcccaaaacttctttacaaagccctaaaggaaagtttgcatctatgaaaagccaataggtgagacatccaattgctgcatggaaattgatgtacattcaggggacggcaaaaatagctgtaaaatagtgaaaaagagcagtggttgtgctcttttctggccaatgatttacaaaaggaatctacttggactctgtccccggggggttgaatccttaggggttgggaacttgtgggaacattccaacttggctaaggcagggtccactgggagggaagctctatctgggaactcacccccagcgcacacacatctcccccagggtcccaaggccccgcagcttcctcccccgaccaaaccccaagacctggatcccaggagacaacagtctccacagtgagagcaacattaagggcaaagccatggagaaatgtgggagaggccggcctcaaatctttccatttaacaaac

SEQ ID NO: 13244 - DNA, 790 bp, Homo sapiens
ttttccccagagaaacgaatgcattttattttaggtaacaaaagtagagtcaagtattttttcaaagttcatatacaggcacagtctcagtgaactggcgtcagggcctcgtacagtctctgtgcagccagctccaccatttctcggagggattcatcgtcttcacttccctcttcacattctacagtccgtgtctccaagttaaggttggcagttttcccgtccactgtgacgctaagaatagagtcatcctttacacttacacagtcttctccaaatatgtcctggagcatgatctccaacctcttgctgtaaacgtgcatttctaattttttagaaaccttctgtactgcaccttttcttattttgggatttgactgaacttccaatatcacagttgttactgtatctgcatacatatcattagaagggtttgccagccattctaataccaccatgcctggttcttgtattacagtaatatttttgaacactttcagagcaggtttttcttgaatttctaattcttccacatcacctgtcaatttctgcagctggtaacagagcaaattaaagggaccagtatatggaatggcttgggtctgcttcaccgtgctcatggccaggtcagtataattggacaggtcgcaaggagaaagtatgtgataattaaagtttcttttaacaagtattcctgagacccgctggccttgttctggttttttgtctgctaaaaatcccataaccttggctagtttttctcctctgaagtttaaggtcactgcttctg

SEQ ID NO: 13245 - DNA, 455 bp, Homo sapiens
  misc_feature (1)...(455): n = a,t,c or g
ggtgatccacctggctggggctccgaaagtgctggattacaggcatgagccagtacaccaggctgagcagcttttcgtatgctagttggccattcatatatttttggagaatgtctattcaagtactttcccactttttaattgggtagtttgaggttttttgtcattgagctgtaggaattctttatatattctggatattaagcccttattagattgtantaggtccantcttgnnnnnnnnnnnnnnnnnnnnnnnnnnnnnnnnnnnnnaantgnttcanaggtttaattggatcacggttccacancgctgtacacngagcanggcatctgcttctggggaggcctcagagagctttactcatggtggcagacaaagcaggagcaggtgtcttacatgggcaggggcaggaccaagatggggtctggggtggcggtgggtaagtgctaca

SEQ ID NO: 13246 - DNA, 347 bp, Homo sapiens
  misc_feature (1)...(347): n = a,t,c or g
gtcgaaatgttgagggaagtgacagtccaaaaatggtaggagttgtaagggtaaaagcgtcttttactgcctttcgagacagcacggtgaagagcaccagtgctggaaataaacagacgtgggttgtcaatttgctacttgcccttgctgcttgctgannnnnnnnnnnnnnnnnnnnnnnnnnnnnnnnnnnnnnnnnnnnnnnnnnnnnnnnnnnnnnnnactagatgatatcattattacatctaacttaaagtgtttttttatgaggattcaatgaaacaatgtgagaaaaaggctgagcattgtgtcaggcatcagatacatggtacattctcgctacgtgg

SEQ ID NO: 13247 - DNA, 1332 bp, Homo sapiens
ggaagaagctgagatgaaacatgactctcataaacaggaactttattaaactacatgttacataaaagaacatataaatggaccattaaatacattcagtttattttaaacaaatttacatagatacttatttacatttctccattgtattcttaaattatttttccaagcttactaccgataaaaggtaatacaatgatcatctgctcacacagatgcatagagaagttgtccacagggctaagtaaagcaccacttcccaggaaacacagcttattagatcttccagcaacaactcatgctgaaggtgctctcttctgagcagcccttgaggtgaggcttttgctttagagatgctgggggttggttctgaggagctgacccagggcagagatgggtccttgctgattgacctgacttggactcacagaggtggaaagacctgtggagaccatcatcgaggccatggccccacatctgtgatatgggaaacaggcttgggaagaggtggtgacttcccaaagtcacccagcatccatgatagaggaagggcctgggagcttgggtacccagggttccctccaagaggtcccgatccctctgctatccacaaatccacaaacttagaatcacttgcatccattttccaccaccatggaccttatgctttgaactgttttgtctacctgattaaatatataacttcttaggcttcttgagatggtgaaaagcagctcaggattccccataagcaactttgtggagcccctggaaataccctactcagggctgtttttacaagaggttttgtggtcaggtgctttactacttcagccataacgtttacctttaaaactcagctgacttatggaagctcagcatttccaattcgcttagatgacaggcaacagtctgcagaagggaggttctaacgtcaaccacgtggattccccacaaacgcatcatatttgcctaaatccatctatctaccaatgtcagatctaaaatgaggtttcactaataagtgaccctaaaattaaaaaaaacacaaaaaagtttccttaaaaaaaaaattcccaagaatttccccgtttccccaattagtctcagaggagtcgtgaaatgggcattgggtagaaaaagtcccatgttttcaactgtttcttttgaataaagcctgattcccccactctgcccccgaacttttcccgatgatatacattcttctgaaagcaatttcatgcttttagtctgctttaaaaaacctgacttggttcttctcagtatttaaaaaccactgtaccaaggaagagatgtccacgttaaaaacta

SEQ ID NO: 13248 - DNA, 463 bp, Homo sapiens
  misc_feature (1)...(463): n = a,t,c or g
tgtncccccttgnacacttnnnnnnnnnnnnnnnnnnnnnnnnnnnnnnnnnnnnnnnnnnnnnnnnnnnnnnnnnnnnnnnnnnnnnnnnnnggcacgagctcttagccaagaaagaagtttcattaatatccgtgattcccttccttcccctaaaaggagtagagaaatttccaggaaatgctcgccagtgctgcatttggaaacttgcctaagacttgaaactttataggctgagaagtagatacattaaaattgagtcttttaattattttattatattcaaaatttgggaaaaagaaagcaaattaatctaattaaagaagaaaattcctgatgttagtaaagtttcagcctagttttctgcagacagtggtgttcattgtggtcctgagacacctcagcatccttaggagttcagggatggtcagtaaaattgaataagcctgggtgacngagcgag

SEQ ID NO: 13249 - DNA, 1147 bp, Homo sapiens
gccagaaaaaaaatcccaagtaccctcatcattgcttttctagccattcatgccccctcttcctctggcacattttctaagagtttatttcataagcagcaaacggactgttgtcgatttcatctctcctgacctacctgggtggaggtgctaatggccatggacagaaaggggcgagccagagctcgtgggctttgtgggaggcagaggcctgcattcagcagcggccctgtgtgcctgtaagttagggaaggctttctgacaggtaagaaaatgagatagggttgatgacttaccatgcttttatatttggcagtttacaattctagacttttcctactatgggcgatctttttttatttaattctttgggaggtaacaatattttgggagtcttaaggaatttgattttatacccataaggaataaaaattagggatctttcctgtagtatatagttttagtattttaaagagatctctgaattttacaagagaaccaacattccttaatggcagaactttgaaagttgatttgggaggctttttgctgcaggatctcaaaaatagagagagagatgattctacttaaatgtttttaattttctaacttccatcaggttgatacttaagctctattttgtaaagagtaaatcatcctttagtatgctgcataagatgatcagcattcttgcactttctcagtaataagacgtgccgggcaattggctccccaggacgcattgtgtttttaacctaacgagaggactttggggcaggtgattaaatttatataggtacctcaagaaaaagaacctgaatatgctgcattttctttctttagcttttacatgtagcattttgttttgcttttgttatttttgttttgatatatgctttttggaccccaatagactgttgaaagaaatttaaaaattactcttgtagggatatagtatccttaaaaaataaaaattaaaaaaaatttaaaaaaattgctgcaatatctggctcgaaggttgccctatattagaataatactttagccaaatacacctgaggaggcagacactgtgtttataagcagacaataatgttctgaatccttcctgttcatgctgctttcttaattcatttctccatgtcat

SEQ ID NO: 13250 - DNA, 777 bp, Homo sapiens
aggatgagccaggtctgcccaggaaggcagacttctctgccgttgggaccattgggcgccggagggccaatggctcttttgcgccccaggaaaggagccacaatgtgatagaggtggctacagacgcacctcttcgaaagcctggaggctattttgctgccccggctcagccggatcctgatgatcagtttatcatacccccggagctggaagaggaggtcaaagaaatcatgaagcatcaccaggagcaacagcagcagcagcagccgccaccaccccctcagctccagccgcagctgccgcggcactaccagctggaccagctgccagattattacgacacgccactatgacccagccgagctgtttaacaaataaactaaccacaaaagactgagttgcaagagtctcccaggctcacattaaaccaggggttttactccacatccttcccccagacactgttcccaacctgtcatcgcagctaatctgtaggttctctttctttgggttatttttttaagtaatcaccactttcttctagtgatgctttaccaatatgatttacatttgttaacttctccccctaacatatcagatatgtaaagacaaagaacaaaaggtttaatatattacagagaaacagttaatgataatgtaatattttttaaaatggctttttgttgtttgtttggaaggcagggcaggctgccgttgctaaatgatttaataatattgtaatttctgtatttctttggggggaaaaaggcttttggt

SEQ ID NO: 13251 - DNA, 1683 bp, Homo sapiens
  misc_feature (1)...(1683): n = a,t,c or g
ttttttttttttgtatggaataataatttaatgctcactgtggccctgactgaaagtcaagctcaggcacaattagggccatggctgggctcccaccaatgaggatacaggcaggcaaggaggttggatgtggtggtgtgggatacaggagaagggcaaagggagctcataaatagggcccagcctggctctgggttcaaaggtggaggttccaggatggcacaggctgtgagggctaggcagctgaggaggtagtactcgtattggctcccttctcccagtcctctacagacacgatggtggttttgcagaagaagcagtccttgttgttcatcaggtgctggttgatacaggctttgcaggacttgtggccacagggctggaacacagcagagatggggtgggcatagcagatgggggcagaggtcctcctcactggtgggcagggaggcagctgctgcctgggcagatgcagaggtcaggtgcgcccagcatctgttccacttgggccagctcatcggcactgatataatccgcatagctctgcagggagaagcgcttccggtcaggggctggcagagcagtgccaggtgctgggggctctggctgtcccaggagatagcatattgagcgtagctggaagcagggatctgccaggagcactgatgtggcttgctctctctctgaggctgggccacgcacccaggagctgcaccaggatgcccgtcactgccaccagaatgggatagtggtccacgctctctaggccaggcagccgtagggtgaccacacgatcaaacaggttcctctcagctgtcacccggttcagcacctggtttagcagctgtgcaagacgccgcagcagcatctcagaggtaggccgggtccagtcaaggaatatctcaggcaccagtgtgatagtcatctccaagacacgcagcaggctgaccgagaggtcaaagcaggtggcacataccttgagctgccggctgtccacaaagttccgctccaggcgctcagcagcctgctggatctcttggatcatgccaatgaattcagagaaggcccagttgagctgattgaggacgctgttgaggaagctgggtgccacatcaggaccctgctgtaggaggtccgccatgtgctgctgcagcagggtggaagggcagggcttctggaggctgggcaaattggcgtcctcaagtttggttttcagcagatgtggcagccgtgtatagnggtacccgaagccacagcccctccagagccgcaccaggatccagttggtctgggcccagggccgctgctcatagggcgccaggaggttcctcaccatggcgatacgctgctcctcggggattcgctccacagcccgcagggagtgtgggtagcacacgtagctggccagggcctgcatcagtgagtctcggatgtcagtgcccacaatgcgtgcgtcggcaaagtgtttggcgagaatggcagccaggcgggtcagggtctcttcatagcctgggagctcctccatgctgtgcacgggaccaaagtaattcttgagagcactgtagctgttgatggccacgctcaggtagaactcgggcctcgtgccnnnnnnnnnnnnnnnnnnnnnnnnnnnnnnnnnnnnnnnnnnnnnnnnnnnnnnnnnnnnnnnnnncggtntcaaaa

SEQ ID NO: 13252 - DNA, 1862 bp, Homo sapiens
  misc_feature (1)...(1862): n = a,t,c or g
cgagtacagagcatgccagcgcctcagctaatgggcatgtctcctattcagctgtgagcagagagaacagctcttcccaggatccacagaccagagggcacaaggtgacagcgtcgggactgagaggggagagagactggagctggcaaggacgtgggcctccagagttggacccgaccccaatggatgaagaccccctccaaagagaccagcctccctccctgtgccagacctcaaaacgacgggggcaggtgcaagttcataggtctccaagaccaccctcctttcatttgctagaaggactcactagactcaggaaagctgttaggctcacagttacagtttattacagtaaaaggacagagattaagatcagcaaagggaggaggtgcacagcacacgttccacgacagatgaggcgacggcttccatctgccctctcccagtggagccatataggcagcacctgattctcacagcaacatgtgacaacatgcaagaagtactgccaatactgccaaccagagcagctcactcgagatctttgtgtccagagttttttgtttgtcttgagacagggtctggctctgttggcagactannnnnnnnnnnnnnnnnnnnnnnnnnnnnnnnnnnnnnnnnnnnnnnnnnnnnnnnnnnnnnnnnnnnnnnnnnnnnnnnnnnnnnnnnnnnnnnnnnnnnnnnnnnnnnnnnngctaatctttttattatttgtaaagtcgaggtttccctgtgttgcccggggtgggtcttggaactcttgggcctcccaaagtgctgaattaagcagctcaccatccacacggctgacctcatacatcaagccaataccgtgtggcccaagacccccaccataaatcacatcattagcatgaaccacccagagtggcccaagactcccagatcagctaccaggcaggatattccaagggcttagagatgaatgcccaggagctgaggataaagggcccgatctttctttgggcaaggttaagcctttacttgcatagcagaccacacagaagggtgtgggccaccagagaattttggtaaaaatttggcctctggccttgagcttctaaatctctgtatccgtcagatctctgtggttacaagaaacagccactgaccctggtcaccagaggctgcaattcaggccgcaagcagctgcctgggggggtgtccaaggagcagagaaaactactagatgtgaacttgaagaaggttgtcagctgcagccactttctgccagcatctgcagccactttctgccagcatctgcagccagcaagctgggactggcaggaaataacccacaaaagaagcaaatgcaatttccaacacaagggggaagggatgcagggggaggcagcgctgcagttgctcaggacacgctcctataggaccaagatggatgcgacccaagacccaggaggcccagctgctcagtgcaactgacaagttaaaaaggtctatgatcttgagggcagacagcagaattcctcttataaagaaaactgtttgggaaaatacgttgagggagagaagaccttgggccaagatgctaaatgggaatgcaaagcttgagctgctctgcaagagaaaataagcaggacagaggatttgctctggacagagatggaagagccgggaacagagaagtgtggggaagagataggaaccagcaggatggcaggggcaaagggctcaagggtgaggaggccagtgggaccccacagagttggggagataaaggaacattggttgctttggttggcacgtaagctccttgtctgtctccagcacccagaatctcattaaagcttatttattgtacctcc

SEQ ID NO: 13253 - DNA, 1561 bp, Homo sapiens
ttttgtgctcacaagctctagcgaaaagccgccggtatttctccatctggctctcctctacctccaggcaggctcacccgagatccccgccccgaaccccccctgcacactcggcccagcgctgttgcccccggagcggacgtttctgcagctattctgagcacaccttgacgtcggctgagggagcgggacagggtcagcggcgaaggaggcaggccccgcgcggggatctcggaagccctgcggtgcatcatgaagttccagtacaaggaggaccatccctttgagtatcggaaaaaggaaggagaaaagatccggaagaaatatccggacagggtccccgtgattgtagagaaggctccaaaagccagggtgcctgatctggacaagaggaagtacctagtgccctctgaccttactgttggccagttctacttcttaatccggaagagaatccacctgagacctgaggacgccttattcttctttgtcaacaacaccatccctcccaccagtgctaccatgggccaactgtatgaggacaatcatgaggaagactattttctgtatgtggcctacagtgatgagagtgtctatgggaaatgagtggttggaagcccagcagatgggagcacctggacttgggggtaggggaggggtgtgtgtgcgcgacatggggaaagagggtggctcccaccgcaaggagacagaaggtgaagacatctagaaacattacaccacacacaccgtcatcacattttcacatgctcaattgatattttttgctgcttcctcggcccagggagaaagcatgtcaggacagagctgttggattggctttgatagaggaatggggatgatgtaagtttacagcattcctggggtttaattgttgtgcagtttcatagatgggtcaggaggtggacaagttggggccagagatgatggcagtccagcagcaactccctgtgctcccttctctttgggcagagattctatttttgacatttgcacaagacaggtagggaaaggggacttgtggtagtggaccatacctggggaccaaaagagacccactgtaattgatgcattgtggcccctgatcttccctgtctcacacttcttttctcccatcccggttgcaatctcactcagacatcacagtaccaccccaggggtggcagtagacaacaacccagaaatttagacagggatctcttacctttggaaaataggggttaggcatgaaggtggttgtgattaagaagatggttttgttattaaatagcattaaactggaattgacaagagtgttgagcatccctgtctaacctgctctttctctttggtgccccttatctcaccccttccttggaatttaataagtctcaggcatttccaattgtagactaaaaccactcttagcatctcctctagtattttccatgtatcaggacagaggtggcctatggtaggggaggggggcaagtatgaagtaagggtaattatatactactctcattcagggattcttgctcccatggctggctgtccccccttt

SEQ ID NO: 13254 - DNA, 979 bp, Homo sapiens
gcgcccatccttttagcaccgcgagaggcgccggtgtttcgagccgtggcaccggcatcggctgacactgctgcctccagctagttatttcgtcctcttccgttcttcacccctacactttggaggtgaacttctctcctgagggctgtaaagactagtttgaaaagggagagccaagaaccaactgaattgtctcagaatggaaacactatattatttcagaggagttaatttcagaaggaaaatgggtcaaacttgaaaaaacaacgtacatggatcctactggtaaaactagaacttgggaatcagtgaaacgtacaaccaggaaagagcagactgcggatggtgtcgcggtcatccccgtgctgcagagaacacttcactatgagtgtatcgttctggtgaaacagttccgaccaccaatggggggctactgcatagagttccctgcaggtctcatagatgatggtgaaaccccagaagcagctgctctccgggagcttgaagaagaaactggctacaaaggggacattgccgaatgttctccagcggtctgtatggacccaggcttgtcaaactgtactatacacatcgtgacagtcaccattaacggagatgatgccgaaaacgcaaggccgaagccaaagccaggggatggagagtttgtggaagtcatttctttacccaagaatgacctgctgcagagacttgatgctctggtagctgaagaacatctcacagtggacgccagggtctattcctacgctctagcactgaaacatgcaaatgcaaagccatttgaagtgcccttcttgaaattttaagcccaaatatgacactggccatttttgtaaacgagaccaccaggccttcttcactaagactttgtattcaacttagtttaatgtagatttgccattagctttttcgtaaaataaaagcacagaacagatgtggtggtggtatggaattgtaaaaa

SEQ ID NO: 13255 - DNA, 814 bp, Homo sapiens
gtcttggctggcagacctgtactccgtactccgtacttcgtagtcgcagcggcgcggtcttcggcagtctagtcatccaccgccatcctgggccccacgtgttgcctgaccattcctgagcccaggtgggagccgtggctgaggtgacggtctcaaagtggaagagcttactgtcacagcaactcctttgcaagatgccccggccaggaatagttgctgaacaccccaggcctgctgaggtccctccttgagtctcatgttcaagcagtctttgtccatgaaactgggaggcgaccgtgttagctgccagttcctgacagccacctctcaccagtggcttcactctgtgtccctgacccagcacatggcacaagagtgcctgccatccgtcagtgtttctacagcagcaatcccaagatgctggagctagaggggacctgacctgagagaagataccttcagtggctgccaggctgttccttggaacctgtgcagggatgaggcctgcctgtgttaatacacctagtgaggagtggagctgaatttgaatgcaagccttggcaccttaattgagcaagtttgaaacctcgcttgttgcccttctggaaggagtcaggaatttccagttctgggcctgggctgtgggtctggcagacagacctctggccctaggtttgggtgccaggttctctgcttccagaatgagaagctttgctgtgcaccaggacctgggcccttctggtatctcctgaatgaaaaacaagggatatttaataaatatggatttaaatatgaaaaaaaaaaaaaaaaaaaa

SEQ ID NO: 13256 - DNA, 1992 bp, Homo sapiens
ggcgggcgaggtggtgagttgtgaggcgcgcccagtccctctgttcccgcctggcacttgctctggccgcgcccgccccatctgccacttcggagaggccacggctctgagctgcggccgctagtgccctgatgggccctgtggctggggtcttgcacattcttgggggtgggcctaaggggataggggaagtggaaggggcctcataggaattaaaaagcttaagggaaaaggtgatgcagttagggggtaaaacattgaggatgataaaagaggagacatccgcagctgaaaagtgcgctgcaaaaggcagtgggccgtttggtgtgccggaaacataagaaaccacagtacaaaacaccaattttattataaatatcaagaacctacagggtgtttatgggccagcatatgccttcagttatgttgaaaatagctgatcatctttccgtacattctgaacatttctcagtttcagagtgctggccacaccaaagcatcagccctggctctaaactccgttacagtaaggaattacaaatcctgtgtttgtactccaggaagtctgcattatcacgaggagcttggaaaggaggtaacacactcaaggcaaatttcaagtaactcatcctggaggcagctgcctactctgcagctgtggttctccaccacagagagaagaaaagggagggagatggagtgcgcaggtctgagaaggctttcattctggagcatctgcaggagcctgcaccatggcccagtagcacccctttttctccatgagctgctggtgggttcccccctcccggatagcgcctccttccagaaagaggatgtggtcagcctgctccaccaggctgaggtgctgggtgatgagaagcactgagcgggagtaccgctcagggctttcgtacaggagctgctccacctgtaactggctgtttgcatccagggcacctggtggcatcatccaggataagtacacacggtttccggatcaatgctcgggccaacgccactgcctgtcgctgaccccctgacagctggctcccagcctcgtctacctctgtgtcatagccctgagggagtccagagatgaaactatgggccccagactttactgcagcagctgtgatttcctccatagttggcttctgggtcaggccataggcaatattttcttgaagacttcttccaaatacctgtggctcttgtcccactgcagccacctgcctgtgcaggtagcggtgctcatattggggaaggggcttccccatccaacagcagctgtcccccggtgggctggtacagattctgcagcagggcagccactgtgctcttcccagacccattgggtcccaccagcgccgtcacctcgccagggcgtagggtgaatgtcagcccctgtagcactaagacatctgggcggtttgggtaggcaaaggagacatcttggaactggacaaggccctccaagtgtaagggagtcaacagaccactgggtgggcagcgaggggtgcggtccaggtactcaaatattttctctgaggagcccacagccttctgtactctggggtagatggagagcagtacctccacagcctgggtgaactgcatctggtagagaacaaatgtgacaaggttcccactgcttacagccccactggtcaccagctgcccaccaatgtagaggattcccactttcagcagcatacctgaaatctataaagagaccacaaaaaaagggactgaggtagagaaatctggaggggacacaaagaaccacagtcattaacctgaaggaaatatcaagtccctgtctcctaagtgacatcggcaggctcaataggcagacaggagaatgaaccagagaccccatggagtctgactcaatgcacatcatgcaagtcacagttatcttcaccaccatcaccactatcaccttgtctggggagcattttactcttcacaaaaggctttcattcatgtgac

SEQ ID NO: 13257 - DNA, 671 bp, Homo sapiens
gcccgagcggcagagcgtgatccagttcagcccacccttccccggcgcccaggctcctctctgacacgcctttaggcgaaacatgccccaagacacagggaccgtttctcccctaggagcagcggtggggagcagggccaaggtcccctgaccactgctcagaggagccctaggccctggccgcagtgccttcagcgcccgacccgggcccccacctggtcagccctggcggggcccactcaggacagctgggggccggggcgtggcagggccctctctgtgcctctcctcccaagtaggaaggggctccgggtggctgctctgggactgggcacccacaagggctcagtgggcccaaacccttgaaatccgtgaaaccgggtggtcccaagagctagaaactcaggaaaccccaggtgctcagggccccgcgtctcgggggctccgtggggcagacccctgctaatatatgcaattctccctcccccagcccttccctgacccctaagttattgcccgctcacctctcccaggccccaggccgcggagctggcagggtggcgcctgcggtttctatgtatttatagcaagttctgatgtacatatgtaaaggacttttttaaatatatgtgccttttgcctacttccaaaaaaaaaagaaaaaaaaaacc

SEQ ID NO: 13258 - DNA, 588 bp, Homo sapiens
gcgattctgctcaactaatgcccgataaaaaagatctaagctgtttccattttttgttgctgttaccaacgacactgcagtgagcattcttgcagctaaatctgtaaacacatcctcgactgttcctttaccccagcttcttagagatggggtggtgggttaaattgtttgcaaaagtttattttcattgagtgatctttctaaaatggcattttgaccttgttactgtcttgctttaaagcctccatctgacttcctggagcttccggggacggggtccaaaaaataaggccttatcctggcatggaagaccctttagggtctgtcttgggaacttgccagcctcagcccctccccactggtgtttacctgctaggcgcacctcacccccacggggctacctgtttctctcagcaggctccctacttcttaggctttgcgcggccatgccttttcagccagtttctccccggccttaaagagcaggcttgaaatatccctgttggggagcccaaagttagatgggccccacgaaacactgtgttcagaagcccaccgaagccctgaccctggaagtgggatgcctca

SEQ ID NO: 13259 - DNA, 1160 bp, Homo sapiens
ttttttttttttttatattttatcaattttattgaaatattccaaggatcccaaccccatttaaaaataaaaattgtaaagcactccattcaataaaagcacataagtccccctcaataattagtatgacaattcacgatacagctcttactctgggagagtttattttaccctttattccaaaaggcacaaagtcatctgaggcctcagatattaaccccactgcatgttaatgacacaccactgaggtgcagctcaatgtaattattaaagcgttataacacacttccccaagaatttatagattctttctataaataataatttaaaaaatactgcaccttaagaccaatacaggcttaacaaaagacctgaaatttctgcaagggcagttttgtttcttgatagaagtacaacttttgaaagtctattcccagcaaaagaaacactagacccagcttgggccaaagaaacaaaataaaacaagtgatttctaacacgctaaaagagtacattttcatcagctccaaagaaagcagtcctggtcattcagaaggctcctatgatcccaccagtctgcagtcattagaaatatatgctttacaggccacaggctgctctggatttggtttcagacaccagtgaccagaagaagccagttttgcgtgtgaggggtgtgggcccccgctgccttgggcctgctcaccggggtggatggacccccgccggggtcacagcctgctgtcacgtctggactgttggcctcttctgcatctgggctgttgggctctcctgctctctgtccctcagtcacgtcattgtctggctgtcgcggtgctggctgcactctcatttgtgaggataaccccttccttcttcttttctcccaatacctccagccccatcatcctgagataatgaagccgttcattcttgggcacaaaagttcgaatggaggcctttccccgccatccgcataagacgatgggacactgcagagcgtctggattcgcagaatctggttcatacttcagcacgatgcttccctttgccaggtcctttgcttgactgtaggtctcactgctgagttttctaaaaaagggattttcctgggtcaacagtatcttaacatcttccattgatacagtaataattctttg

SEQ ID NO: 13260 - DNA, 1271 bp, Homo sapiens
aaacctcccccatggtaccacaatggtacggaatggaaggatacgtgaaaagaataatccatggcagatagttgaactgcaattatgataaactcaacaggatcaattttatttacatgctgaataaatgaatgaaacatattctctacatccataacttaagtacaatcagttataattacaacactgcagcaatctgagctgccacctgctgggatcggtctaagggaaacgttctgatgttccagaataatgttcttaatactctgcaaaaaatgaaacaaaataaaaacacaacttcacaattccttactgggttacggctggttccaagaatttcttttcttcagctcctgtttttgctgctttccaagagtcaacacacgttggatttacttctgaattgtcaatgaggtaatgtgtgcatcagtgaaataaacagaaaattcattcattcatggcctttgcacagcttttattattaagctatgagcatcctgtttgaggctagttttactagcggctatgtgcacatttgtccgcaataaaagaagtttactcattcccctgtccccttttctaatagaaggttagctttttttgttgtttttttttatttttttgcacatcccttttcactttacagtacatttgactatagtgcacaacatgattccgagtcaaaacagtggcccattgggcactgagcttctgattggtgtagggcagtccaatcagtgctggtgtcactgggttaccccaaccatgtccggccaaaatggcactacccagtggtagtgaaccatctaattaaaaccaaaactcccccagggaaaatgctacactatcagagtcagtcttgagtcagatctttatttggtgctccatccagatatatttttagtgctttctctttacgaggtgagtatgttacacgatgtccagtcttctggagtcgactgctttcttttttcatcagttcatttctttgctcatctgtcaattccattaattcttctgttttatccctataaaatatgaccgcaccatcatcacagatataaagaggccagacattcagggtagaaactttaggattccagtctaaatcctgatgaatatcaaggacagaaatatcacagggaaatgttcctctacccttagcaaattcaatatcatccaaaggaatcccactgatttcactaagcttctctcgcaattcgtccacactactgctttccaatacaacctccctggaagggatccaactc

SEQ ID NO: 13261 - DNA, 2072 bp, Homo sapiens
tttttttttttctgatatgagcatatattattagtctattcaagcacagttttgaagttagcaaacatctaaatcctcacatctcctacaaggtaggtcaaagtatgattcttctcagttgtacaagataaatggctgtataacatgtctagtcatagttaagacaacaattggggacagtgctttggtctgattgccatgccagcatcatattttatctgtgaagggtggcttggttgtggaaaactataaaaactggatgcaaaagtaaaatgcaaccttgtttggtgacgtccagttcctctggaattaggaaaaaccacttgtgtttaagaacaggagtcaaatcaatttttaaggaaacagattctaatacaaaaaccttttctgttgggtctagtaggtctggacaaaacatctccctcttttccttttatattttcctcatcctcttcttgcagcgctggttgaaaacaggggaggaccccatgaggctgtcagtggagtgggaaccatagctgctatctgagtcatcagggctctgaggaatcccagcttcactcatgcctgacataggctcctcgaagacatcactgcccagcacaccatgcccagagacattgccttcttcactttcttgaggctccattttcacatgggccagattccaaagaggagaagcatttacctctgcacttgaagcctgtggtgaagcttcaacctccaggttagatgggaagcgttcgctctgagccccaagcactcccataggcagtgactggtctccagaagcaaggtcagcctccagctcctcactgacaggaaaagtgatgtcgctcacaggttcctccttgatcttcacaggtttagcgtcctctgtggccttctcaggattgacaatcctttcatattcttcagagagttgcttactaatctgtagcatgtaactgtgatagtccttgatgcggtgctgccagaacttctggagggagagcacactgccaatacccacttcatggaatacctgctccatcacatcaggaaaaggagtctgtcccagccgggctcccggtccacagcaaaacgcagcaccttggtaaacttaaggcaatactcatgtgccaacatcagttaggtctccaggacactctcattagcacagtcaaaaccccgccgttggccaggattgtggccactgccctggtagaggagctgccgacaggagtgcccagctgagttcagtcacaggttcccctttcccacgataaaagtcactctctgggtcactgtgccggatctggaatggtgcattgggattcttacaatctaaaggcaggaggtcatcagggagaggaggtgacccagggcacgagggaagaggttcactctcttcagtttttacaccttctgtctgctgctgattctgggcctgagctgtggcaataaggttgcgaagacgtcggttgtgctgaatcaactgaatcgtatggatggtgagactacatggctctgaggggatgtccagcatagtggggggcttcggcttgttggctgagggttggtgcaggggtgggtcatggacttccaccagacggaactcccgtgggagcaaatcgaaggaacttctgttggtctggcttgatgatattggtatctctccccagtatctttgcagattcattgtccatatgtctcttcaagttcaacaaacatttatcaaatgcccaggcattctgtgtcggtcaaagactgataatgtgagatccttgcctttaccgaaaggagcacgaagaacaggcacggagcccaaggaatgcccaagtccctccaggggtttcctcggtcacggtccgccggcgcaggcgccaatcacagggtcctgaggtcgcctgacgttcagggcagccggaagacggggaggtctggacctgaaccgagacaaggaggtaccacactattcactgctgcgtcgcagagcgggctgggcggctgtctggacctcgagaggcctgaggcaaggatcgcgtcagaccccgaaagctggtttgttgattagtgatccctcgttccga

SEQ ID NO: 13262 - DNA, 1107 bp, Homo sapiens
tgctggtggcgttcaagatgtcgaccagaatttccgagtcagtgacggggactggatttgccctgacaaaaaatgtggaaatgtaaactttgctagaagaaccagctgtaatcgatgtggtcgggagaaaacaactgaggccaagatgatgaaagctgggggcactgaaataggaaagacacttgcagaaaagagccgaggcctatttagtgctaatgactggcaatgtaaaacttgcagcaatgtgaattgggccagaagatcagagtgtaatatgtgtaatactccaaagtatgctaaattagaagaaagaacaggatatggtggtggttttaatgaaagagaaaatgttgaatatatagaaagagaagaatctgatggtgaatatgatgagtttggacgtaaaaagaaaaaatacagagggaaagcagttggtcctgcatctatattaaaggaagttgaagataaagaatcagagggagaagaagaggatgaggatgaagatctttctaaatataagttagatgaggatgaggatgaagatgacgctgatctctcaaaatataatcttgatgccagtgaagaagaagatagtaataaaatgaactctaatagacgaagtcgctcaaagtctcgatcttcacattcacgatcttcatcacgctcatcctccccctcaagttcaaggtctaggtccaggtcccgttcaagaagttcttccagttcgcagtcaagatctcgttccagttccagagaacgttcgagatctcgtgggtcgaaatcaagatccagctccaggtcccacaggggctcttcttccccacgaaaaagatcttattcaagttcatcatcttctcctgagaggaacagaaagagaagtcgttctagatcttcttcatctggtgatcgcaaaaaaagacgaacaagatcacggtcacccgaaagccaggtgattggtgaaaacactaaacaaccctgagcccagggccaacccctacggaacaccactactttacccagacgccacaggtcatcatctggatcatcccattctggttcccgttcaagttcaaaaaagaaataatgtattaaaatttacatcttaaa

SEQ ID NO: 13263 - DNA, 680 bp, Homo sapiens
tttttttttttttttatggctaaatccatttattccgaaataaaaagcaaaataaacaggagtcgcatcaccagggcgccacgaccccatccccgcctccttcctctgtcctatgctatcaataaataagtttcccagccccaaataattattagaacctcctccccatgtgccagctccaacctctgctaggtatgatacagggggcggccctacccctggaatatacaaaatgttacacagatacaatatgtacactggggaagcagggccaccccagcagcccgtgccctcgcctggtctacagttagccccactgtcctgcctcagctgcctctctgtgtaagaagatgggagcccccctgagggaaaaattgctttggtgagagtaaggaggccatgaggcctcttccaaagaggccaattatatgagcctctggtaattaaataacaatcatcatcatccagaaatttaaggagtcagccctggccaaggtggctaagggtctacacatttgtctccccccattagacaggggtcttatttgctactgtaagagtaaagggatgactgggaaggggtggcaggcacatgatgggggcggcgccggccccacttctccaggctttgctgacagtggcctgctttttaaaatttttatcctgactttctttaatcc

SEQ ID NO: 13264 - DNA, 130 bp, Homo sapiens
gcaatctgtgtccctgggaagcccaaatagggcgagaccttttgccaagtggtctccaagtgtcacgtcatcgaatccttctcccgggcttgtgccatagtctttccactttagagaggaggaaacggag

SEQ ID NO: 13265 - DNA, 443 bp, Homo sapiens
gggcaggagggtggattgttggtctcagtcagtggtgggacagaccagagctccgaacacttcagttttaaaactagttgtgagtttccaattctgttaatgtcttttttggtccttgtttctgctaaatgaatacatcccctccccttggaacttaatatcaataaataacaagcacagaaatatgcaaaaggaccaggtctacttgaagaatttgtgaggattaaatggtttatgagtagaggagggtcagtcagtaagtattggctacctcatgtgtgtccccattactaaccttgggtttaggacttatctattttttgtgtagtcttcctgttcataaaaattctgtgtaagggaccccatgctagtatcagtgaagattgtgaatccaggtgtgtctgactctacaatagttcttcacaagcattatatttcactgg

SEQ ID NO: 13266 - DNA, 1106 bp, Homo sapiens
gggcggcgctgggggtgctggagtccgacctgccaagtgccgtgacacttctgaaaaatctccaggagcaagtgatggctgtaactgcacaagtgaaatcactgacacaaaaagttcaagctggtgccctatcctacagaaaagggtctcagcttcttggaagtgaaagaccagctgctgctcatgtaccttatggatttgacccacctcattctggacaaagcctcaggaggatctcttcagggacatgatgcagttttgagactggtagagattcgaacggttttggaaaagcttcgtcccttggaccaaaagctgaagtatcaaattgacaagctgatcaagactgcagtgacaggcagccttagtgagaatgacccacttcgttttaagcctcatcccagcaatatgatgagcaagttgagctctgaggatgaggaggaagatgaagcagaagatgaccagtctgaggcttcagggaagaaatctgtgaagggagtgtctaagaaatatgttcctccacgcttggttccagtacattatgatgaaacagaagctgagcgggagaagaagcgtctagaacgagccaagagacgggcattgagcagctctgtcattcgtgaacttaaggagcagtactcagatgctccagaggaaatccgtgatgctcggcatccccatgttacccgccagagtcaggaggaccaacacaggattaactatgaggagagcatgatggtgcgtttgagcgtcagtaagcgagagaaaggacggcgaaaacgagcaaatgtcatgagctcacaacttcattcccttacacacttcagtgacatcagtgctttgacagggggaactgttcatcttgatgaggatcagaatcctattaagaagcggaagaagatacctcagaaaggtcggaagaaaaaaggttttcggaggcggcggtgattatgggtgtacatatttgtatattttttgtcatcctgagatacttctaatttcattgtatataggtggttttccctggaattcattaattgtttgctttggacatgtggaaagagccttactaataaaattgattttacttatgaattaaaaaaaaa

SEQ ID NO: 13267 - DNA, 1126 bp, Homo sapiens
ttttttacaaaaccaaaaaaccaaaaatattttattgctgagtcatcctggggttccataaaggaccccaagccttgcttggagtctatagctttgctaggactcccatgacatcaggatagagattgaggcacggggtcctttgggttccgattaaggaactatctactctgattctgttgatcttattagtccctccaggtcacctctacttcatctgtccgatacctctgtgtaaccccagaatcactgagtggggtcctgtgtccaggcccgaaacatctcccagccagcctgggctatcatcgctccattgtcaatacagaatctctcatctgtaagcaaaaagccgggctccacgttcctggcacattgttgccatcatctcctgtagcctcacattacctacaatgaggcagggaacaggattagcttagttttagccatctcttcatggtccagcagaacacgtcatgtgcactcacttagaacaatgacataggggattaggggcaaggattgggaagcctactccaaacgcttaatgatttagagtaccaggaggaagacgcatagtgttaagaataggaaagaggaacacttttcaataatacatacaccccactcctcccacaatgagggcctcctgggagccacaatgtgccatggctcgctctgtgatctctaccagcattgcaaacacagtttcctgtcagggacagataaggagaaaatattagaggggcatccccagattagttctgctctacaatataaaaccttcagccccaactttctgtcccagttttttactgcattacctgcagggagaaacacagatcctcaggagtacactcgcctgtggccagcatccgatgggctacatcctcaatgaaagacaggatccctgagaatgagacgtccatcccctttacagtgtatggcagctcaaccagcttcttgcctcgctttgccatctgttcaatgttgtatcctggacttgggtcgttagaaatctagcagaagaaaaaaataaggaaggagggaatggaagaggatgaaatcagatatgcaggaagcataagaagctcatttactatttcctccctccacctccatggcttcc

SEQ ID NO: 13268 - DNA, 1361 bp, Homo sapiens
  misc_feature (1)...(1361): n = a,t,c or g
ttcggggggctgcttttatggggacgacctgacagagggcatggtccgtacaaaaccgggaacaatacatacatatatatattatatacagagatgcggccctcccgacggctgggaaagggtggccgctggcctaagcagcccgaagcggccccgcccacccggttccgccccctccatctgccggggtgaagtgcgcgaccctaggactgagacagccagctccttcaggggatgggggcacatctcccgataggaaggggtggggacaagaaatactgatcgaagtcatggtctatttacaggggacaagaagccaaaacggatgggatgggtggtctgtttttaaaaaatgaacaaaaacccagttagggcaggggcatgaagtggcaaaatgagatggattttgaaaggggaggggacctgggggaggtggtctcacctcccttggtccaagccccaatttggggttaaagtggggaaacagagtcgatttcacttagaaggcaggctgccagcagggcagccctggtctccaaaaagatgagtagtagtaaaattttgccctccagtcaaaacattggaaaaccagtagggggtgggggcgaggctgactccctgcaatgtcagtaggcttccaggcatcgccctgggctgggcagacagggcagcacaggataggacctgactctccagggagaaatgttccccttgcctaagaccagggtcgctgtagccagaccccctttcctccctggcattcccaggcttgaccaggaaacctggaccccagagaggccacataacagttccaagacgaggttatggctatttggcacctggaagaggggaggcacaaggagaaattgagggctgctccccaggcaatggggagctggggaccaggtgtcctgaactctccctttttcccactctcactcccccttttcccgaaggacacatgagaaatcagtgcagggccagggccaggcccagcctccgggctctggggtggactctatccctcccaggacagggaacagggatgggggaggtgttgaggcaacgcccccaccccccaggcgggagggtcagaatgcaacagagacggcacaatgatggggggagagggaagggccgagaaggtagaatctcaagtcaagaggcccaggggccacccaggtgccccatgggcagggagcagcccccagttggcagatgctgggagagccccagccccgttccagtccagagacaaaagctggagtgtgtaaagtctggcagtttgatctgcaggtgcttgtgtccgtcgaccaccaggccaggcctcggcnagcctcggcctctgtgcctcagcccca

SEQ ID NO: 13269 - DNA, 3504 bp, Homo sapiens
gggtcaatttgaagtatcattgaaagatgaagggaagatatcaatatttttatagtaggagggctggccaaagatgttttaaattcattgtgtacatgtgcctgtttcttagtaaaatgcaggtcatatctgtttaaatttttcacaatttctttaaaaatagtggtcagtcagtagtcagatgagagggtggctgaactgaattttggcagttcttggttaatttagaatttcatgtgttcggacttttcctgtatcccttttctgttcatcctagtcaatgtcttatcattgcatacattttctggatgcttgagccatcagatatcagctagctttttaaaatcacctttaagaaagcagtattttctaatagtaaatttataaacatcttatacatcttagctttcatatataggattactatgtattgatttgtaaacattcactgagtttaattttatttccacagggctcacaacaacattaaaccaggatgcttatgttcttaagtctatatttgcatatacattgactcttgatggaaagacttaagaagatcaaggtctcaccatttgtcctcaattcgtgtgaccataagatactgatagcattgagtcttgaaatgatttaataatatgagtgaggatttgctttctccattagagcattaagctaaaactatcaacattttaaaccaaattgccttatttttcttccaaacttcatatatgtctatcaggtaataataggcttgaaaattgatatcctgtggtgctaaagtacagtagaaagagaggagaagtgtatacatgttttattttaaattgtaccgaaggggaatttaaaaaatatgtaactgctgggtttatacattgggctccttactgcttataaatctgtattgtacacatgatgaaatgaagcagaagctgggagtcggcctttcctctagtaaccaccacatggctcagcatctgtgccaaacataggcgctcctagtctggtcagtgccaagaggctaccagaacatggggccaggtggctggtgttgggtgtcccagcctaagagccacctgctgcagttaccatggcatgctgagtttgatgcaccaggtggcagcagcccacccgttattatttcccattggagaccctagccctagggccaggtaaagttagttaatagcattgggatatagtcactgtaatggtgctattaacaaacagtcaacaccattgtattttttaacttcgtgttctgtatctcctcagccatgtatcttaaatatattttgtcatcataatctttatggtgggggcagactttgcacttactgcagtgcaacacttgcactttaattttcctccaactgtctaaaattagagcaaatacattggcaatacagctgcttttgctctgagctacaatcatggcttttcatgttacttaccaagtggtgtttctggttaggaatcacagctgtaaaattgatttcagttcatcacacttcttcatgatgttgcccctaaattttgcacactatattcttgtatattatttcaaataaatggaaaaaaaagttgcttatctctgacgtctactgattgattgattgattgattaatcttggctgaattttatttatgagttctcagaataacaggttcaggagatgagatggaaaacataaggcaaattcctaacactgctaattaggaggctgctgataggattttaaaaattaaaaacaatcttaatagtggaacaagagccatcagaaaataaggacttagattatctactatttatagagaattgctatacaataaaaatttttatttttcacgtggcatttttgttacacggttaaacagcccaaaggtctgcttttaataacatgacaaagtgtaacaaaagccttgctttatttaaagatccagtatgacatacttaaaaaggccatttaaccttgtatcttagcttgggatgtgccagtggttcctcaactttgttgtctattggaatcattttggggattttttttttttttaatagtggtgtctgtcaggctcccactcctagacatgttaattaatgtggagtgcaagttgggcatcaggattttaaaaaaatcccctgggtgattggtatgaatgtgcagccaaatttggaaaccactgagctacatgcttatttagtgaagaaggcagggttgggggaagcagggtaccatgttataacttgatcatatccctttaaaagaagtggggactttgggtttatgtacccataggaggacttggttatggatgggaaagacattttagccttgtacaaaaatctgaaagaggaaaacatctttctggaaaaatcaggtccatggaattgaaaggtggtgataactcaacattttttatgctaaagtataagtgctaaagaggtaaataaacgtcgataggaaataccgaacaatcaattacattcttaaaatagtagatagtagcagtcttttggagtatgtgtttaactgccaactatgaatgggttagcacaaagtggagatgaacaaagatttcatgtcattactgaagagcagacatagccttttgaagcagctgaaccattatgggataaactggtgcaaattctttgccttctctacttctcactgattgaacataagcttccagggctcccctgatgaggaggagcctgtccttttcagatggatggtcatccagccactgagagaagcgtgtgtgggaccactctgccctctggaaaggagatttcagttcagcgggtgctctcgtgaacaaaaactgaataatgatgctgaacggaatcacatcccccaatgcaggactactggctacatgttcacttgcctggaagagcagaggtctgaatgatctcagcatccgataggactttcctaaatcagatactcgtctacagaatggacccacagccaactccatctgtgcaaaatcagcagcaagtcgcattttcccaccttcaccaagaggtcttatgagactggcatggcggataaaaagttcaacagctctttgggcaatagcctcagtgttgtcaaagacaaaatccaagcattcaaagtgtttaaaatagtcactcataactctggcaatgaaaccttgtagctccttcatgtacagagaacaaggaacatcaggttttcctgagctggataatgacccagaaaagtcttcttgatgcatggtgatgattatggcctctatagcatctcccacagaagtgagtaagggttgcacagcattttccataagagcatgaatagccagttctattcaacactgtactgcagatcctttagagctgaaattatagtttgctcagctgccagtgggaatgagctctgactggaaacaacctttgttactgattggtgcaacttatacaatgaattcactactgccacatttcttctctgtccttcagtaagaggcccaatcacc

SEQ ID NO: 13270 - DNA, 1077 bp, Homo sapiens
tttttttttttttttttttcagttggaatcatttttaatatttaaatacaaaaagtgagcactgacttctctttttttaaacacacacacaggtctaacagccaaaatgtgcagaggaaatgagctcctgctgtcttccatagtccccattctgtggctgaagctgcagcctgcctccctcctctcatacatagggattcatagtggccactttacactacaggtgtaatgcattttgtctgtttcacattgtgtgcatgtcctgccccaacaactccattctttaaaaaaaaaaaaaaaaaacagtcgttaatggtcaggggcacatccctcccactggcatcggttcctaccccacaaggggaaagtgagatcttccagttaggagcaatttggtgaaaggagtcgggtgaccagagctggaataaccatctgcatggctgcactctggtatcagagtggagacagaagtaaggatagtgtggagggcacagttgcaagttgagtctttccatgagacaatgtggggataattctccccaccaggtttagatagatcaatgtgccaaagttaaaaaaaaaaaaaaatccaaattatcagcagttcaaacacttgaatttcaaacttatcccactgagacagctcaaacagcaataacaatctagatctttccaggaagtgagggtagagcccctggcattcctcctgagagccctgtgttaggtcctagaagtatctgccgctgctgcagttgctgctgttgctccatttgcaacttctccgtctcaaagacaacgggaagaaccaggatcataaaggaagtggtcccaatccacaaggctgccctggaaaacctgtacattttctgagccacaaagagggaaagatcaaaagtggctccggccgcggaccggaccctctccggaaacatctccgtcaggccccatagtctctccgacagggtctcatctagctcctcatcgtcgtcctcctccagctcctcctcaggcttctccgcgtcgcctttcgggagcaattcgtccggggactggggttcccctgcaccggcagcagcg

SEQ ID NO: 13271 - DNA, 1790 bp, Homo sapiens
aaatcggtccctttattttcttaaaacatttgctctcttttttgtttacagattaaagaagtatggatcaattttagtcagttgataatttcatttaggaaacattgtcttgctcattatagagagttaagactgtgcataaaatactgaagtgcctcttttttattaggctcatatgtttgttcttgcaaagcgagatgcctattgtgattggtgttagatctgtaagaagctgtgttttttccacaagaataatcgacgaccggtttgagagcatctctcgcgttctttttctgtctgcttactgtccttgacaatgtgatcctgcacagtatcaggtgccagttatgcgtccctggaagggttggctcttatcagcaagtcctgcagatatctcttaggataaaagtggtttgaaagaaaaggtatatttttcttttttgtttaaaagtaaaataaaacctccagtttacactgtggcattcccctcacgtaaaaacaaggacaaaaaccctttcctgagttgctcgggcatggcactcctgtgctgtttcatgcatgtggatgttccttccgtttgttcctgtggaataactgagtgtgcctgatggagaacacactgcagtgttatcagtgtctgcatgttttttaatagaacaggtttacttgatctgtcatctgttatggaaaaaacagcaattacttttgcatccatctagctaaatctataatctgtgtcaatcacttatacctatcaatcatccgtatctattcacctgtcctctatgtctgtcttctctcagtctacatccatctagccttctgtcaatcatctacttttttttttaatagaacaagaagtttacttatcaagtcttgaaagggggacatgtttcaattggtgttcaaacaaaaattccagcttgtattagaaccttgaaatggtgaagttgtggaggttttctttgttccataatacagagacaagttcataatttttagtataacagctaagttgacaaattctaagtttcctcaggtaaatagtcgtaactgtccttttccctagagaagtgcttgctgggatagtaaaaacatacaccatttcatgacttctgcaaatactttccagcggaagtcagtgtaggtttgtttttggctaacatggtcttgctgcgcaggaatgtaaacactgtgtttgaaactctggaaatcacgtgtgtggggagatgggggacgcttccccatgttgtggggagctctgtggctgtgatggctgcagttgccgtgcctctgttggaacgccaagtgcctgcaactcacgtcaatcatagaattgtgacgcacagttggcaaaatagttctttatgctatttctcaaaattttgaggacaaacccagattgggattggaatatgcactgtaaatcaaatttttcttatctacaaagactaatgtaaaaatgattttttcttctgtgcctgattaaattaactgtggtttttaatataaatatttattggtgtgctttgggagaaaaattatcttttcttgaaagaacttatcaaagcaaatttattatcttcacaagttaatgggagaatgtggttttgattctgggtgtttgaattgtgtaaacacacagcttccttgtgtgaagagagttgtcctgtgctccttctactgtactttttttattttttaataggaaagtgatgtgccttcagagaagggttcctccttaatgttgaggttttttaaaaataaaaatactgtttttaagctcaaaa

SEQ ID NO: 13272 - DNA, 645 bp, Homo sapiens
gcccttctccttcctctttggctccttttcctctggcttctcccctttcctctgctaagcctggccctcaggccttgcccaaacctgcaagccccaagaagccaccccctggcgagcggaggtgagtgctgtcttgcctgagttgaaaggtgggtgggggagtgacttgaccagagaaggggccctggggtgtgagctccccgctgggtgtctcacgtggccttgggcatctggttgtgggggaggaggcacttgctctcctctccccatgctcgttgcaccctgttctggcgaagggctgcgccatccacagcggcgctcaggccaggaccagggggtccttggtttcttcctctccctccctcaacacatagcctgttcccagggttctagctttgtctccccacttgtatccagaagttcccaggggtgattgtgatggtggttgggactggaggttgtataaggtgttcttggaaggaaggggcaggagttggaattagttggtccctactgtcccccatgaggttgtgaacccctccccccaacttttcatgtttcttaaaggcattttggttttttaaaatctgtacagcaagagcaactttttctgtcaaataaaaatgagaaatgcaggaaaaaaaa

SEQ ID NO: 13273 - DNA, 1249 bp, Homo sapiens
tttttttttttttccaggtgtggatttttattttcacaaaaagacaacaatgtcttccccacatacaagtatttacaaaacccaactgattcacccatctagaacctgggtttttttccacttctcaacatagttgggaacatggaaacattaatacccacacaattcccagagatggaatttatccatcaaacaaacagtgcagattacctaaaagtgcacttacctgcacaactcggtctaagaaccttgtgaaacaaacctcatggccaaggtttcatgaatctatttggtttcataccatgcaaacctgaacaagtgtgctgctacactaaactgaaaatcggttctcattttacaattaaaaaggttctcaacactttagcaactatacagaatatgaaggtttatttcaaaaaagattacatttttttaaaccaggatacacagatgcacttaatgtaacagtaccttctgcaaaaataggttacataatactcagaaatgcaatgaacaatcttattctctaaaaattagacagctaagacttcttaagtgtagacagccttcaaaatggaggctgaaaatgcttggtaaaaagaagtaactctagagccagacaccacagagctaaggctgcaaattaaaccactaccacacagctgcaaactactctttatattcacacagcgttaaacaaaacgacttcaattccatcttttcaaatgtgcctcggtgctgcaagaaaaaaagttgaatgatacacaaaactattaaaagttacaacagaactatttaaacatcttctccaaaattgagaaaagcaatcatgttaaatttttaaaaagaaaagtctgacagaactctcaagcaagtcagaggtcctcttcataagtagtcaagtaaagtttacaggagatttcaataaattatcttaaaaccttggcagagagctcattttcagaatcgtcgcggaggtccacccttaaatggcttaaatccggagccacttcctcttggcatggaattgccactgatttgtacaattctattaattggggatgcgttacttgaatgttgggttatcatgcctgctcctgcccggccgtcacccattcgcctcgtatcatgatagctaggcccttgagagggtggaccatgccactctttccttggtccgcttgtgtcccgtccatggcgttcaaccacatgtcgctcctcaggatagtgctgtgatccacctcctcgg

SEQ ID NO: 13274 - DNA, 645 bp, Homo sapiens
ttttttttttatctttaacaaaggtgtgtttatttccatatattgctcattacatttttcttgccacagttttatctaaagccaggtcaaaatctttctctaaggtatttattaatagtgtatgttcttcagatataaaatccctctggtcaacatgcaacatttgaatatctattggcactgtacctctatgagatatttatgacatttgttaatagtgaacctcaacctcctgaccgcacatccgaagttgggggcgatgtgggggaacatacacaaaattacaaccacattactggtcaagcactttatagctaaaatctattgactttaaaatagcattgtatgtgaattcagagttttaatgtattttgtggatcaaaaggaaagggtcaaaggctaagctgaacacggagggcactaaattagctaataaggcagctagtgcccctgttcttgccccagccctgtcatatcactacatccgattctctcaaatgttataaagaataatgaacttaaaacttcaggggttcctgaaaactggtattaaattaaaagcagagtagtcaaaattctttgcaaatgacttctgtgatagaaaaaaatatttccaacctgcgtcagaggagaattatcttttag

SEQ ID NO: 13275 - DNA, 1563 bp, Homo sapiens
  misc_feature (1)...(1563): n = a,t,c or g
aattcggcacgaggtttcataaggaagagtgttgcctgaggccctagggaatattggggaatagaagggattgaggaaacattaataatagttattcaaaagacccaaatgcttatacttctctctcccttcttctctnnnnnnnnnnnnnnnnnnnnnnnnnnnnnnnnnnnnnnnnnnnattcctcccttacatgctcatttgtgccttaaatgtgccttataggtaaatccaggatgactgaggaatccctcgtcactgggagattttgtatatattcttttattattagattgagttgggtgtggggaaaaatttttttctgaaggctcaaaagtggtttcctaaaagtgagccactatcagatttgcacatcaggagaaaagaaatagggttaccgtccattaggaaaatcccagtttgcaggagtgcaatcacatcaaaaaaacaaccagccagggattaaaggtattataaatcctcatagcggaacatttctcaggggcaaaggaacctgggctcatttgaagattaatgttccatgcctttgtggtcaaacggtcagcacttaacacaggaaaaaactaggtgttgttttgttttgttattttgggacaacataaaattcaggaatgttttatttagccttggtttctagaaggaagggaaataatatttcttgagcatttactagggtgttgcgtgctgtgctaagtaaattttaagtctttcagttttatagatacggaaaacaagggtgactctttaccacaggatgaataaagaactaagtaatatgggaaatgcagcaatttctggactagctgagccgattccttcctgtgagcacactgtaagctttcaagttctctgggcaggaattacagcacctgtcccctgcaatggccctgctgtgtgatgctcatcgcttcccttcgtgctggagcagtcccccaggtgtccatctcctatctttttgttccaatcttctgtgagttccagctagcaggctttacatctggggaaaggaaaaccaggggttttagctctgttctctgctcccatccttcgctcaccagctgagtgagaacatgaactttttgcaccatgtacccatggcttacactacttagaaaatcaccttttcagataaaacagtttatggagttcatagagaacaccagcactctttgacaaaactgtgagtgaccctttttaaacaatgctgagcaggccctgagctataatcaacggtgagctttaatgtctatgctgacagttaggttttgctctcttttgtaacaggttacgtagaccagcagtgtttaaatctaaatacgttgtgagtctgttatctgtcctatcgcgttttttaaatgactttttattctttatcatagctaagtaaataccaaaaaaaaaaaagctttgtaggacacttgtacttagtttgggaaaaaaaaataaattgaaattgttatgcttttgtatttccatntcttgcaaataaatattttttcttaaatagtaagatgttgcccagtctttataatcttggtact

SEQ ID NO: 13276 - DNA, 1737 bp, Homo sapiens
ggtttaacaaattttaactttgtatatttgttatctatcaggctaatttttttatgaaaagaattttactctcctgcttcatttctttgtcttatagtcctccctctttgcaccttcttctcttccctcagtgcctggagctggtactgggcccctggccccatgagcagtttgccttcttgagtcactgcctgtgtagtacatacctgaccgggagtccaaaccaccttggtgctctgaagtccactgactcatcacacctttcttagcctggctcctctcaagggcattctgggcttgtaaacagacataggaagcctctgtttaccctgaagcaccactgtccagcccattggttcccactggcagcatggtagagctgagagaaacaggctctcagggtacctgacttgaggggaatcgtttcatgaagctgaacttcaagcatatttccagtacattctttcagagtctgtttttccatccaaatataagccccaggccattccacttagtgtcttttcaatgataggcaagaatgatatctgagttgaacttcggtgcttctgttgtttgagtttactgtgcctggtggtatattgggcattctttggattgagtgttctgaggtgagagagtcttcccgaggcatcctgtctgtgcttccaaccctgaacaagaccttacatgagagatggactgatggactgcggcaatcctgggctgtcaagtggatagatagttaaaaagcattatactgtgggtaatgaaaagggaggaaaaaaaaagaaggaaaaggaattatagacccccagggtcagccagttaagagctctacccacacctgtcaacccctctctcccccagtttaggttctgagcagtattggacttgtagcctgcagttgtcttttgacttgcaggccgcaggtgtctttctgttatgtgaatgagttccatggaggggcatatgtgtgattccaccgttagatgagcccttggggcaggcagtttgggatgtgctcttgggggaaagttggctgtttccttgcgctctgctcctacccgaaggtttttaagtccctctgaattgctcatctgagattagtagagtagcaggcctgaaggatgatggttttgtcctctttgggttctcacctgcttgagaagtaaaacagtaactttgttcttctgggcccttaagcttttttggttaagtcttccttttcagaagtagatgtcattatatgccaaaagtctagctctttgctttaccatacagggacctgtcccaaagaaaaaggctctttttttagccagcatatttccccttctacccttttactttgttgttctgattttaggactctggctggccatgtgcttgtggttgcctctcctgcatttgccactggatttgcactgcatcgtttggagatacaaagcgagcagttcttggtcagaaccctcctctgcttttcattgtgtttgataatggttactgggtccttctctcaagggtagcaaggccaagctgatggctgcttgtttaggaggccatcagttccttcctgtggagaagggtctgaaatggaagtcagtggtagaaggggctggtctgctgggcagggcttacatccactgagttctaagattcctttcctgatctgcacctacgcctggtctgtatggtggaatttgtcagctggaactcagaaacaacaacttgaaaaaaaaa

SEQ ID NO: 13277 - DNA, 627 bp, Homo sapiens
ggctttccactatggcttccagcactgtcccggtgagcgctgctggctcggctaatgaaactcccgaaataccggacaacgtgggagattggcttcggggcgtctaccgctttgccactgataggaatgacttccggaggaacttgatactaaatttgggactctttgctgcgggagtttggctggccaggaacttgagtgacattgacctcatggcacctcagccaggggtgtagccaagtagttctaatgccacctgtcgtcttatcatctgattgcagacaaatggaatcctgtgctgaacccgaatcttccaaaaaacagcctacaatctgtgaccaccacaagatgtgccctgatggcagctgaagtttgattcagatgggcacttttcttccccttccctgcctagtttccttttgttccttgagtccacgcagaattccattctctggtcagcagacaggcttaagctaaagtattgcctctattctgtaaagttctgtacatagttcccaagcttctgcagggggtgatttttgctcttgtcctgagaaataacagtgctgttttaaaaaacatttgaaataaataccgcacacaaaggcaaaaaatttataatataca

SEQ ID NO: 13278 - DNA, 4797 bp, Homo sapiens
  misc_feature (1)...(4797): n = a,t,c or g
ttttttttttttttttaactacaaaaataagcactttactaacaacaggattctcagggaatgggggctttcagaggtgtcactgggctgcactgttgaggctgtgtgcatcagtggagatgtgagaccgaaagaaattatccaggacttgctggcccatgcggggctttttccgactgcacggagaggacacctgggaccttttggaacccatacaggtccctggctgttggccctgatacacacggaaaacctttttcatggcggtggaaacagctgcggtgtgaaattcctcctgcgtcagccagcgagcacctggtggtacggtggtcactggggtctgcccttccaaggccagcccatatacttgatatgtcagcttgatgtgagagaaggtgtggacaacctccccaaggtgccggaggtgcgtggctgggaggggcccagcccaacgctgtagttcctgcagcagggccttgcgctgaagctgctctgagggctcccaggtcacggacgggaactcccacagtcctgccagcagacctgagttgggcctctgcaccagcagaatttgggccccaagggccccaggctgttccagaacacaggtggcagagctctcctccctggggggcttgcggctggcctttctggggaagttgaccactccccagggtctggtcccagggctccgagggaggcaggcacaggtggcactgtccagtgttgggagcacactcctccacgtcaggactgcccgacaggctccctgaggctaagagctgttcctgctccactctctggcgtgcccggcacaggctctccacagggcactggctgcacagtgggcgctgtggggtacacactgtggcccctagctccatggctgcttggttgaaatctcctggccgggctgggtccaccagctgctgggctagaccccagagctgctgggaaacaagggtgctgctgggatcagcaccaatggctcggacacggcacagcacccgtgctacgttgccatccaccacaccggttgcctggccaaaggcgatagaggcaatggccccagctgtgtagcgccccacgccaggcaggagctgctgcagggtctctgctgtacgtggcatgtggccccctagctcctctaccaccttccgagctccctcctgcagccgccggccacgagaatagtagcccaggccagcccagagttgattcacctcctccagggaagcactggccaggtcctgcagtgtaggccacttctgcatccatccggtatagtagttgatcacagtggcaacctgggtctgctgcagcatgacctctgagacccacacagcatatgcccgcctgtccaggtccatctcatcttctgcccgtcttctccatggtaggtcccgtttctcttggtcgtaccagcttagcaggctccctcggaaggctgtgacttcagctacgtctctgaatagatggtatgaggagacagaggcctgcaataccacctcttccggctgcctggccaggccatcacaggcagaaggcttggcctgactgttgttcttagcatgcttctgcctcccttcctggctggctgcctgcttcctgtgaccacttcccacggctgctcgtggcttcctcatgatggcccacagacgactcaggcgggagacgagcggtgtcatggccgccgacagtgacgatggcgcagtttcagctcccgcagcttccgacggtgagcggcttcccagaggtagccttcaaagcctctgcgctctgggagaggggaaggcctcgggctcatagttctagaggctcctcaagcttcagaggactgctccttccgcctgaactagccacgaggagactacaagttccgttgtacaccgcggctccggctgcaaaagcctggagcgttgggagcatggggctgatggaggcatggcgggagatgtagtctggagctcataacggtggtgtcagcaaaagcacaacatctggggaggagctagtagtccaggttcccgtagtggatgtgcaaagcaacaacttcaaggagatgtggccatccctcctgctagccataaagacagctaatttcgtggctgtggacacggagctgagtgggcttggggacaggaagagtttgctgaaccagtgcattgaggaacgttacaaggccgtgtgttcattgcttgccagggacccgttctatcctttccctggggcctcgcctgcttcaagcggcaccaagacaagggtgaacattcctatctggctcaagtgttcaatctcactctgctgtgcatggaggagtatgtcatagaaccaaagtctgtgcagttcctgatacagcatggcttcaacttcaaccagcagtatgcccaaggcattcccctaccataagggcaatgacaagggtgatgagagccagagccagtcagtacggaccctattcctggagctaatccgagcccgccggcccctgggtgctacacaatggccttatagacttggtgttcctgtaccagaacttctatgcacacctccctgagagtctgggaaccttcaccgctgacctgtgtgagatgttcccagcaggcatttatgacaccaaatatgctgctgagtttcatgcccgtttcgtggcctcctacttagaatatgccttccggaaatggcagtntttttaggtgctgaggattcagcagtgaacaaaacagaccacaaaaccctgctcttatggagcttatatgctagtggaccattaccctcttgcgctgttgcagtgaacgggaaaatgggaagcagcgggcagctggcagcccacaccttaccctggagttctgcaactatccttccagcatgagggaccatattgattaccgctgctgcctgcccccagcaacccaccgtcctcatcccaccagcatctgtgacaacttctcggcttatggctggtgccccctgggaccacagtgtcctcagtctcacgatattgaccttatcattgacactgatgaggctgcggcagaggacaagcggcgacggcgacgacgtagggaaaaacggaagagggctttattgaacctaccggggacacagacctctggggaagctaaggatggtcctcccaagaagcaggtctgtggggatagcatcaagcctgaagaaaccgagcaggaggtggctgccgatgaaactaggaacctgcctcactccaagcaaggcaacaaaaatgacttagagatggggattaaggcagcaaggcctgaaatagctgatagagctacctcagaagtgccagggagccaagccagtcctaacccagtgcctgggggatggattgcaccgggctggttttgatgcctttatgacaggttatgtgatggcctatgtggaagtgagccagggaccgcagccctgcagctctggaccctgggctccctgaatgccacaataaggtatatttgagtggcaaagctgtacccctcacagtggccaagagccagttctctcgttcctccaaagcccacaatcagaagatgaagctcacttggggcagtagctgatgcaacttccaccttgctctcaggtggaacagaggtattttgggtctctctagcctgaaatgtcatcctcaactgctactgagtttaggggagggggaatgtcttgacagacatcactgcattgccctggaccgcctcctttatcccagtgtttgaggtacaagtaagaaggctgaccagcacctgtaacactgactttatttttaagtctgaaaatgtcttgggaaagttttacaaaaaaaaaaaatcaacagaagcaagttatgaaaatatttgaccagcttcatctttggttatttcttattgcagctctgtaaggacagactgttcccaaagctccagccatggcaggaagggaagcaaatcagtccctgtataaaccatttaaccaattgaatgtatcacatgttgataaatacatagaagcaggccctagggccctacaaaaccagccccactcccaaccacaaggttgaaagtcttatggggcagaacattaagactcctttataaatatgaaaatagattaatcaacaggaaaaggtctttgaataggttagctaagagccatgaccaccacgctgccttgctgtccccttgcatagaaatgtagtgacgtggtctgaccatgcagtaagtgcaaacagcaattactcaaatgtcttagaatactggcaagaagcaccccaatattcaggtctgggaaacagccatgaccattacggcctcttgatcagctccatgttccactcagtagcttatatgccccaagaaaaggcaagagacagacctggggtggggaaagaaccggggtaatagctgcctgccagctcagcctagaactagacatcctctggtcctatctggggaagtacactggagagggtctggtgggaggcagacctccttgctggatttcagaggcttggtatcagctgttggccctaactaggaaggcctctcactgctgcctcccgtcatacacagccaatgggcactgggagcccagaagttgagcctggcttgcctagcctgcctgctctgtaggctccagggaagaatcaaggctgtgcacctagggggccatggtttcagctgaaggtccatccccaaggtgaggcagggactaaaccccctcacccatcctgctttccctgggtttgcaggcctatgcctgaggtggagaaggtggctgccccacgcctgggtcatttaaaaagcc

SEQ ID NO: 13279 - DNA, 918 bp, Homo sapiens
cggacgcgtgggcgggatggtgccgctgtgccaggttgaagtattgtattttgcaaaaagtgctgaaataacaggagttcgttcagagaccatttctgtgcctcaagaaataaaagcgttgcagctgtggaaggagatagaaactcgacatcctggattggctgatgttagaaatcagataatatttgctgttcgtcaagaatatgtcgagcttggagatcagctcctcgtgcttcagcctggagacgaaattgccgttatcccccccattagtggaggatagtgcttttgagccatctaggaaagatatggatgaagttgaagagaaatctaaagatgttataaactttactgccgagaaactttcagtagatgaagtctcacagttggtgatttctccgctctgtggtgcaatatccctatttgtagggactacaagaaataactttgaagggaaaaaagtcattagcttagaatatgaagcatatctacccatggcggaaaatgaagtcagaaagatttgtagtgacattaggcagaaatggccagtcaaacacatagcagtgttccatagacttggcttggttccagtgtcagaagccaagcataatcattgctgtgtcctcagcccacagagctggcatctcttgaagctgtgagctatgccattggatactttaaaagccaagggtgcccatatggaaaaaggaaatatacgaagagtcatcaacttggaaaggaaacaaagagtgcttttgggcatccaacagttaatcacttatgtttttagagcatgcaatcttaactttgttaaactattattattgatcacattttgatttttttctctccacatcaggatagtttactgaagcacaatctcttatactagtgggacaaaagggagaaaaaggaagc

SEQ ID NO: 13280 - DNA, 923 bp, Homo sapiens
ccgggcattatgattttttgtactcttgaaatggttatctttgtggatgattttttttttttaagctgaaacttacctcatgaataacttgattaaagtagtaggtgattaaaatttcaatagaatcaaatgagacaaaaattttaaactgactcatttgagtttcaactttacagtcattgaccataaagcacactaaaaatgtaagttatttttaaatacatctgaaataaaaatacttactaaaaaggaagaagccgaagatgtatatttagaccagcacacaattttgatttcaattagccttattctaatatttagcttttagatctttcatacacattttcacgtactttgcaattgagaccagaaagacttgtaggtctttctgcagaatgagtgggtccttgcaaagtgagtgggaaacttactcctagatcagaaatgtttgcctctctgagtaaaatgtttctttcagatgagccatagagggggcaccttttactcaacttttctttgttttgaaactttgtttcccatactgttttcagccttttgtttataattagaaattgtgagaagcttcatttagtgtttaaaaatgtggggagataaatcagacttaacatgtatgtaagatcaattcacttaaaagtatggtccaaatagcaaaaataggaccaggtgaaacatgtagtcattttttaaaaacatgtacttggtcttttgtgtgtgtctgttttattccattagaataaatgtgtccttgatgtaaatgcaaagcatttcttcctgattaaattgtagatgtagactttacaatataattcaataataaaaagtaattaacctctagttttgtcgttgcaataaatggttttcagatagcaaaatgtcgagctgccgcgaatttagtagtagta

SEQ ID NO: 13281 - DNA, 697 bp, Homo sapiens
tttttttttatcttttgagactgaacctttattttctgaaaaacaggtatttcatacaatctttgccatgttaatgcaaatatgcacaaagtaggcatgtatttgttttccaaaagatgcattatgaacattttcaggaagctggtgtgatttattcaacttttaaatacaatcacaaaattatatccatcaggaggcattacaaccttttgtacagaaaagccactatttatacattgttactaagacaaggaagattcagttcaactcaacttgctcttagaataagggtaaaaagtaaattaacaagtaagtgaagtatgatgttgttgccactgacattacaggtggaaatataagggaaatttaaaccagaaaaatgacacaataactttaaagaggagctgaaactttgtcaaaaaaagaaagaactattagcctgttttcaaagaaaaacattctaaaagtgtgcatttcagaacatagaattcttctaagtttaccatcttcaaaaatcttctaaattgtatgacacttttacattagcacaacaaacagctttttctaagtctagccaagttcccatggaaggcaaacgaccctaagtagttcatattttacagcccttgaacttataaagcttttctcattaagagtcagtttttcccttctgtaaataaggatggtgatactgtta

SEQ ID NO: 13282 - DNA, 1263 bp, Homo sapiens
agaacttaaagaaattcagatatgtgaagttgatttccatggaaacctcgtcatcctctgatgacagttgtgacagctttgcttctgataattttgcaaacacgaggctgcagtcagttcgggaaggctgtaggacccgcagccagtgcaggcactctggacctcttcagggtggcgatgaagtttccagcgcggagtaccaggggagcaaccaacaaaaaagcagagtccccccagccccccagagaattctgtgactgattccaactccgattcagaagatgaaagtggaatgaattttttggagaaaagggctttaaatataaagcaaaacaaagcaatgcttgcaaaactcatgtctgaattagaaagcttccctggctcgttccgtggaagacatcccctcccaggctccgactcacaatcaaggagaccgcgaaggcgtacattcccgggtgttgcttccaggagaaaccctgaacggagagctcgtcctcttaccaggtcaaggtcccggatcctcgggtcccttgacgctctacccatggaggaggaggaggaagaggataagtacatgttggtgagaaagaggaagaccgtggatggctacatgaatgaagatgacctgcccagaagccgtcgctccagatcatccgtgacccttccgcatataattcgcccagtggaagaaattacagaggaggagttggagaacgtctgcagcaattctcgagagaagatatataaccgttcactgggctctacttgtcatcaatgccgtcagaagactattgataccaaaacaaactgcagaaaccccagactgctggggccgttcgaggccagttctgtggcccctgccttcgaaaccgttatggtgaagaggtcagggatgctctgctggatccgaactggcattgccgccttgtcgaggaatctgcaactgcagtttctgccggcagcgagatggacggtgtgcgactggggtccttgtgtatttagccaaatatcatggctttgggaatgtgcatgcctacttgaaaagcctgaaacaggaatttgaaatgcaagcataatatctggaaaatttgctgcctgccttctacttctcaaatctttcttgtaaaagtttccaattttttcactgaaacctgagttaaaaatcttgatgatcagcctgtttcataagaaactccaatcaagttaatcttagcagacatgtgtttctggagcatcacagaaggtatattgctagttacactt

SEQ ID NO: 13283 - DNA, 434 bp, Homo sapiens
  misc_feature (1)...(434): n = a,t,c or g
gccaaaacacatcaaacctgaccctgctctacctacattggattgcttactaacaaatttagggtcagccctatagttgtataggtttactggaagacttagtttcttccttttaatctcgacccaggtggcttggtgtagagaataacttattaggatactgtaaccagacacagatttggctgctcatagctgaaaagccagacatgagaggcgagggttggtggaaggaaaagcaggtttaactggagagccagcaaacctggaagatagtgaactagctgtctcaagtgccatcttaaattttaaaatttatcatagagtttttaaagggaaatttggtataggagacatgggggagtggtgcaggatgtggggtctggtgtctttgttcanatggctagccttgcgtaattctctctggaggctgcttg

SEQ ID NO: 13284 - DNA, 1427 bp, Homo sapiens
ggggcggactggagggggtggttcggcgtgggggccgttggctccagacaaataaacatggagtccatcttccacgagaaacaagaaggctcactttgtgctcaacattgcctgaataacttattgcaaggagaatattttagccctgtggaattatcctcaattgcacatcagctggatgaggaggagaggatgagaatggcagaaggaggagttactagtgaagattatcgcacgtttttacagcagccttctggaaatatggatgacagtggttttttctctattcaggttataagcaatgccttgaaagtttggggtttagaactaatcctgttcaacagtccagagtatcagaggctcaggatcgatcctataaatgaaagatcatttatatgcaattataaggaacactggtttacagttagaaaattaggaaaacagtggtttaacttgaattctctcttgacgggtccagaattaatatcagatacatatcttgcacttttcttggctcaattacaacaggaaggttattctatatttgtcgttaagggtgatctgccagattgcgaagctgaccaactcctgcagatgattagggtccaacagatgcatcgaccaaaacttattggagaagaattagcacaactaaaagagcaaagagtccataaaacagacctggaacgaatgttagaagcaaatgatggctcaggaatgttagacgaagatgaggaggatttgcagagggctctggcactaagtcgccaagaaattgacatggaagatgaggaagcagatctccgcagggctattcagcctaagtatgcaaggtagttccagaaacatatctcaagatatgacacagacatcaggtacaaatcttacttcagaagagcttcggaagagacgagaagcctactttgaaaaacagcagcaaaagcagcaacagcagcagcagcagcagcagcagcagcagcagcagcagcagcagcagcagcagcagcagcagcagcagcagcagcagcagcagcagcgggacctatcaggacagagttcacatccatgtgaaaggccagccaccagttcaggagcacttgggagtgatctaggtgatgctatgagtgaagaagacatgcttcaggcagctgtgaccatgtctttagaaactgtcagaaatgatttgaaaacagaaggaaaaaaataatacctttaaaaaataatttagatattcatactttccaacattatcctgtgtgattacagcatagggtccactttggtaatgtgtcaaagagatgaggaaataagacttttagcggtttgcaaacaaaatgatgggaaagtggaacaatgcgtctgttgtaggactaaataatgatcttccaaatattagccaaagaggcattcagcaattaaagacattt

SEQ ID NO: 13285 - DNA, 1106 bp, Homo sapiens
aagtattttaggtaggtatcaccatttaggttgggtagaagtaattcttaaatcttaagaagcaatcatagatatgtgaaagccaatagtcattactagggatcatgattcggaaaaacagcctctcttcaatgatcctgaatgagccctttgaattcctctcctgcaactgatcaccccatgggtagtggtgagggatgggtgacaggaagggaccctaacccaaagtagttcagagcgggtgagttttaggagcatttcggtaccaaacacagcttcacgattgagaatcatcagtcatccccagctttctatttcatttgctaacctctctaggaacaactggatgttgtaaatgtttctcatctggccttaaaatccatgaaagctggaaaatcacaaggcatctgtgcatatactggtggattttaatgagagtcctgtgtttggagcaccagaaataaaccagcttcagaagcaaagatctgaacgtctatgacactctttcgagctgacacagtgaagaacatagaaggagaactcacccagtctgccagggtcacagaatgatcatactcaagatcttcctggggagtcaatggcaaatttcactgggctattttacagatgaagaaggaacataaagaaggttctgggaccccgaagtccacggaacacccaccattacctgatctttggagcttgtcatttggccagtggaccctaataaacgtccacggggatgtggggatagaatgccggagcctggctcgctagggcatccaggttcttccttcctctttgccctgctgtctccaggcaccaagaatctcctacagttccccaaagatgaaccccccattatctcaggtcactctgtttcccccgatctttaccaaattcctgactcagagttcctcccatttgcttctgactctcattttattcttacctctcattttattcttatgatgtttaccatttctcttctcctcagtgtccctctctgagtggtaagagtatgttaataagccagtgctgagaccggagcacgaggcaactgctcaatgttggtcattgtcactgttattaaatgtaacttaagg

SEQ ID NO: 13286 - DNA, 871 bp, Homo sapiens
gcggcgattccgagccgacccccggctgcagcggccctgggtccgggcggtgttcgcggctttggcgacggcggtggagctccttcgtgggcccctgaggacgcctggatgggcacctcaccctaagtatctagaaatgatggaattagatataggagatgccacccaagtttatgtagcgttcttggtttacctggacctcatggaaagcaaaagctggcatgaagtaaactgtgtaggattaccagaactccagctcatctgccttgttggtactgagatagaaggggaggggttacagactgtggtgcctacccccatcactgcttccctcagccataacaggatatttctcttagaagatgacatccatgtttcctgatgcttgttttattcatacaagattggatttgagacccatcagactgcttcatcttttatctcagaaatagggttgacgtacatagtgagggttgacttccccattccataaggttttcattctgaagagtaaaacttccccaggtagaagactttctccttcttaaaaaatatagggtgatttctttaaaactttgttatctagagacagtttaattacagttatatacaggtttatgcctaggatgtattcagatgggtgggacctgtgtgctgcttttgtcatcccacactcaaagttgtctctttgtttcttgctgccactgccagctcattgttgagactgccatttctttctcttactcagctctccccagtgccttttggccactgcagctaccgtagaatggcattttatatgtaccttgtcacccacttctgtttactttttcctctccagtaaaaagtaaaagatttctttcaattggtc

SEQ ID NO: 13287 - DNA, 938 bp, Homo sapiens
ggatatgacctagcccttttaggtaagcgtactggtatgttagtaacgtgtacaaagtttaggttcagaccccgggagtcttgggcacgtgggtctcgggtcactggttttgactttagggctttgttacagatgtgtgaccaaggggaaaatgtgcatgacaacactagaggtatgggcgaagccagaaagaagggaagttttggctgaagtaggagtcttggtgagattttgctctgatgcatggtgtgaactttctgagcctcttgtttttcctcagctgactccatattttcctacttgtggcagcgactgcatccgacataaaggaacagttgtgctctgcccacaaacaggcgtccctttccctctggataacaacaaaagcaagccgggaggctggctgcctctcctcctgctgtctctgctggtggccacatgggtgctggtggcagggatctatctaatgtggaggcacgaaaggatcaagaagacttccttttctaccaccacactactgccccccattaaggttcttgtggtttacccatctgaaatatgtttccatcacacaatttgttacttcactgaatttcttcaaaaccattgcagaagtgagggcatccttgaaaagtggcagaaaaagaaaatagcagagatgggtccagtgcagtggcttgccactcaaaagaaggcagcagacaaagtcgtcttccttctttccaatgacgtcaacagtgtgtgcgatggtacctgtggcaagagcgagggcagtcccagtgagaactctcaagacctcttcccccttgcctttaaccttttctgcagtgatctaagaagccagattcatctgcacaaatacgtggtggtctactttagagagattgatacaaaagacgattacaatgctctcagtgtctgccccccaggtgccgaat

SEQ ID NO: 13288 - DNA, 1071 bp, Homo sapiens
gcagaaatcatatctcattatacatcaaagaactcatacagaagaaaaaccctataaatgtaatgaatgtggcaaagcttcagagaaaagtcaaagcctcattatacatcagagaattcatacaggagagaaaccttatgaatgtcctgtgtgttggaaagcttttagccagaagtcacagctcataatacatcagagaacgcacacgggagagaaaccctatgcatgcactgagtgtggcaaagcttccgagaaaagtcaaacattcactgtacatcaaagaactcatactggagagaaaccctataaatgtacagaatgtgggaaagcctttacccaaaaatcaaaccttattgtacatcagcgaaccctagcagggaaagaaagccatggaagaggccacactcggaatcaaagttcatggcacattagagagctaatcagcagtatctattatggacactgaaagaaagttgtgtcaattttactcacattttaaaagtatattttgacttgtggtttaaatatgggagtaaattcagcctttcttcttttcatctcagtcataacccaaaagctacgggagaaaaagcagaagtgtaatctctgtatctgacaaaattagggagacagctggcaaccctaatgagagggctgccacaggcagaggaaatgaagcactggtgcaggagatttcagagtgagagtgctcaaggctgcaggtgcaagacagcactggtaaggactcttagctgaggttcgggatataccccgaggcgcggaaccatagatataacagtggtaacagtgcgtgggcaggtaggaggtaggatgtttcctagaccatttggggtctgaggagaaacaggctggggcctcgagaaggagtcactcagacaagccatatttttagaaagtagtctactgatgggagcaacagttatggcatgctgggggaagagaagggacttttccttgtgaagagccctacagctgcccctattttctgacttgggagaagtaaagtcagaaagaacgaacaagctgtggggggaaaaaatctcagttgtc

SEQ ID NO: 13289 - DNA, 722 bp, Homo sapiens
  misc_feature (1)...(722): n = a,t,c or g
ggactgatgacatggattcatacacaaacgtatatcgtatgttctccaaagagcctcaaaaatcagaagaagttttgaaaaattgtgagatcgtaaactggaaacagagactccaaatccaaggtcttcaagaaagtttaggtgaggggataagagtggctacattttcaaagtcagtgaaagtagagcattcgagagcactcctcttggttacggaagatattctgaagctcaatgcctccagtaaaagcaagcttggaagctgggctgagacaggccacccagatgatgaatttgaaagtgaaactcccaacttttaagtatgccccagctgggatgtctcttattctggggcttgttaaatgacaactggaagcgagggaagaatgagaggagcctgcattacatcaagcgctgcatagaagacctgccagcagcctgtatgctcggcccagaggagatcccggtctcatgggtaaccatgggacccttcttgtgaagtaggaatggcctacagcatggaaaaataccgaagancaggcaacatgggcacgagtgatggtgcgatacatggaaatatctgcgtcagaaggaatatttccatttttacatctctgtgttgggaaggaaantgaaggantccccgcagatttgtggggggcagttttggtttcttttgaggcctnctgttgagttggcaccantgganttgcttacccaca

SEQ ID NO: 13290 - DNA, 3757 bp, Homo sapiens
gaattcgtgggtcgtgctgcgtcgacaacggtagtgacgcgtattgcctggaggatggcggacgccggcattcgccgcgtggttcccagcgacctgtatcccctcgtgctcggcttcctgcgcgataaccaactctcagaggtggccaataagttcgccaaagcgacaggagctacacagcaggatgccaatgcctcttccctcttagacatctatagcttctggctcaagtctgccaaggtcccagagcgaaagttacaggcaaatggaccagtggctaagaaagctaagaagaaggcctcatccagtgacagtgaggacagcagcgaggaggaggaggaagttcaagggcctccagcaaagaaggctgctgtacctgccaagcgagtcggtctgcctcctgggaaggctgcagccaaagcatcagagagtagcagcagtgaagagtccagagatgatgatgatgaggaggaccaaaagaaacagcctgtccagaagggagttaagccccaagccaaggcagccaaagctcctcctaagaaggccaagagctctgattctgattctgactcaagctccgaggatgagccaccaaagaaccagaagccaaagataacacctgtgacagttaaagctcagactaaagcccctcccaaaccagctcgagcagcacctaaaatagccaatggtaaagcagccagtagcagcagtagcaggcagcagcagcagtagcagtgatgactcagaggaggagaaggcagcagccacccccaagaagactgtacctaaaaagcaagttgtggccaaagccccagtgaaagcagctaccacccctacccggaagagttctagcagtgaggattcctccagtgacgaggaagaggagcaaaaaaaacccatgaaaaataaaccaggtccctacagttacgcccccccgccttctgctcccccaccaaagaagtctctgggaacccagcctcccaagaaggctgtggagaagcagcagcctgtggaaagcagtgaagacagcagtgatgagtctgattcaagttctgaagaagagaagaaacccccaactaaggcagtagtctctaaagcaaccactaaaccacctccagcaaagaaagcagcagagagctcttcagacagctcagactctgacagctctgaggatgatgaagctccttctaagccagctggtaccaccaagaattcttcaaataagccagctgtcaccaccaagtcacctgcagtgaagccagctgcagcccccaagcaacctgtgggcggtggccagaagcttctgacgagaaaggctgacagcagctccagcgaggaagagagcagctccagtgaggaggagaagacaaagaagatggtggccaccactaagcccaaggcgactgccaaagcagctctatctctgcctgccaagcaggctcctcagggtagtagggacagcagctctgattcagacagctccagcagtgaggaggaggaagagaagacatctaagtctgcagttaagaagaagccacagaaggtagcaggaggtgcagccccttccaagccagcctctgcaaagaaaggaaaggctgagagcagcaacagttcttcttctgatgactccagtgaggaagaggaagagaagctcaagggcaagggctctccaagaccacaagcccccaaggccaatggcacctctgcactgactgcccagaatggaaaagcagctaagaacagtgaggaggaggaagaagaaaagaaaaaggcggcagtggtagtttccaaatcaggttcattaaagaagcggaagcagaatgaggctgccaaggaggcagagactcctcaggccaagaagataaagcttcagacccctaacacatttccaaaaaggaagaaaggagaaaaaagggcatcatccccattccgaagggtcagggaggaggaaattgaggtggattcacgagttgcggacaactcctttgatgccaagcgaggtgcagccggagactggggagagcgagccaatcaggttttgaagtttcaccaaaggcaagtcctttcggcatgagaaaaccaagaagaagcggggcagctaccggggaggctcaatctcctgtccaggtcaattctattaagtttgacagcgagtgacctgaggccatcttcggtgaagcaagggtgatgatcggagactacttactttctccagtggacctgggaaccctcaggtctctaggtgagggtcttgatgaggacagaagtttagagtaggtcctaagactttacagtgtaacatcctctctggtccttttctgtgttcctagttttgtacagacttgtttttgagtgttgagtagcagggacaaaataagggaatgttattttttaagaaaattcattttcattgttgtctccttccttttctgtgaaagtcctcatactgagaaatttgtatattttatattaaatcacttactattgatttttgttgtgattttcaaaggtggattcccacagataaaatcttggctattgcccaaaacatagtaaagggtcacgtgtgactttttataataggaagaaaattctgcctttgtgagtgcacatgtccacatttcatccctccttccctcaaaaccctagagaggggcattaaagaattgttgatgtatatgcaatgtctgttaagcatgcactatgtatttcatcctcatttattgggtctgggactgaagtttttagccagcatggacctaacctactttttgggataaaattctctgttttgttacaggcaaaattctggtatggcgtgaatgccatgggtcattctgaatatatttttttctgtaattttatcattacacgatgtttgcaatacgtgctttgttttttaatttgaaagcaaacttttctactgttgaaagacattttttgacaacttgacccttcctagtattgagttctaagttgaggactgcatcttctcgttttttacagtatagagaacaaaatgacattagtttgaaaaatacatatcacttggtattgctgtcttggttgcagtggtgatacagaattggtttcattaattcctacatggttgagaatcactgatcaagaaagtggggggaaaaaaaacaaacgttaaaacctcaatcctcagtaggaaggtagattacattaggtgaaattataggtaatctatgtatgtgctaatggggttggaaagaaccttacagagcatattacctgataaactggagtgggtttgggagaacaaactaataggattattgtgtctcctagttggtacctgggagcaattgacatgccccccttcagaaccttaactgttagtagcagtggctgtaacaacacaaaccagtgaccagagataacagcttttaggccaagctggcctgacggtatggctgcaggaagtgactgagcagtagcgggtactcagccagaccaagacggagagggaagagtccacagctttctggaagctaaggcattctggtggtagaaaagtgtgccccaagccttcatggacgagttataggtcttaagattagtctcctcttgtttggattccaatacttgctaaataacctgataataacctggttttccatgtaactgcctctaggaagaaaatgtactgttcatgctgacacagatatttcagtctgcatggtaaaagttctaaatcttactacaaaataataaactggctggtttataa

SEQ ID NO: 13291 - DNA, 1223 bp, Homo sapiens
ctttctttttttcttgcaagctgtgatcggatgcaatctttgtgggacatttaaatggaagggttcattgatgtgtattgcttgccaagccaaaatgttgcctttggggaaaagggagagaggtgttcatggagtgcagggaaaggaggttttggggcagagattttgacttaaaataaccagacttcttctggctgctgaaaagaggcaaaagttttaaattgtcaagtttaaaactatgttcagttatgatttgccacttctgaatattattttggatttcccctttcatgcttattttgttcagaatcctaatgaatagaggttgctggactcagggtaaaagcaggatgaactggagatgggacatacaaggtacttttggaattgccatagattacacctataatcagagtaaatgtcatcaacaaataatcaaaatattttttacatttgctcttctaaaatcagagcctattttaaatataaaagaaagtagatgtgataataatataaactacagtcacattaagttgatattaaattcaaaatctaacatagatttgcactgttgggtgtgtgttccgaatcagtgggttttcccactgatgttgatttcgggagccaggcttcaatgtttaattctattgtaatgtggttatttagcctgaatggttttataaggtggaaaggcaaaaaatttaattccgaagaaaactagtgttttactatgactgtggtaaacatttccaaagcccacctggtgggaaaatacaaagttttaatgctgtgtgtttttttgtttttgtattttctctcatcgacaaaactggcagaaaaaaacgctttcgtatatttttcctgctgggtgggtcagaaggaaaggccgtgaagctaaaggtctcccactgagacgctgttctgcaaggagccgacctcacgtgccgccgccgccagagaagagagcacctgttcatctcggctcactgtgaggctgagctcagcgcctggcaggcgaggggccgcaagcatcccccacagccaccgagagggcatccctgccagggaaatcatatccgacatgcctgtgccccacagcagacttaagactgcctctaaaatgtccatgaagccattgtccagtagagcttgttagttttaacaccagtgaagtattaccttttggttaaaaggatgcatgtgtataggtgtatgtgtgtgcg

SEQ ID NO: 13292 - DNA, 6048 bp, Homo sapiens
  misc_feature (1)...(6048): n = a,t,c or g
gggaggcggtcccgggatttcaagggtctacgcgcttttctatggcgaatgcaacccgacgagggagtgggctgtatcttcagagttgtctccgtctttccaagaacagaacaaaatgaacaaggtagaacagaagtcccaggagtcagtatcatttaaagatgtgactgtgggcttcacccaggaggagtggcagcacctggaccctagtcagagggctctgtatagagatgtgatgctggagaactacagcaaccttgtctcagtggggtattgtgttcacaaaccagaggtgatcttcaggctgcaacaaggagaagagccatggaaacaggaggaagaattcccaagccaaagctttccagaagtctggacagctgatcacctgaaagagaggagccaagaaaaccaatctaaacatttgtgggaagttgtattcatcaataatgaaatgctgactaaggaacaaggtgatgtaataggaataccatttaatgtggatgtaagttcttttccttccagaaaaatgttctgtcagtgtgattcatgtggaatgagtttcaacactgtttcagaattggttatcagtaagataaactatttaggaaaaaagtctgatgaatttaatgcctgtgggaaattgttactcaatattaagcatgatgaaactcatactcaagagaaaaatgaagttttgaaaaataggaacacactgagtcatcatgaggagactttgcagcatgagaagattcaaactttagagcacaattttgaatacagtatatgtcaggaaaccctccttgaaaaggcagtattcaatacacagaagagagagaacgcagaagagaataactgtgattataatgaatttgggagaactttgtgtgatagttcatccctcttgttccatcagatatctccgtcaagggacaatcactatgaatttagtgattgtgagaagttcttatgtgtgaagtccaccctttctaaacctcatggggtatctatgaaacactatgattgtggtgaaagtgggaataatttcaggaggaaattgtgtctgtcacaccttcagaaaggtgataaaggagagaaacactttgaatgtaatgaatgtgggaaagctttctgggagaagtcacatctcactcgacatcagagggtgcacacaggacagaaaccctttcaatgtaatgaatgtgaaaaagctttctgggataagtcaaacctcactaaacatcaaagatcacacacaggggagaaaccttttgaatgcaatgaatgtgggaaagcctttagccataagtcagccctcacattacaccagagaacacatacaggggagaaaccctatcaatgtaatgcgtgtgggaaaactttttgccagaaatctgacctcactaaacatcagagaacacacacagggctgaaaccctatgaatgttatgaatgtggaaaatccttccgtgtgacttcgcaccttaaagtacaccagagaactcacacaggtgagaaaccttttgaatgtcttgagtgtgggaaatcctttagtgaaaagtcaaatcttacacagcatcagagaattcacataggagataaatcttatgaatgtaatgcatgtgggaaaactttctaccacaagtcattactcaccaggcatcagataattcatacagggtggaaaccttatgaatgttatgaatgtgggaaaaccttctgcttgaagtcagacctcacagtacatcagagaacacacacagggcagaaaccctttgcatgtcccgaatgtgggaaattctttagccataagtcaaccctctctcaacattatagaacacacacaggggagaaaccctacgaatgtcatgaatgtggaaaaatcttttacaataaatcatacctaactaaacataatagaacacatacaggggagaaaccctatgaatgtaatgaatgtggaaaagccttctaccagaagtcacaactcactcagcatcagagaattcacataggggagaaaccctataaatgtaatgagtgtggaaaagctttctgccataagtcagctctaattgtacatcagagaacccatacacaagaaaagccctataaatgtaatgaatgtggaaaatctttctgtgtaaaatcaggacttattttccatgagagaaagcacacgggggagaaaccctatgaatgcaatgaatgtgggaaattcttcaggcacaaatcatcactcacagtacatcacagggctcacacaggagagaaatcttgtcaatgtaatgaatgtggaaaaatcttttaccgtaaatcggaacttgctcaacatcagagatcacatacaggggaaaagccctatgaatgtaacacatgcaggaaaactttctctcaaaagtcaaatctcattgtacatcagagaagacatataggagaaaaccttatgaatgaaatggatattagaaatttccagccacaagtcagcctccataatgcctcagagtattcacactgtggagaaagccctgatgacatcctgaatgttcagtaactatccacaaactcaccttatgttactccaaagtaatagtaggggataaacccatagactacaacaattataggacagcttttgttaggaagtgatattctatgtaatatcagatggttaatacgggcataacaccttacagattttttttgaatttgtgaaagtttttggcaaaaatgcaaataaggttatgttagaatttacactgaggagaaaattgtcaatttaagaaatctaaagtgaaaattttgcttagaaataaaatacgacaagttatgttttgagtttgatgccataatagtttttagggcacctaacaataatttatagatgtatattgtggaatgtaaagctttaagaacttaaacaaaggtaataattaaaataacctcacaagaagtttaatgagtagagagaattcccatgtacacttcaccaaacttcctctaaggataatgtataatcatagtatatggtcaagtccaagaaatcgatgttaccttgctggtagatagagacttagtcagattttactatggtttgcatgcactctgtgtgtgtgtgtacgtgtatgtgtgtgtgtgtggttatatcaaacttttacgacttttacatttgagtaaccatcaacacgattagtttacagaactgaaaaggaatctgagatctgtactgtatcaggattacaaaggatttagcctcaagtagttccctttttgtattaataaccacacgctttctgcaaccctatcccttgcatccacttgactatgaagtttttttaaagcacagataaattgaataatcagggcaatagcattaagcacatctgcgaattatccctgaagttcaaaagacttatatatgtataagtggtatgtgatataaatcgtgtgtttcatatgcataatggaatttaacgtaattgtgaataggaagtaggtatcctagtttagtagtggttacattatcaggcccatcccagatgtttgtgatgtcctgaaacaatttaaaaggagacccacagagctaatgtttatccatttaaaaggtataaatcaaaataacaaattatctaaaaaaaatctatcctgtacatgtgaagatctaggctcgcctccatgttactccctttctcttcctacctgtggctcatgccatgccatgaagtgcctagggtacatatgtgaacattccagccttcagcataagtggtagtccaaattttctttaagcagctgctctccaagacagggccctggaaaggcccacacatacagcccagggctgcccagggctgttggactgtcatttcaaggctcattgtccccagacagggatctgggccctcagacttttgagaatatgaagaggagggttgaggctggagcagaaccagaatcaagctggtgtggggcttttattgatagtgtgaagattgtacactatattacatgatcagatcatacaaataatctaagattatacagtctagtgatcctagattacacaagtaatctaagcttccactttaggaaactagaaaaagaagagcaaattaaatccaaagtaacctgaaaaaacattagagtaaaaatcattgaaattgaaaagagaaaatcgataaaacccaaaactggttccttgaaaaggtcagtaaaattgataaacctctagctagcttaagaacaaacagaagacaaatattgctaataccaaaaatgaaagaggccatcacagctaatcctatggtcaccaaaaggattagaaagaaacatggacaactctgtccataaatttgataacttagctaaaatggaccaattccttgcaagacgcattctctcaaagctcacacaagatagacctcaataggcatatgtatctattaaataaaccaaagcagtaattaataaccttccaannnnnnnnnnnnnnnnnnnnnnnnnnnnnnnnnnnnnnnnnnnnnnnnnnnnnnnnnnnnnnnnnnnnnnnnnnnnnnnnnnnnnnnnnnnnnnnnnnnnnnnnnnnnnnnnnnnnnnnnnnnnnnnnnnnnnnnnnnnnnnnnnnnnnnnnnnnnnnnnnnnnnnnnnnnnnnnnnnnnnnnnnnnnnnnnnnnnnnnnnnnnnnnnnnnnnnnnnnnnnnnnnnnnnnnnnnnnnnnnnnnnnnnnnnnnnnnnnnnnnnnnnnnnnnnnnnnnnnnnnnnnnnnnnnnnnnnnnnnnnnnctttccaaaacaaagtgccaggaccagctgggttcactgatgtgtttttgagatacttaaggtagaaatgataccaagtctctaccatctctttcagaaaataaaagcagagataacacttcccaactcattttgtgaggccagtattaccctaatagcaaaaccaggcaaagatattacaagaaaggaaaactacagatcaatatttccattgaacacagatgcagaaatcctcaaaatattagcaaatcaggaatgcaaggcttgttcaacatttgatattcagtgtaatccattgcatgcattagcagctcaaagatgaaatacgatcatatcaataggtacagaaaaagcatttgacaaaatccaatatccattcatgttaaaacctctcaacacagaaggaatacaggagaacttactcaatttgataaagaacatactacaaaaaaccctacatctagcatcatccttgatgtttccaactagacactttcctactaagatcaggaacatggcaaggaacaccacaccactgcttttcagcattgtactggaagtgctatataatgcagtgttaaaaaaaaaagaaataaaatgcacatagatttgaaaggatgaaatacaactttgttcacaagtaacatgattgtctttgtagagaattctaaataacaaaaaccctgctgacattaataagcaattacagcaggattgcaggatacagtcctcaggtagatgataaaaaggaattggacatcaagtcattaaaagacacggagaaaccctaaatgcttattgttaagtgaaaaccaatctgaaaaggctttctattttgtatgattgcaattatatgacattttgggagaggcaaaactattgagccagtgaaaggaccagtggttgctgagagttgaggggaaaggagggatggcaggtagagaggtgatttttaaggcagtgaaagtactctctagggtactgtaatttgtcaaaacgcagagaatggaaaacagtgaacggaaaacacagagtaaaccctaatgtcaactcnnnnnnnnnnnnnnnnnnnnnnnnnnnnnnnnnnnnnnnnnnnnnnnnnnnnnnnnnnnnnnnnnnnnnnnnnnnnnnnnnnnnnngagcctgtggaagatgggaggggaaagggttatatgagaattctctatactttttgctcaactttctgtaaccctaaagctactctaaaaaatgaagtgtatcaagtaaataaataaccaaccaaccaaaa

SEQ ID NO: 13293 - DNA, 687 bp, Homo sapiens
ggagctgcttctctgcgattggttttgcccgagttttatttttgtctgtctcagctagaaagtgggagactttcatttaaaatggaaattggggcgaggggttggcggctgggcgaagggagcattcaaaagcggagaatgtcactttacccgagaaattcactacgatgggccattggtttctgctcggctcgcaggcgcactgcacgagtggagttttagctttaggtttaattggttcgactgccttctccacaatttgggcgagaatttcctttgccttctcagcaaaagttgttctgcggacccgtctgggtcaactttcatgagggacattgagacaaacaaatgaaatatgggttaaagtactctgagcagctacaaaaagaagaccagtctatcctgctggagacagtggccacgtgaagaaagagctcttgcagtatgaaagaccacatggaaagagaggccacatggaaccaacagtcagcatcttggtttcggacacgtgaagaaattcatctcagactgtgtatcctaaatcaggcacttgctgaatctaactacatgagtgagaccagttgacaacacatggagcagacatgagctgttctcagtgagtcctacacaaattcctgactcacaacactgtgagcaataaaatggttgttattttaaaaaaaaaaa

SEQ ID NO: 13294 - DNA, 1348 bp, Homo sapiens
  misc_feature (1)...(1348): n = a,t,c or g
tttttttttttttttttatctttctgaatattttattagggcaaaacaagatatttgcatgggatgcttcttaagtcatctcaagtagttccccttcagttcttaacatgcactctcaaaatcaacacacctaccccaacccaatactcatcgcttcacagtcatccagtaaagtacaaaataaaaataaaaaaatcatcatctggcaaaaaagggaaacagggtaagagagagtgacattttaacacattactaaaatgtttaagcttttatttacacatccccttctctcagtttcccaggttatatgaacattacagcaatagaaaggggttatcatcacagcatccccttgcaaattccagtttacaggtaacttggtcaggggaaaaatatgggtcaacgaagtaagatctcagctctcccataagctattgctctcttcttctctttcccccttctcttaatgttagctgcctgttacagagagggatcatcaagactgtgtggacatgctagctgaattgacagggtgggttccagtgtcctgtgaagaaccagcaaggatgctttttataattccaaccattggcttcacatcactgaggtaacaagacttaatgttaagggtaaagacaccacgccaccctagtcagtgacatgtactccactttccaggaagacctgggccaaatgaccaagctttgcaaaagaaacctgggaagagcgttggaaaaagcagactctgagttggcttgagtctcctcgtgcatagaagcattcactcatccatgcagatggcaacaaggcaggacactcagaaagcataagatcaaggtactgctcttatctgcacctttcattcaagctcccctcaagtgctcccaaaagaacagagctttgggtattgcttcattaagaacacagtaactgcagtttaaaagccattgcattctttagggtcagtttattataacttatcctaccagaaagaatcacagtttaaggccatttatcatgtgcactatgtagtaaacaaaaccttgtccccagctccaccaagccactcccaagggtggactgtgaatgtgacacttccagactcaccagagattagaaaaaacatttctattagggtcttaacctagcccctttggtttcctccctagaaaagagctgcttagaaaacagatgtcactggaaatgacaaaaggaacaacagtattttctatacattaaaagcaaagggatcattggctagcactagcatttattctgtgtgatagggaagccagccctctaatttggctctctggctgggcacatggcaatnnnnaggggcctgggc

SEQ ID NO: 13295 - DNA, 1817 bp, Homo sapiens
  misc_feature (1)...(1817): n = a,t,c or g
cggacgcgtgggtgaaaatcaaacactttactacagttgtgaattagtttaaaccgtacaatgttgttatcatatcatgcttcaactattaaattaagcccatcatatcatagcactaaaaagattgagttaaaaataagatttaaaaaatatatattgattaaaatgtaccactagaaaggtattacatgtgtataagtatgggtaaaaaggcaagtcactagtttgagatgaaaactaaaattttcatggtaaaatgccagcatgtatgtacttgtgtagtgtgtacttctaaacagagaaggcttataaaagtaaatgcatnnnnnnnnnnnnnnnnnnnnnnnnnnnnnnnnnnnnnnnnnnnnnnnnnnnnnnnnnnnnnnnnnnnnnnnnnnnnnnnnnnnnnnnnnnnnnnnnnnnnnnncgagactccatctctataaataaaaaaaaaggaaatgcattaaatagaaggttgatagtttatcataaacctgcggggaagaaactcagactttctatttttgatattttgtgcattaatacattacaaacatgaagatgtttgtaaagttttgttttagtcattttctttgcagtcacatcattgtaccaccttcattattgtatagagctgcttcaattctgagtcctctggacttcccctgcctatctgtttgttgttgttgttgaagacagtaaaataagtgttttcaaatctatatgtctcctttttgttggataatgtttcttctttttaatggtaaatattcttgttcttcaacatttttctttggttcttttttccttttttaggaaaaacaaaacaacagacttcatccttaggttttctcaagatttaagtgaacacatttacacatatcaatttcttaaagaacacaaaatgtttcctccctagcaaaactatttaagagccaattaaactatgaaatagttataaaattatttttaatatttaaggccttgaaattatattccaaggcaaatctaaatgggtgtagttgtatatgcacgatgtaatttaatgctaaagagtacttacagcttgagggaaaagcataaagttttagttaaatagccttcatactgtggattngtcctcccnccnacctaactaatatgtgggaaattaagattacagatgctttgggccccctcaaacagtacattgctacagttcactgtagcaacagatttggtggtgatggggggatagaggtagaagcagatagaaggtaattttaaagttaatttattatgaatcattttcccctaatctgcataaatgaattagaactgattttaataaaaatattctgtgtaaaaagtactcagaaaaacatctaaagctgttggagaagagggactcatataaatagttggattgcgttttgctttttatttctttataaaaatatgtcaaaaacagtttttaattttagaaatcttatacttgaaagaaacctcaattatcagtggctttatgaagtaaagttaaaaacaaacataggaaatgtgaaaatatttgtgtttgttttgtctgactaacttgctgctaaatgctatctttaggtgtgtgaaagttctttgatatgttattgtccttttacatcttgttaaatagccattgcttttgagaatcagatagtgtgttgtttaggggttaattgtgtctatatctttcaaaaacttttatattatgtattataagaagttacagtagtaccattttgattagtctgaatgttttcaggccttgaaataaattttgactaagtgaaaaaaaaaaaaaa

SEQ ID NO: 13296 - DNA, 281 bp, Homo sapiens
gaattcggcacgagcgccgctcttgcatagctgagcgagcccgggtgcgctggtctgtgtggaaggaggaaggcagggagaggtagaaggggtggaggagtcaggaggaataggccggcagcagccctggaaatgatcaggaaggctggggctcccaggcgatctgcatactttaaggaccagatcatgctccatccagccccacccaatggccttttgtgcttgtttcctataaacttcagtattgtaaactagtttttgggtttgcaaaaaaaaataaa

SEQ ID NO: 13297 - DNA, 845 bp, Homo sapiens
ttttttttttttttttttaagaaaggatgtttattcaggcctgatgcctcgatacagctagatgtacaaaaatatatcattcaaagtcatgaaaaccatcatcatattggtgtgacctccttcctccccttgggcacagcttttgcaactacctcctttgaaatctgggagttggtggggcaagggtcacttcttggcagcttcttcttgggcagccaaatctgcctccttctgagcagccagggaagatggctcgttccttctggaaagctgcaagctcttctgaactgaggtccttcaccacgcgaatgcccagagaacgggcagacccgatgatggagcggacaacagacgacaggggtacatcctgcagggcaaatgcctcatcctgagctttgatgcggggcaatctcatacacatgcttcaaggtcaccaggcctgccacctctttccctgtttgccgggcccccttttcaatcccagctgctgccttcaggaagtaggaaacagtgggctgtccaatcttaatttcaaatgtcctgtcaggcttcactaaaatcttggtaggcagaggaatgccttccttgatgtcctttgtcctctcattgaactccttgcaaaactggttgatggaaacgcctctctgacccagcactgggcctagtgggggcccgggcatggccaggcctgcccgcacgatcgcccggattacaccgccgacctcgggcttcctgaggccccgggcggcccggccgagctttgacatgatgcggggctgctggcttcagttcacctcaggggagcagcaagagcgaagctctgggcgccaccatcttggccagag

SEQ ID NO: 13298 - DNA, 403 bp, Homo sapiens
  misc_feature (1)...(403): n = a,t,c or g
ggcacgagggggggccacaggacaaccctgagggtccgactgtcacaggtatgcaaaaactgaattaatcttccttatagtgggaagtcagtaaatgtcaaatttttaaaaccaagaaattgcagtataagcaagttattaatggctaaaagatgaaaaggttacatcttgggagtggaaaatgaagggtggaagggttcgggactacttttttttttaaataaaatgattttatttagttagtttgtaaatgtggaatatagttgggcaaaaacccaaccaaaacagcataaaaccaaaaaatgacagttatatgattgatccatgccccaagttacaacagcatttatttggtaggnntnttanaaacttaattttntgggctggggtgccctgggcttcc

SEQ ID NO: 13299 - DNA, 864 bp, Homo sapiens
  misc_feature (1)...(864): n = a,t,c or g
gggtcatggtttttttgtttatttttaggttaggtcacttaatataggaggatgttttctcatgtacttgctatttgcaagttcaggtttcatttggttctttatgttaaatacgaataagtaacctcaaatcaagctaaatgtaattaagaattttcagcaactatattcaagtgtttgatttttaaattctttctttctttttaataagaaagatgacctaaaaatcagtggtatttgtttgtcctcagaagccgtagttgaagaaagatattagagtatacacagaactggagccatacattgtgctaattttttacattaagtacagaagtctgagccacagcatgaatgcttctgcctgacaggaccacaaagcagcagaagttagggataaatggagatagccatgagtagaactgctgtagggcttcaggaggctacgcagacctgatcaactgcaaagtttccaaagtaaaagattaaaaactttcagacggttcttacctctacccgtgtttcacaaatagcctgaggatccaactatttttaaagcaaattggggccagacgtggtgcctcacgcctgcaatctcaccatttgggagacctaggtggnnnnnnnnnnnnnnnnnnnnnnnnnnnnnnnnnnnnnnnnnnnnnnnnnnatccacccgccttcagccttcccagaagtgctnggatttacaggccgtgcngcccgcggcccagcctacatttataattttcattctcttttacctataaaattcagtgtattagtttcattacataggagaaattatatttctaaacattttatgatgtttaaaaacaaaacaggctgttgtaaaaaaaaaaaaaa

SEQ ID NO: 13300 - DNA, 1126 bp, Homo sapiens
tttttttttgaacactcccacgcgcactttattaagtacggaaggacaggtcacaacaggggtggaggtggcggggaaggcccagcccccacccaccatcactggcacacaataaataaataagtaaatagccaagtgggcacgggagagaggtggtactgaaaacactgaccgcacagggggacacgaaagccccccttcgagctgtggccatcaacgctgtacgggtaccatgaccagggaaagggtggggcttggccacagaagccccagagcatcacaagtctttgtaaaggagaggtgtctttaggacgtggaccactcttatttactgactgaaacctggacccctagctggtcccgtgagacccagattatcaaggggccactgtctctcaggcttctggactgttctactgaggatctaaaagaccactgggtcactatcacttggggtcctgatgggtccacccagggacctaggacatgcgagggtcatcgtcacttaggcttccgattggtccactcgggctccaggacgtgaaagggtcactattacttaggaacctaaactggtaccccacaggacccaacattgatgagtcactatcacttagcctttggattggtccacccaggacaataagggttgtggttccctagacctctggttgacaaggacccaagggccaggacctgaggggcagagagagctctagaagccccagggaagggggagaagactaagtactcagggatagagggaatcttcagcaggcaccagggcccagatttcaaggaggggaggtgacagggaagaaataaggccacctggctgggtcaggccaagatgaatccataggggacccagcttctggggcagcaaagagtgccccagcccactgctgggagggggttgcaagggccctcaaaccttccccgggtcccagccccaccccggtggcagaactggaccaaggagccggttgtgcttaacatggctcgtgacccatcgcctccacctacgggatcagggagtggggaggggtgggcctgtggctgcaggtgcagtgggctcagtcctccaacccctctgtcaagtctgcgatgctctccacatagtaat

SEQ ID NO: 13301 - DNA, 1166 bp, Homo sapiens
  misc_feature (1)...(1166): n = a,t,c or g
ataagagctcaaatttggaggatgacgagatagctgcctctgcctttgccggtgcagtgagagcagcttcaggaatcttatggcctctgaatattttggcatcttcaacctaccgcaactgtgtcaagaatgcctctcttatttctgcattgtccactggacgttttagtcatattcagacaccagttgtttcctccactcccagacttaccacatctgagagaaacctgacatgtgggcatacctcagtgatccttaatagaatggcccccgtgcttccaagtgtcctgaagctgccagtcagatctctaacatacttcagtgcaagaaaaggcaagagaaagaccgtgaaagctgtcatcgataggtttcttcgacttcattgtggcctttgggtgaggagaaaggctggctataagaaaaaattatggaaaaagacacctgcaaggaagaagcgattgagggaatttgtattctgcaataaaacccagagtaaactcttagataaaatgacgacgtccttctggaagaggcgaaactggtacgttgatgatccttatcagaagtatcatgatcgaacaaacctgaaagtatagatcagaagtttcacttgtttctcagttattggatatgtatctttgtgtacatatctttgcaaaaatggataagtacaaaacttgatgtaaattgtaccaatgaatacgtaaacatacagtgacaacattaaacttagaaaagttttaaaacttaatggatcagactttgccagatttggttagggaaacaaatttagaatggtgcattatttttaacaaatggtattggcttaactagttgtttcagttatgctcttttagttgcaaggaatctcaagtgggacaaacataaaaagactcaaaagctacaagttagctcaagcaatgtgacattatttcaaggatatgtgccggggaattcaggaaccacctcaccaaccccatctcccactcagaaatcacctcccagcctcaggaagagtagaaattgggtggtgctcctcagcaggggaaggtggatgtttaggcttgggctctgcatgcatgtgattgcttccttttcattgnnanccaatccccccnnttcnacaantncccnanaannctttgngaaattaaagtncggtcctt

SEQ ID NO: 13302 - DNA, 700 bp, Homo sapiens
ggctcagtgtatcttttaggtcactaaagaggacacatcagtaaataaattgttttcagtgtaatatttttacataaaaatagatttcccccccaaaatttaagatttatttagattcttgagacatctttttatgaaaaggaattaataacatacatcatcaaaacttttcttaggggcgttgaaacaatataaggaggttacagaaggccttctaaaatatgaattcccatctgtatgaggtacttctttccaactcagtgactttttgcccagagacttggaagactgggcaatgttttctttcccctttcccaactcctggagacaaggcccctaggagcaatttcctccagtagggcaggccgtagtcctgctctgtcttacttcccactgcagcaggaacatgtcctcgcctctgattccttctgtaccaagccattggtccattgaggtcaattgaggactcactgtaaattttaaatctgttaataaagcaaggatattggcatgttcctcttctcatcaatatcctaaaagacatttattttttacacactccttgggaaaaattaactttttttcactgaaaatatttccttttttggttatcttgatctcagattattttgtgaaagaattttactgtacttagttcaaaagagtagaaagaatgattttactattgcagacatatgta

SEQ ID NO: 13303 - DNA, 307 bp, Homo sapiens
  misc_feature (1)...(307): n = a,t,c or g
cccagaatgagttatagttaatacaaaaccatacagataaatgatatgaatacatttgtatcaatcagattncccaaaaagcactactgtttcctttgtcccaccctctttataactttaaaaatgtctgtctcaatgtggaatcaataaaaggacaaaatatcccattatgcttattattttggaaatatttgagagattacttttggcggttcacaaatatcttacctaacaaatctgctgaaacatattcttacaattcagattgcattagcattacttcaaaatacagctggctgggtacatg

SEQ ID NO: 13304 - DNA, 584 bp, Homo sapiens
gatcaagtgtatatgcttttattgtttgtgtgcttaaaactggttattttcatgaatgtactttctatggatcgctaaaggtcagaaccagctaagaatgaaaatgagtaccatttatacttactgtcagctgaacacttgcattatttttacctttatggtgtatcttacagaaattagtttttaggtccgtggtttcatacatagcagagcagctccctccctgccatctattcaaagtcagccctggacacagggtttgtccaccccctcgcgcatgcctgggcgtctccgttgccatccgtctctcttacttcctccctctcaaactccctcccaacacccctgggggcctccttccctggtccacgcttgcccaccctctccgggatcccagagcaagtggcgggtatctcgtcgaaaagcgcccgtctccatccgatgcctttccaagctggcggtgctcaggggcatggtgccatgctgggggtggccgaggttgcaggggtgcccatgctttgtgtcccacctctctagttctagtctcctcccccaaccctactaggggcttgtccctggtctgg

SEQ ID NO: 13305 - DNA, 1104 bp, Homo sapiens
tttggcaatatcttttaaaaaatcattattaaacatttattggaaatgttgtatagattcacaagaaagagacaccaaagtgtttgggaattttaatcccaagaagtaaacatcccagagtcagatcccatttgctgttgttcagccatgtttgtatgactgaatgtaatttaggaaatcaggagttagagatgaaaaatacaaacatgtcaaatggttgtaattgctttttttgaacttactggctttaacttaagtaatataggtgtgtagttgttttatctaaagatgtcagattatctgtggccctgttaattaactgcagggaccagagagaggacaaaaatgcctgtataatttgctttaaaggcttgtccttatgtttgtaatttcagttaaatattttctacagattgcttcacttcccctttcccccaataacaagttcatattcttgtaatgtttactttggtcaacgtggtaatttttggaagaaaatgccaaaatgtaagcttctcacaagcagcaaaggaatgtaactgcctgtagctaccacatcaagggagagaagaggcttgcgtactttgggttgatctcactgtacaaaaaaagtgtacccctattggaagaaataaggaatacttgaaggtttctcctttttttacacttgagtcatgtgcaaggttgaaccatatgaaattgccagtgttcaaccattgctgatctgcaaaagcgacaatatcatatgcctcaacctaacacttactcttaaatgcaggttaaaatctctgtgaggcaaagggataatattctctaggaactcacttttgagagtatttttctctaacccatgtggatctaaattttaaaaataggaatgaatctcttaattgcagcttgtggagagtataaaacattttgagcacaatatgcagcacataacttttcagattgtgtttgcatagaaaaggttaaaatcaattctttcagttactgtattgttcatttcttgtaaaggtcttcctacatttgagacgagaccctttaacataggctgccttagtaacaaaataaaacagatgtgtccataataaaaaaaaaaaa

SEQ ID NO: 13306 - DNA, 6057 bp, Homo sapiens
  misc_feature (1)...(6057): n = a,t,c or g
gtctcctctggatcttaactactgagcgcaatgctgagccatggagccgggttggccttgtggatcacactgagcctgctgcagactggactggcggagccagagagatgtaacttcaccctggcggagtccaaggcctccagccattctgtgtctatccagtggagaattttgggctcaccctgtaactttagcctcatctatagcagtgacaccctgggggccgcgttgtgccctacctttcggatagacaacaccacatacggatgtaaccttcaagatttacaagcaggaaccatctataacttcaagattatttctctggatgaagagagaactgtggtcttgcaaacagatcctttacctcctgctaggtttggagtcagtaaagagaagacgacttcaaccggcttgcatgtttggtggactccttcttccggaaaagtcacctcatatgaggtgcaattatttgatgaaaataaccaaaagatacagggggttcaaattcaagaaagtacttcatggaatgaatacacttttttcaatctcactgctggtagtaaatacaatattgccatcacagctgtttctggaggaaaacgttctttttcagtttataccaatggatcaacagtgccatctccagtgaaagatattggtatttccacaaaagccaattctctcctgatttcctggtcccatggttctgggaatgtggaacgataccggctgatgctaatggataaagggatcctagttcatggcggtgttgtggacaaacatgctacttcctatgcttttcacgggctgtcccctggctacctctacaacctcactgttatgactgaggctgcagggctgcaaaactacaggtggaaactagtcaggacagcccccatggaagtctcaaatctgaaggtgacaaatgatggcagtttgacctctctaaaagtcaaatggcaaagacctcctggaaatgtggattcttacaatatcaccctgtctcacaaagggaccatcaaggaatccagagtattagcaccttggattactgaaactcactttaaagagttagtccccggtcgactttatcaagttactgtcagctgtgtctctggtgaactgtctgctcagaagatggcagtgggcagaacatttccagacaaagttgcaaacctggaggcaaacaataatggcaggatgaggtctcttgtagtgagctggtcgccccctgctggagactgggagcagtatcggatcctactcttcaatgattctgtggtgctgctcaacatcactgtgggaaaggaagaaacacagtatgtcatggatgacacggggctcgtaccgggaagacagtatgaggtggaagtcattgttgagagtggaaatttgaagaattctgagcgttgccaaggcaggacagtccccctggctgtcctccagcttcgtgtcaaacatgccaatgaaacctcactgagtatcatgtggcagacccctgtagcagaatgggagaaatacatcatttccctagctgacagagacctcttactgatccacaagtcactctccaaagatgccaaagaattcacttttactgacctggtgcctggacgaaaatacatggctacagtcaccagtattagtggagacttaaaaaattcctcttcagtaaaaggaagaacagtgcctgcccaagtgactgacttgcatgtggccaaccaaggaatgaccagtagtctgtttactaactggacccaggcacaaggagacgtagaattttaccaagtcttactgatccatgaaaatgtggtcattaaaaatgaaagcatctccagtgagaccagcagatacagcttccactctctcaagtccggcagcctgtactccgtggtggtaacaacagtgagtggagggatctcttcccgacaagtggttgtggagggaagaacagtcccttccagtgtgagtggagtaacggtgaacaattccggtcgtaatgactacctcagcgtttcctggctcgtggcgcccggagatgtggataactatgaggtaacattgtctcatgacggcaaggtggttcagtcccttgtcattgccaagtctgtcagagaatgttccttcagctccctcaccccaggccgcctctacaccgtgaccataactacaaggagtggcaagtatgaaaatcactccttcagccaagagcggacagtgcctgacaaagtccagggagtcagtgttagcaactcagccaggagtgactatttaagggtatcctgggtgcatgccactggagactttgatcactatgaagtcaccattaaaaacaaaaacaacttcattcaaactaaaagcattcccaagtcagaaaacgaatgtgtatttgttcagctagtccctggacggttgtacagtgtcactgttactacaaaaagtggacaatatgaagccaatgaacaagggaatgggagaacaattccagagcctgttaaggatctaacattgcgcaacaggagcactgaggacttgcatgtgacttggtcaggagctaatggggatgtcgaccaatatgagatccagctgctcttcaatgacatgaaagtatttcctccttttcaccttgtaaataccgcaaccgagtatcgatttacttccctaacaccaggccgccaatacaaaattcttgtcttgacgattagcggggatgtacagcagtcagccttcattgagggcttcacagttcctagtgctgtcaaaaatattcacatttctcccaatggagcaacagatagcctgacggtgaactggactcctggtgggggagacgttgattcctacacggtgtcggcattcaggcacagtcaaaaggttgactctcagactattcccaagcacgtctttgagcacacgttccacagactggaggccggggagcagtaccagatcatgattgcctcagtcagcgggtccctgaagaatcagataaatgtggttgggcggacagttccagcatctgtccaaggagtaattgcagacaatgcatacagcagttattccttaatagtaagttggcaaaaagctgctggtgtggcagaaagatatgatatcctgcttctaactgaaaatggaatccttctgcgcaacacatcagagccagccaccactaagcaacacaaatttgaagatctaacaccaggcaagaaatacaagatacagatcctaactgtcagtggaggcctctttagcaaggaagcccagactgaaggccgaacagtcccagcagctgtcaccgacctgaggatcacagagaactccaccaggcacctgtccttccgctggaccgcctcagagggggagctcagctggtacaacatctttttgtacaacccagatgggaatctccaggagagagctcaagttgacccactagtccagagcttctctttccagaacttgctacaaggcagaatgtacaagatggtgattgtaactcacagtggggagctgtctaatgagtctttcatatttggtagaacagtcccagcctctgtgagtcatctcagggggtccaatcggaacacgacagacagcctttggttcaactggagtccagcctctggggactttgacttttatgagctgattctctataatcccaatggcacaaagaaggaaaactggaaagacaaggacctgacggagtggcggtttcaaggccttgttcctggaaggaagtacgtgctgtgggtggtaactcacagtggagatctcagcaataaagtcacagcggagagcagaacagctccaagtcctcccagtcttatgtcatttgctgacattgcaaacacatccttggccatcacgtggaaagggcccccagactggacagactacaacgactttgagctgcagtggttgcccagagatgcacttactgtcttcaacccctacaacaacagaaaatcagaaggacgcattgtgtatggtcttcgtccagggagatcctatcaattcaacgtcaagactgtcagtggtgattcctggaaaacttacagcaaaccaatttttggatctgtgaggacaaagcctgacaagatacaaaacctgcattgccggcctcagaactccacggccattgcctgttcttggatccctcctgattctgactttgatggttatagtattgaatgccggaaaatggacacccaagaagttgagttttccagaaagctggagaaagaaaaatctctgctcaacatcatgatgctagtgccccataagaggtacctggtgtccatcaaagtgcagtcggccggcatgaccagcgaggtggttgaagacagcactatcacaatgatagaccgcccccctcctccacccccacacattcgtgtgaatgaaaaggatgtgctaattagcaagtcttccatcaactttactgtcaactgcagctggttcagcgacaccaatggagctgtgaaatacttcacagtggtggtgagagaggctgatggcagtgatgagctgaagccagaacagcagcaccctctcccttcctacctggagtacaggcacaatgcctccattcgggtgtatcagactaattattttgccagcaaatgtgccgaaaatcctaacagcaactccaagagttttaacattaagcttggagcagagatggagagcttaggtggaaaacgcgatcccactcagcaaaaattctgtgatggaccactgaagccacacactgcctacagaatcagcattcgagcttttacacagctctttgatgaggacctgaaggaattcacaaagccactctattcagacacatttttttctttacccatcactactgaatcagagcccttgtttggagctattgaaggtgtgagtgctggtctgtttttaattggcatgctagtggctgttgttgccttattgatctgcagacagaaagtgagccatggtcgagaaagaccctctgcccgtctgagcattcgtagggatcgaccattatctgtccacttaaacctgggccagaaaggtaaccggaaaacttcttgtccaataaaaataaatcagtttgaagggcatttcatgaagctacaggctgactccaactaccttctatccaaggaatacgaggagttaaaagacgtgggccgaaaccagtcatgtgacattgcactcttgccggagaatagagggaaaaatcgatacaacaatatattgccctatgatgccacgcgagtgaagctctccaatgtagatgatgatccttgctctgactacatcaatgccagctacatccctggcaacaacttcagaagagaatacattgtcactcagggaccgcttcctggcaccaaggatgacttctggaaaatggtgtgggaacaaaacgttcacaacatcgtcatggtgacccagtgtgttgagaagggccgagtaaagtgtgaccattactggccagcggaccaggattccctctactatggggacctcatcctgcagatgctctcagagtccgtcctgcctgagtggaccatccgggagtttaagatatgcggtgaggaacagcttgatgcacacagactcatccgccactttcactatacggtgtggccagaccatgggagtcccagaaaccacccagtctctgatccagtttgtggagaactgttcaggggacttacatcaacagaagcccgggtgctgggcccactgtgggtgcactgcagtgctggtgtgggtaggactggaacctttattgcattggaccgaatcctccagcagttagactccaaagactctgtggacatttatggagcagtgcacgacctaagacttcacagggttcacatggtccagactgagtgtcagtatgtctacctacatcagtgtgtaagagatgtccttcagagcaagaaagctacggagtgaacaagaaaaccccttgtttgccaatctatggaaaatgtggattccagagtttncacagagatccagtctatttcaagggcttgaggatgttacctgaaggagctc

SEQ ID NO: 13307 - DNA, 418 bp, Homo sapiens
gcctagggcagccctgattttgccttggaagtccattaatggactttccaacacacaggtttggatgaagtcttcaagatgctctggaggcagcaggcatcaagtcacggatggacagctggaagggacctttgagatactcctatcctgagcctagaggaagtcaggaccccagacgaaaggcacttttcccagggccctagagttggtggtgaccctgagaccagaacccaggtctctcagctcccagtgagacatcagtgaatatcacgtcacgttctatgagagtccagatctctgccattcattagttatatggcacagggtacatttcttcatttgttaaactgtactgttagtctgagccacacacatgcattgaagtccaggcatctgaggttctcttcttattaaaaaa

SEQ ID NO: 13308 - DNA, 1096 bp, Homo sapiens
  misc_feature (1)...(1096): n = a,t,c or g
gaaaaaagctaatgttatagcaacaaaaaaagactgaagcaaaaccacactgaaatgcatcccactccaggagaggaattcttagcgtaacactctaaataaatggaaggaatcatcaccttccttattttacccctgccttgttcaccaggctgcccagtgcttaccatgcagaagcagtcagctgtactctggaagtttctgttcttctttcctggggcttaggatattctgggagctgtctgagccttgtgcctaaggcttatcaggtgatataatcttcctgttctgggctgcttgctggaggaataggaagtgacatttataagacacaggcggtgtgagcatccatgtgtggtcttggtctaaaccagctcttgaacaggttaaagcaaacagcaataacaaaacaaaaactactgatgctgagcgttttgatcctagtaatatttcaaatattgtccttctgcatatgttctatccatatttgattccaatatacattattaagctttcttgggtactattttgctggggctcttgcgtgaaggtggtacctgtctcatgatccttaaaagagagaggcttttttcatccaaagctgtagtgttgggaactggggtgggagaggcactttttggaattctgaaagaatcatatctgtgtatatacatactgagtggggaaggatgggggttggcaggggttgagggaggtgggaacaaacagtgagtatgggaacaggcagtcacctcgagtgtgggaggtcacctgggtccgtcgtcttccttctgtatggtgttgggtttatgtacacactataacacttcctgtgtgagttcatgtacctgtctgtgagtgctttggtgtattgagcctcagtacactccaagggcattaaagtcaagaactagaacctgggtgctgtgcctttcttttttagagatgtgctctcatcgctttctctgacccccactttgccagcaaatattttttatttctgcttaaaatgtggtgtgtttggggatgccccacacaagacaggcttttccctgagaccagcagctggaatttctgccctggaaaggaangtggg

SEQ ID NO: 13309 - DNA, 528 bp, Homo sapiens
  misc_feature (1)...(528): n = a,t,c or g
ggtcctctgtagctttgccanagttctattcaaacagctcagtatgtagaggactggaagcatgcagccaactaagcatggctacttcagtgtaaaattaacactgagttacaaactgaagtggtaatgttaaaatccatggttctgtggttaggggaacaagtacaaagcttacagttgcaacagcaattgcactgtcattttaatcacactcatatttgtgtaaccaacttagaatataaccaaagagtatccatgggaccttgtaaaagcccatttgcagggagcttccacatccaacatcacctttgacataggtgaattacaaaaaaaaagttcttgatttaaataagcaaactcaagagtttcagccttctttagaagactggactgaattccagcaaggcctggagagcctcaacccttggacctatctaaagtaccacattaacatcttatatgtagttcttggaataatgttgttttgtctctgtttcctgctcatagcctgttaaattcggtgggatt

SEQ ID NO: 13310 - DNA, 730 bp, Homo sapiens
tttttttttaaaaattttaaatcaaacactttatttccacataacaagcgcaaaaaactcccaaacactttaacaatacaattaacgcagttatgaattatatactactcaaagccccaaggtcagaaggtcaatcagcttaacgctccaaacatttccagacatggtttttcaaagctacctttggtttttggaaaaaccagtatggaagtcaatatacattgaacgcactgaataacatttgcttatagtaaggtgtccgacaacattagctcacacctggcaagttggagcatgatctgaagtcatacactgaaatccatacacaggtttcgcccccgagctcctgcagggagaagcgagggccgtgaagggggaagaaaaggccagtccgggtgtggcgtttctcgctttgtaacagaggtatgagagtttaacactagtacactgtcaagtcattaagcttcatgttccacatggtttcttgctgaggcttgagatgggcacaaatggtggggaagatgaagtcacagaagagttttgagcaacaagatcccaaagatgctcagagagggtgggaaggagcaagctacagtttcccattgttctcacattatttcagggtgaaattgtgatgagttcagataaaatgttcaaatatttgcttagatttttaatcggttgctctatgagaaccctcatacatagcaactttgaaactttcattata

SEQ ID NO: 13311 - DNA, 886 bp, Homo sapiens
ggcgacggcgcggacctggagcttccgcgcggtggcttcactctcctgtaaaacgctagagcggcgagttgttacctgcgtcctctgacctgagagcgaaggggaaagcggcgagatgactgaccgctacaccatccatagccagctggagcacctgcagtccaagtacatcggcacgggccacgccgacaccaccaagtgggagtggctggtgaaccaacaccgcgactcgtactgctcctacatgggccacttcgaccttcttcaactacttcgccattgcggagaatgagagcaaagcgcgagtccgctttcaactttgatggaaaaagatgcttcagccttgtggaccgccagccgacaaagcccgaggagaactgagactctgcctttaccacccgccagtgcggggcacctctcccagcgtttctccggtttgccaatcctcttaagtattccctgtctccaaaaggaccggctctccatggctcctgcgccctcgtgctttccgcgtacagaagtgcttgcccggggagtcccgcctgacctgccttcatgtggacccttagaacagcactgggagaccagcaggactcctgagaactgtgctggtggagaggtcctagagccggcgagcgtttgagaagagggcatggcgcgtacagaagtgcttgcccggggagtcccgcctgacctgccttcatgtggacccttagaacagcactgggagaccagcaggactcctgagaactgtgctggtggagaggtcctagagccggcgagcgtttgagaagagggcatggcgctggagtgagatgggatttggcgtctcgtttttggctaattgattgtcattggctttttccataaagtttagaaatcgttc

SEQ ID NO: 13312 - DNA, 764 bp, Homo sapiens
gaagaaaagtaaaccgagaacataattaggcatcgggcctaagtgtcctggggagattggaggggacggcagcgttctgcatgatggaggcgctgccgggccccgggtctgtgggggccgtgctctcagggcgtgtgcgggacgccacctgtgcacacctgctcagagcacggctcctcgcaggggtgaaggggcagaccaacgaaaccagatgagaccaacgacaccatgcgagacacgcttgcagacactgttgttttggaaatgtgcttccctccatctgaaatctcatccctccacccgcccactcgggcagctgtgctgtgggcagggcatgcgctcccctggctgagcaccccagagattctcctgcaccttcctcatgccgcacgctgctcatccgtctccatgtgtgtttagatccatgccattcactgactcacttaacacctgcaaaatctttaaggaaaaaagctgaagggtacgaccatgcacatatgtgacctggaaaatgcaaatttagatcttttatgatttaattgttattgtttcccatagaagttccctccctttgaaattaatatataatgtataaattctgcactgagccatggcggagctgggcagcccctaggttagagtggagacggaggcccaggcgcaggggtcacacctcatctggtttccttcccatctcacagcttagcttgtgcttctcaacaccaagtctttaagagcaataaaaactacaccatgaaaaaaaa

SEQ ID NO: 13313 - DNA, 820 bp, Homo sapiens
tagaaataacaaaatggccgtttcaaccttgactggccaaaaataactaataaacttttttgttttaagtcaggcaagtgattttctacatttagcagtttgaaagtccagtgttaatgcaatatttctagtgagaaatgcttgttattaaaagcatgggagtgatagtgtgaaatggtggtgagtgcttctatcatattactgtaggtacttggactggtgcaaacttgattccttttcatccccctgtttaggagctattaaaatattactgttaaaaatccaaaccattctttgttccatgtaataagaaaatagccaaaatcactttagagcttctcaactatttatgaagagctatcctgcttttattgaaagtcactagagttgaatgtggtaagaaaccacttagcctatgtattggacgagaaaatcagtatcatgataaaattttgaattaagagaacccttgtagagtttttaaaaaatgatttattttcaattaggtttaagaaatctatgttatgcagggaggcatatcagatgaatgttgtagcagacaaaagttttaaatcgtgttagacttgaattcatcaattgtttgaatgagggtgggtgggtagaaggataacaaaattactgttagtgtttctttccttacggaaaaagatgtgaatcccagccttatttcagggaagcctttgaagctatgatggacataagtctaaattaaatgtatgtatgtttcattatattgctcttaagactactgaggtggcagtttaattcttaaaaacaataaaatggaagcataaatact

SEQ ID NO: 13314 - DNA, 1725 bp, Homo sapiens
gattcggcatgaggcacgcagccaacatggctccagtggcacagttgtggcggatgctggggctttcctgcggcatgcggctctgcaggacatcgggaagaacatttacaccatccgggaggtggtcactgagattcgggacaaggccacacgcaggcggctcgctgtcctgccctacgagctgcggttcaaggagcccttaccggaatacgtgcggctggtgactgagttttcaaagaaaacaggagactaccccagcctctctgccacggacatccaagtgcttgcactcacataccagttggaagcagagtttgttgggggtgttctcacctaaaacaagaaccacagaaggttaaggtgagctcatcgattcagcacccagaaacacctctgcacatttctggtttccatctgccctacaagcctaaacccccacaagaaacagaaaaaggacactcagcttgtgagcctgagaacctggaatttagttccttcatgttctggagaaaccctttgcccaacatcgatcatgaactgcaggagctgctgattgacagaggtgaggacgttccaagtgaggaggaggaggaggaagaaaacgggtttgaagacagaaaagatgacagcgatgacgacgggggtggctggataacccccagtaacatcaagcagatccagcaggagctggagcagtgtgacgtccccgaggacgtgcgggttggctgcctgaccacagacttcgccatgcagaatgttctgctgcagatggggctgcacgtgctggcggtgaacggcatgctgattcgtgaggcccggagctacatcttgcgctgccatggctgtttcaagacaacgtctgacatgagccgagtgttctgctcacactgtgggaacaagaccctgaagaaagtgtccgtgaccgtcagcgacgacggcaccctgcacatgcacttctcccgcaaccccaaggtgctgaacccccgcggcctccggtactcgcttcccactcccaaagggggcaaatacgccatcaacccccatctcaccgaggatcagcgcttccctcagctgcgactctcccaaaaggccaggcagaaaaccaacgtgttcgcccctgactacatcgccggggtgtcaccctttgtcgagaatgacatctccagccgctcagctaccctgcaggtccgggacagcaccttgggagctgggcggagacgcttaaatcccaacgcttccagaaagaagtttgtgaagaaaaggtgaagagcgagttcccgcaggcaaattggatgggcgtctggccgccgtggagttccggtgacccatttccccagccgtgtcgtctccaggaccacccgatggaaataacaggcgggcttcacggtgcggctctgtccgcccattgccccgctgggtctgcagggaactggactgtcccatggcctgtgagcaccggagcgcctggctgcctgccaaggaagtgcaattgcataaaaacagaaagaacaacgccctggagccaatcttcaagaaaggaatttccaaaggataatatttttctaataaatgcggctgcaacctcctgtgcatttaattaaataggccaaatttttgctgcttaggtcatctcaaggctgatacttgagctgtgtgcccagagatcatgcatttagatttatatttttgccagaaaatacaaggttataataaaactaagaacta

SEQ ID NO: 13315 - DNA, 492 bp, Homo sapiens
agccgccatcgccattcagccatccatcagcattcagtttgtcaatgaagtgatgaaagcttagagccagtatttatactttgtggttaaaatacttgattcccccttgtttgttttacaaaaacagatgtttcctagaaaaatgacaaatagtaaaatgaacaaaaccctacgaaagaatggcaacagccagggtggccgggccctgccagtgggcggcgtgtgctagcaaggcctgccgggtgtgccgcagtcaccacagggttctgagaacatttcacagaagtgcctgagacgcggagacatggctggtgttaaatggagctattcaatagcagtgacgcgctctcctcagccaccaaatgtccctgacaccctccccagcccccacagataacatcagctgaggtttttttcagtatgaacctgtcctaaatcaattcctcaaagtgtgcacaaaactaaagaatataaataaacaaaagaaaggtg

SEQ ID NO: 13316 - DNA, 1309 bp, Homo sapiens
actggatatatgctatgacgtgctctgtgaaaatgcctactttcagaaatttcagctagaaagggttaatctacaggaagtgaaacggtcaacttatgatcatacaaggaaatgtacagaccagctactgctcttgggtcaaacagacagagctgtgcagttgctgttggaaacaagtgcagataaccagcattattactgtgattcactgaaagcctgtttagtcactactgtcacctcgtcaggcccctctcagagcaccattaagttggtggcaacgaatatgattgccaatggcaaattggcagagggcgttcagttgctctgcctgatagataaggctgcagacgcctgccgctacctgcagacatacggcgagtggaatcgggctgcatggctggcaaaagtccgtttgaatcctgaggagtgtgccgatgttttaaggcggtgggttgaccacctttgttctccacaagtcaatcagaaatcaaaggctctcctggttctcctctctctgggctgcttttttagcgtggcagagacgcttcacagcatgagatactttgatagagcagccttatttgtggaagcttgcctcaagtatggagcatttgaagtcactgaggacacagagaaactcatcactgctatatatgcagattatgcccggagtttgaagaacctcggttttaagcagggagcagttctctttgcttcaaaagccggagcagctggcaaagacttattgaatgagcttgagtcccccaaggaagaacccattgaagagtgacagcttaataaatgccagggaatctgacctggaaggcagatgggagggggctggtctggctgtggccaccgtcacagtccaggatgaagaggagtacagggtcctgtgagctgtttgaccactgttctaagactatgtgtgcccaaaagcacataagcatctatgttgagagtaagtttgtatcctgcgttggtctcagaaagaacgtgaatgcttaagattttgaaagtacataatattttatactttgggagagagctttaagagtccctggaaatactttttaatttttttaacttaaaattcaagagactgaatcacttttctcattgattaaatgtaaagattattgagaaacctatagtaaatgaaatttgtaagatgttttctcaaatatatgctgtgcctgtacttatatacagtctttcaagagagatacaaacaaggcagaaacatttaaactagtattaaaggtagtttaccaaagcattttttgttttcttaccttgaaaacacaga

SEQ ID NO: 13317 - DNA, 4125 bp, Homo sapiens
cgagcgcggcgcccttgagctgcaccgcggcgcaggtttgcgagccgacttgtcagccggccaagaaaaggaagctccgtcccttcccgctcacccggcttccccaccccttgtactctaaactctgcacagggcgagcggcgcggccactgatgcgccgaggaggagcgagccgccgccgggcagcggcgtgccctcgggggagagggcgccggataagaggcggcggcgcggcggcgatggcgcggcgcgcgatggcagctgcttagcccggcgggcgcggagcagccccgagctgtggctggccaggcggtgcggctgggcgggggacgccgccgccgttgctgcccggcccggagagatgagcacggaggcggacgaaggcatcactttctctgtgccacccttcgccccctcgggcttctgcaccatccccgagggcggcatctgcaggaggggaggagcggcggcggtgggcgagggcgaggagcaccagctgccaccgccgccgccgggcagcttctggaacgtggagagcgccgctgcccctggcatcggttgtccggcggccacctcctcgagcagtgccacccgaggccggggcagctctgttggcgggggcagccgacggaccacggtggcatatgtgatcaacgaagcgagccaagggcaactggtggtggccgagagcgaggccctgcagagcttgcgggaggcgtgcgagacagtgggcgccaccctggaaaccctgcattttgggaaactcgactttggagaaaccaccgtgctggaccgcttttacaatgcagatattgcggtggtggagatgagcgatgccttccggcagccgtccttgttttaccaccttggggtgagagaaagtttcagcatggccaacaacatcatcctctactgtgatactaactcggactctctgcagtcactgaaggaaataatttgccagaagaatactatgtgcactgggaactacacctttgttccttacatgataactccacataacaaagtctactgctgtgacagcagcttcatgaaggggttgacagagctcatgcaaccgaacttcgagctgcttcttggacccatctgcttacctcttgtggatcgttttattcaacttttgaaggtggcacaagcaagttctagccagtacttccgggaatctatactcaatgacatcaggaaagctcgtaatttatacactggtaaagaattggcagctgagttggcaagaattcggcagcgagtagataatatcgaagtcttgacagcagatattgtcataaatctgttactttcctacagagatatccaggactatgattctattgtgaagctggtagagactttagaaaaactgccaacctttgatttggcctcccatcaccatgtgaagtttcattatgcatttgcactgaataggagaaatctccctggtgacagagcaaaagctcttgatattatgattcccatggtgcaaagcgaaggacaagttgcttcagatatgtattgcctagttggtcgaatctacaaagatatgtttttggactctaatttcacggacactgaaagcagagaccatggagcttcttggttcaaaaaggcatttgaatctgagccaacactacagtcaggaattaattatgcggtcctcctcctggcagctggacaccagtttgaatcttcctttgagctccggaaagttggggtgaagctaagtagtcttcttggtaaaaagggaaacttggaaaaactccagagctactgggaagttggattttttctgggggccagcgtcctagccaatgaccacatgagagtcattcaagcatctgaaaagctttttaaactgaagacaccagcatggtacctcaagtctattgtagagacaattttaatatataagcattttgtgaaactgaccacagaacagcctgtggccaagcaagaacttgtggacttttggatggatttcctggtcgaggccacaaagacagatgttactgtggttaggtttccagtattaatattagaaccaaccaaaatctatcaaccttcttatttgtctatcaacaatgaagttgaggaaaagacaatctctatttggcacgtgcttcctgatgacaagaaaggtatacatgagtggaattttagtgcctcttctgtcaggggagtgagtatttctaaatttgaagaaagatgctgctttctttatgtgcttcacaattctgatgatttccaaatctatttctgtacagaacttcattgtaaaaagttttttgagatggtgaacaccattaccgaagagaaggggagaagcacagaggaaggagactgtgaaagtgacttgctggagtatgactatgaatatgatgaaaatggtgacagagtcgttttaggaaaaggcacttatgggatagtctacgcaggtcgggacttgagcaaccaagtcagaattgctattaaggaaatcccagagagagacagcagatactctcagcccctgcatgaagaaatagcattgcataaacacctgaagcacaaaaatattgtccagtatctgggctctttcagtgagaatggtttcattaaaatcttcatggagcaggtccctggaggaagtctttctgctctccttcgttccaaatggggtccattaaaagacaatgagcaaacaattggcttttatacaaagcaaatactggaaggattaaaatatctccatgacaatcagatagttcaccgggacataaagggtgacaatgtgttgattaatacctacagtggtgttctcaagatctctgacttcggaacatcaaagaggcttgctggcataaacccctgtactgaaacttttactggtaccctccagtatatggcaccagaaataatagataaaggaccaagaggctacggaaaagcagcagacatctggtctctgggctgtacaatcattgaaatggccacaggaaaacccccattttatgaactgggagaacccacaagcagctatgttcaaggtgggaatgtttaaagtccaccctgagatcccagagtccatgtctgcagaggccaaggcattcatactgaaatgttttgaaccagatcctgacaagagagcctgtgctaacgacttgcttgttgatgagtttttaaaagtttcaagcaaaaagaaaaagacacaacctaagctttcagctctttcagctggatcaaatgaatatctcagggagtatatccttgccggtacctgtgctggtggaggacaccagcagcagcagtgagtacggctcagtttcacccgacacgggagttgaaagtggaccccttctctttcaaaacaagagccaagtcctgcggagaaagagatgtcaagggaattcggacactctttttgggcattccagatgagaattttgaagatcacagtgctcctccttcccctgaagaaaaagattctggattcttcatgctgaggaaggacagtgagaggcgagctacccttcacaggatcctgacggaagaccaagacaaaattgtgagaaacctaatggaatctttagctcagggggctgaagaaccgaaactaaaatgggaacacatcacaaccctcattgcaagcctcagagaatttgtgagatccactgaccgaaaaatcatagccaccacactgtcaaagctgaaactggagctggacttcgacagccatggcattagccaagtccaggtggtactctttggttttcaagatgctgtcaataaagttcttcggaatcataacatcaagccgcactggatgtttgccttagacagtatcattcggaaggcggtacagacagccattaccatcctggttccagaactaaggccacatttcagccttgcatctgagagtgatactgctgatcaagaagacttggatgtagaagatgaccatgaggaacagccttcaaatcaaactgtccgaagacctcaggctgtcattgaagatgctgtggctacctcaggcgtgagcacgctcagttctactgtgtctcatgattcccagagtgctcaccggtcactgaatgtacagcttggaaggttgaaaatagaaaccaatag

SEQ ID NO: 13318 - DNA, 1048 bp, Homo sapiens
  misc_feature (1)...(1048): n = a,t,c or g
gcgaagaaaagggagccgcgcagcgcctacgggagtccggcggcagcagccggtaccggcaaccacgggcagctctcagggaatctccgtcgtgaggccagaggctccagtccccgcgagtccagatgcctgtccagcctccaagcaaagacacagaagagatggaagcagagggtgattctgctgctgagatgaatggggaggaggaagagagtgaggaggagcggagcggcagccagacagagtcagaagaggagagctccgagatggatgatgaggactatgagcgacgccgcagcgagtgtgtcagtgagatgctggacctagagaagcagttctcggagctaaaggagaagttgttcagggaacgactgagtcagctgcggttgcggctggaggaagtgggggctgagagagcccctgaatacacggagccccttggggggctgcagcggagcctcaagattcgcattcaggtggcagggatctacaagggcttctgtctggatgtgatcaggaataagtacgaatgtgagctgcagggagccaaacagcacctggagagtgagaagctgctgctctatgacacgctgcagggggagctgcaggagcggatccagaggctggaggaggaccgccagagcctggacctcagctctgaatggtgggacgacaaactgcacgccagaggcagctccaggtcttgggactccctgccgcccagcaagaggaagaaggcacctctggtttctggcccatacatcgtgtacatgcttcaagagatcgacatcctggaggactggacagccatcaaaaaggctagggcagctgtgtcccctcagaagagaaaatcggatggaccttgaccctgctgttcacagccagggggaccctcagagcagctggcactgcacccaggattctcgtcttcctcctgcagacaggcggacccacaggcccttcagggtctgccccagccaggctcctgtggtgctgctgggccctcccactccatctggcactggcctggactcctcctcntagcctc

SEQ ID NO: 13319 - DNA, 629 bp, Homo sapiens
catgtgtgctctaagctcttaaaacagctctgcctcaggaaagactgtccagggcataggaagcccacacacagggtgggatgacaagtttgcatctggcacggctgggagccctgggggcctctgcccttttggccgcgttgtctcctggcttttagggtggtgggattctcggctctgattgcagcaggtggattcacttagctctcctccccttttagcattactgtcttctgtaataaacctctcactttgatctgccaggctgtcaaatgctttgattgccctctctgttttgttccaatggttcgtcaatccaaatatccacaacacaaggacagattttagtctcttcatacagtgggatatttcacagctattaaaacaaatcaaataaatgcttgtgtattgatatgcaaagttgtcctgcatcaataacttttaaacacattttatgatcccacatctatatctatacataatgtttgccactgcttaaacaaaacaaaatctaagctttagactccaaatggaattacaggggaatcttgatgtctgtgttctgcagttctgtcatgtttgaaattgtcaaataaacatggtgcctttccagtaaaaaaaaaaaaaaa

SEQ ID NO: 13320 - DNA, 565 bp, Homo sapiens
  misc_feature (1)...(565): n = a,t,c or g
gtagtggtgcatgcctgtantcccgctactctggagacaggtggaggggattgcttgagcctgggaagctgaggctgcagtagccatgactgcaccactgcattccagcctggttggacagagtgacccttgtctccaagaaaaaaaaaaagcaaatgggattaaggactcatggaatgggaaggggaaggggagtcttactatatgtggaataaacttgctcagtgttgccacagagttacattaccaatgtgtagaagtcagaaactagacttctagtttggttcaacatttgagggttgttttatagccatcaaagtattcaagaggttggatggcactcaaaagattctacatgtctagaatcaaactcaaatctggcacgtaggtgcttcttagtaaatgcttaatgaatgccaccaactctgcaaagtattcattgattttgagaccttagtcatgttgctactaaaagtagggcatatgaccgcctaagaaacagaacttcgagaagtcctaacgtaaccacagtaaagcagactcccctttcagcaacctcaaagca

SEQ ID NO: 13321 - DNA, 2014 bp, Homo sapiens
tggcccctaattaggggttcccaaaaaccattttggaaagtgccctttggaaggccttaccattaagagaggaagcccaatggaaaatgaaagagattggccaaaggggaaggatgatgccatgtagatcctgtttgacatttttatggctgtatttgtaaacttaaacacaccagtgtctgttcttgatgcagttgctatttaggatgagttaagtgcctggggagtccctcaaaaggttaaagggattcccatcattggaatcttatcaccagataggcaagtttatgaccaaacaagagagtactggctttatcctctaacctcatattttctcccacttggcaagtcctttgtggcatttattcatcagtcagggtgtccgattggtcctagaacttccaaaggctgcttgtcatagaagccattgcatctataaagcaacggctcctgttaaatggtatctcctttctgaggctcctactaaaagtcatttgttacctaaacttatgtgcttaacaggcaatgcttctcagaccacaaagcagaaagaagaagaaaagctcctgactaaatcagggctgggcttagacagagttgatctgtagaatatctttaaaggagagatgtcaactttctgcactattcccagcctctgctcctccctgtctaccctctcccctccctctctccctccacttcaccccacaatcttgaaaaacttcctttctcttctgtgaacatcattggccagatccattttcagtggtctggatttctttttattttcttttcaacttgaaagaaactggacattaggccactatgtgttgttactgccactagtgttcaagtgcctcttgttttcccagagatttcctgggtctgccagaggcccagacaggctcactcaagctctttaactgaaaagcaacaagccactccaggacaaggttcaaaatggttacaacagcctctacctgtcgccccagggagaaaggggtagtgatacaagtctcatagccagagatggttttccactccttctagatattcccaaaaagaggctgagacaggaggttattttcaattttattttggaattaaatacttttttccctttattactgttgtagtccctcacttggatatacctctgttttcacgatagaaataagggaggtctagagcttctattccttggccattgtcaacggagagctgggccaagtcttcacaaacccttggcaacattgcctgaagtttatggaataagatgtattctcactcccttgatctcaagggcgtaactctggaagcacagcttgactacacgtcatttttaccaatgattttcaggtgacctgggctaagtcatttaaactgggtctttataaaagtaaaaggccaacatttaattattttgcaaagcaacctaagagctaaagatgtaatttttcttgcaattgtaaatcttttgtgtctcctgaagacttcccttaaaattagctctgagtgaaaaatcaaaagagacaaaagacatcttcgaatccatatttcaagcctggtagaattggcttttctagcagaacctttccaaaagttttatattgagattcataacaacaccaagaattgattttgtagccaacattcattcaatactgttatatcagaggagtaggagagaggaaacatttgacttatctggaaaagcaaaatgtacttaagaataagaataacatggtccattcacctttatgttatagatatgtctttgtgtaaatcatttgttttgagttttcaaagaatagcccattgttcattcttgtgctgtacaatgaccactgttattgttactttgacttttcagagcacacccttcctctggtttttgtatatttattgatggatcaataataatgaggaaagcatgatatgtatattgctgagttgaaagcacttattggaaaatattaaaaggctaacattaaaagactaaaggaaacagaca

SEQ ID NO: 13322 - DNA, 1576 bp, Homo sapiens
ttacagaaaaaaaatttgaacaagtatttatttcttaaaatttacttaagggattagagctaatatataatagaacatttaatataaccatttggagttatgtcaacataaaaatagctgtggttacaattagcacatgcaattcactgcaaaggtaaaaatacatgctatactctagacaagccttccaaatgaagttagagtagatgggggtaaaacagcaagtgaacatgaaaggattgcacttaggaaggaaagtgggacatagctaggatataaaagaaacatacctaatgctagtcagtcactgcattgtcctactagcaaattgcacatttatttttagagtatattcaatacacatacatattgagactagagaattttcaaatatctacctttggaaatatccctttgtttctaacacatcacattatggtattaatgtaacagcacttaaaacctgtagttatcattcaaagcttgtgttcaagagataaaagaacatcattcagacaaagcctgtgttcaagaaataaaaaaaacatctatcactatcggccttaaatgcatctcatcacacgacccatcaacttttaatgaaatgggtaatgaagttaaactaaccagtttgtacaaactattgactgagaaaaagcccttaaaaatttaggaacaaatgagcaacagaagagctcaccctgagctgccaccttttaatttttaatgcaatgtatatgagaatatcatgctaatgcacatactagtagcatgtatgatggaaaaaaataggttaatgcaaaagataatacgcttggctttgtaaagttttgttttgacttacatcatctgaattctgtttatcgagtctgaaaaggaactgctgccaaggaccagtccaaagaagaattaggctgtaagactgctagttcataccttctttgaaatcaatgacaatgtccaattttaggctaatcctaaaacacttgccattttatgactccatattcttttaatttacagaaaagtacaaattttttagaaagtaatcttatcagcacaatataatctaacaatacctgtaatagaaagctatcccagtaaattttttttgaacaattgaacttttgtcttatgcagcttataactttgttattttattcatctcaacaaaataaaactttattgaaacaaaagtgtatggtttaggaatatgctcttaataacaactgagcaaaattagaatgatgtggactataacagaatgaaggaagatctctcctgcttgatgtacttggtcaatatatgttagtaaacagaaatattttagggaattctatgattattctacttctacatttacatgtcatggttttaactagttaaatgggtagaaaaaagacatctttaataattgatttctatttctcaaactagatgctctactttaaatatgagctttaatgaatgttttgtaacattttaaagttgtaacatttctaagtatactccactaacttcacaataagagctagggtcactggatgacttcatgtggtaaaatcccttatcaagg

SEQ ID NO: 13323 - DNA, 948 bp, Homo sapiens
gccacggtccaggctggacacaaccaaaggcggaggacccgtggcccacgaagctcatctttgaactgtccccgccttctcccgccttgacttgtgaccctaggccctttggggcgcctctgacccagctagccagatcccggacccaaaccatgttccctgtgaaggtgaaagtggagaaatcagagctggagatggccaaagcccggaaccaactggatgctgtcttgcagtgtctgctggagaagagtcacatggacagggagcgtctggatgaggaagctgggaaaacaccctcagacacccacaataaggactgctccatcgcagccactggcaaaaggccatctgcccgcttcccccaccagcggaggaagaagaggagggagatggatgatgggctggctgagggagggccgcagcgatccaacacatatgtgatcaagctgttcgaccggagcgtggacttggcccagttcagcgagaacacgccactgtacccaatctgccgcgcctggatgcgcaacagcccctctgtgcgcgagcgctgaatgctctcccagctcacccctgcccccgctgcctgaggatgaggagggctcagaggtaaccaacagcaagagtcgtgatgtgtacaagcttgcccgccaacccacacccccgggggccaaccgaagaatgcctgcagattcccgcatcccatctccacttgcagccttgagatgcagggcacccctgaccgatgagccctctgagcccgagccctcaccctccacactcatctatcgcaacatgcagcgctggaaacgcatccgccagaggtggaaggaggcctctcatcggaaccagcttcgttactcagaaagcatgaagatcctacgagagatgtacgaacgacagtgatgtttcccaggtccccccacaccagttaaacatcccccaactcca

SEQ ID NO: 13324 - DNA, 936 bp, Homo sapiens
tttggcaagcctggtttatatccatctacaaggtttgcgaacccatgttgccgatttttttttctgctacagaacaactcccttggtacaataaaaaagacgagtatttacttttccattgaaagtggagaacctgaaaaggaacctggaaagaagcagctggaaaaggtgagaggaaaaccctagagtgtgtgttatcctgcaagccaattgagaatggagcttgcttgatatttcactagataaagaatttaaggcgagtatctatctttgttctccttggcaactgagagtctgcccttggaaacatcaggcaccatggggaagcgggacaatcgggtggcctatatgaacccaatagcaatggcgagatcaaggggtccaatccagtcttcagggccaacaatacaggattatctgaatcgaccaaggcctacctgggaagaagtaaaagagcaactagaaaagaaaaagaaaggctccaaggctttggctgaatttgaagaaaaaatgaatgagaactggaagaaagaactggaaaaacacagggagaaattgttaagtggaagtgagagctcatccaaaaaaagacagagaaagaaaaaagaaaagaagaaatctggtaggtattcatcttcttcttcatcaagctctgattcttccagcagttcttctgattctgaagatgaggataagaaacaaggaaaacggagaaagaaaaagaagaaccgttcacataaatcttctgaaagctccatgtcagaaactgaatcagacagtaaggatagtttaaaaaagaaaaaggagtcaaaagatggaactgagaaagaaaaggatattaaaggactcagcaaaaagagaaagatgtattctgaagataaacctttatcatctgagtccttgtcagaatcagagtatattgaggaggtgcgagca

SEQ ID NO: 13325 - DNA, 1020 bp, Homo sapiens
ggtcgacttttttttttttttttttttaacttcccaggatggtttattccaaagctgtggacggtgaacattaagacgaaagaggtgactcgcgtggaacctgaaacacggacgcctttcttccaagaagggctgtggcgatcaggccactcaaggcagccagcccctcagcagggcacgatggctaatgctgcctggaccgcaggagctttttgttcgatttcaagacaccagactccctctccttctcagggtcgaagacttttgggatctcgtggggccagtagtcgttgcagtgggggcagcgcggttcagcattcgactggaagtacttggccacgcagggtaagtgcatcctgatcccacaggtttcgcagctttgaccctggatgaggaggctgtgacagatattgcagatcttcaccgcgtcggggtacgtctcccggatgtattgctccatctccaggatggcccggccgtgcagggtgaactccccttccttctcaatcagccacttgttttgaacaaacttctgcagcacctcgtccgcttccttcttcctcatcttcttgcctttaagttgatcaaccaggttcaatatgtttgtggaagacgcaaagcccggtttctgagtcaataatcagttccagagcctttctaaacaaatccagttcattctctgcaaaatccgtagccattttggaaattgaagttgtagcaagattcaccaacgcataaatgggtctcccatcatcttccgtgactcctctctttatctcaatatacaaggactccaagacactgttaatgttgttgatgaagtcctccaacttatctacggtggcattgcggtcatggaccttgtagcagtgcgtctgcaagcgcttcacgtcccattcctctagcacgccatgggtcatcagcaactggaggaagcgccggtggacatcagtcatgacgcccattctccttgtgctgccctgcatgtgggaacgaacagggagcccaagcgcatcccag

SEQ ID NO: 13326 - DNA, 836 bp, Homo sapiens
  misc_feature (1)...(836): n = a,t,c or g
ctcactcatccatcacattaggctgatgtccttgcccattgccaagaagtacatgtcagaaaataagggagttcctctgcatgggggtgatgaagacagaccctttccagactttnacccctggtggacaaacgactgtgagcagaatgagtcagagcccattcctgccaactgcactggctgtgcccagaaacacctgaaggtgatgctcctggaagacgccccaaggaaatttgagaggctccatccactggtgatcaagacgggaaagcccctgttggaggaagagattcagcattttttgtgccagtaccctgaggcgacagaaggcttctctgaagggtttttcgccaagtggtggcgctgctttcctgagcggtggttcccatttccttatccatggaggagacctctgaacagatcacaaatgttacgtgagctttttcctgttttcactcacctgccatttccaaaagatgcctctttaaacaagtgctcctttcttcacccagaacctgttgtggggagtaagatgcataagatgcctgacctatttatcattggcagcggtgaggccatgttgcagctcatccctcccttccagtgccgaagacattgtcagtctgtggccatgccaatagagccaggggatatcggctatgtcgacaccacccactggaaggtctacgttatagccagaggggtccagcctttggtcatctgcgatggaaccgctttctcagaactgtaggaaatagaactgtgcacaggaacagcttccagagccgaaaaccaggttgaaaggggaaaaataaaaacaaaaacgatgaaactgc

SEQ ID NO: 13327 - DNA, 655 bp, Homo sapiens
ggggtgatctgcttgcttcttttaccacaggtgatttttaagtaacttgggtttaatttacagagatgaaacatgacagtctgagtaaaatacccagtgatgtagaagtgtgcctgtttattatgtagatacagacatccagcaaaaacaggagaatcacatgctttaaagaacactttctcttaggtttccttgagatatgttcctccagtgcaagcaagataatggtttacagaatttgctttacacaaaacttgtcaagaactcatctgttaaaagcaaggaataactagtttatattttccaataatgttcaaggttttctccttaatatgtttgaaattattgattttggcatttttctaagcaatttatgtaattttatttgaagaaaatgttttgtataatgtttttcccagcctaaacagggagagtcctaacagtgttgtgcttgtatgattctgagactttatttgcgtaagtgatactactatactttatttttgacccatgcctttttaagctgtttcatattgaaaggtggaatattgtaaaaattttgtcaaagatgtactgtagtgctatttgaagtacctgtaacaaaacagttgggccctctggtattccctggtactctggcatctgtgggattaaa

SEQ ID NO: 13328 - DNA, 1239 bp, Homo sapiens
gaattcgaggatccgggtaccatgggaggaaaacttcttcctggcctgggctccgtgccgctctgtttgccaaccgtccagtcccgcctaccagtgccgggcgctccccacccctcccccggctcccccggtgtccgccatggccaaagcctacgaccacctcttcaagttgctgctgatcggggactcgggggtgggcaagacttgtctgatcattcgctttgcagaggacaacttcaacaacacttacatctccaccatcggaattgatttcaagatccgcactgtggatatagaggggaagaagatcaaactacaagtctgggacacggctggccaagagcggttcaagacaataactactgcctactaccgtggagccatgggcattatcctagtatacgacatcacggatgagaaatctttcgagaatattcagaactggatgaaaagcatcaaggagaatgcctcggctggggtggagcgcctcttgctggggaacaaatgtgacatggaggccaagaggaaggtgcagaaggagcaggccgataagttggctcgagagcatggaatccgatttttcgaaactagtgctaaatccagtatgaatgtggatgaggcttttagttccctggcccgggacatcttgctcaagtcaggaggccggagatcaggaaacggcaacaagcctcccagtactgacctgaaaacttgtgacaagaagaacaccaacaagtgctccctgggctgaggaccctttcttgcctccccaccccggaagctgaacctggctcagcgccacgggctggagtcggcctccgaccaccatggcaacttctccatcaccatgcgcaacctgaccctgctggatagcggcctctactgctgcctggtggtggagatcaggcaccaccactcggagcacagggtccatggtgccatggaactgcaggtgcagacaggcaaagatgcaccatccaactgtgtggtgtacccatcctccttggtgcaatccccagaagcccactctccttccatctgctctggagtctctgctcctcttgactctctggagtggctgtgctttggcagtgacctttggccaggggaaagttgcctcaatgacaggtactgggttgccccaggcagctaagtgccgccctgcccaccagccccctatggcttgggaaggctgggggtcctcttggcctagaattaaactacttcagatttcaaaaa

SEQ ID NO: 13329 - DNA, 1190 bp, Homo sapiens
  misc_feature (1)...(1190): n = a,t,c or g
tcgggccgacgggctcccggaggactgcagggcaggatgacgcaaaacacggtgattgtgaatggagttgctatggcctctaggcatgcccagcccacccacgtcaacgtccacatccaccaggagtcagctttgacacaactgctgaaagctggaggttctctgaagaagtttctttttcaccctggggacactgtgccttccacagccaggattggttatgagcagctggctctaggggtgactcagatattgctgggggttgtgagttgtgttcttggagtgtgtctcagcttggggccctggactgtgctgcgtgcctcaggctgtgccttctgggcggggtctgtggtgatcgcagcaggagctggggccattgtccatgagaagcacccgggcaaacttgctgggctatatatccagcctgctcaccctggcaggctttgctacagctatggctgctgttgtcctctgcgtgaatagcttcatctggcaaactgaaccctttttatacatcgacactgtgtgtgatcgctcagaccctgtcttccctaccactgggtacagatggatgcggcgaagtcaagagaaccaatggcagaaggaggagtgtagagcttacatgcagatgctgaggaagttgttcacagcaatccgtgccctgttcctggctgtctgtgtcttgaaggtcattgtgtccttggtttccttgggagtaggtcttcgaaacttgtgtggccagagctcccagcccctgaatgaggaaggatcagagaagaggctactgggggagaattcagtgcccccttcgccctctagggagcagacctccactgccattgtcctgtgagccgccaaagaccccacggggtgcccgcatgtccctgtctagggcagcccagggcccccactcctggctcctcacacttgcctcccctatggccgctctccagaccctcctcctttcttctccccacatccgcacctgctgttcccactctggggttctcaagtccatgaacagatattgttgcattttccacaatgctgattaaacataataaacaatccagaaaagcagttttgcccaggaaaggttatggtttccttttgtttattacaccttgtggcggccatggaaagggcttttntttgtgttcggtatgtatggaggttaaanggggagctga

SEQ ID NO: 13330 - DNA, 1338 bp, Homo sapiens
ggctaggaatttagaaaatatactgtaattcagacactcagcttctgatctgagtatagggtgaattgatggaggggcatagctagtgagacagagctcacctcctacaaggaggagaatgttgcaaaccgttttccccttcccaacctgggactatatgatttcttacccccagggattatgatagaaatatgaagccaccaagtctagacttgatggtgttcaagaataaataatactgattgcctccctagtccttgtccagctaactcagctgtttataattgaagggattcaacaaaattatctctagcatcaggtgctagacatggttagaatctcaccatggtttagtgactggtagatagctattaggtaggtagataaataaatgatgctagaggcaacaggtctagggttaaggattaaggcctgggaattggagtctcaccatgggctccccttccttgtctggggcctggacacactgaggacaatgcggctatagcagatggccatggcagtcagtggcagcagaaagagggcagcagaaggtgaagaggttataggtggtctcttgccattgagccttgaagctgcctttggtgacacactgagtgaaagggactgggccagctcagtggaccgtgtggaacaggaacagctggagtggagttgaggactattagaactggttcccctcaccacccaacctacccacctatgtcatactgtctcctcccaattcatccttaattccaagtgaagcagcacagtgctgagaaacagttcatccatggtgccatgttaaagaagttggaaatatatcttgaaaatcctatcttccttttaggcttgaatatgatgctgaacagtaagtttgttaaatcttggaacttaaaacaatcctgctttctcaagtactattctaacattgcgctttataagggatgatatttctaccacctcactcatatttttagctgaaatgattttcctggtatgtctgttattttgtggaaaaagaaatattgtgtaaaatgggtgctgccaaaattccaggccattttgcagggactctgaagtgacctttagtagtaatagtcttatgtgcagtaactataatggtaaagaatgttaaataataaaatttaacattttccaaatgctattgggctgcccctccccctttttgttaaattgctgggttttccaactgaatcagtaaaaactatttctgtttagagctacaaggttaaagtgcctgctttccagtaatgggagattgagtcactattaatttggattaaaagggtaaggcttcagtagggcatcaga

SEQ ID NO: 13331 - DNA, 5466 bp, Homo sapiens
atgaagatggcggacgcgaagcagaagcggaacgagcagctgaaacgctggatcggctccgagacggacctcgagcctccggtggtgaagcgccagaagaccaaggtgaagttcgacgatggcgccgtcttcctggctgcttgctccagcggcgacacggacgaggtcctcaagctgctgcaccgcggcgccgacatcaattacgccaatgtggacggactcactgccctgcaccaggcttgcattgatgacaatgttgatatggtgaagtttctggtagaaaatggagcaaatattaatcaacctgataatgaaggctggataccactacatgcagcagcttcctgtggatatcttgatattgcagagtttttgattggtcaaggagcacatgtaggggctgtcaacagtgaaggagatacacctttagatattgcggaggaggaggcaatggaagagctacttcaaaatgaagttaatcggcaaggggttgatatagaagcagctcgaaaggaagaagaacggatcatgcttagagatgccaggcagtggctaaatagtggtcatataaatgatgtccggcatgcaaaatctggaggtacagcacttcacgttgcagctgctaaaggctatacggaagttttaaaacttttaatacaggcaggcctatgatgttaatattaaagactatgatggctggacacctcttcatgctgcagctcattggggtaaagaagaagcatgtcgaattttagtggacaatctgtgtgatatggagatggtcaacaaagtgggccaaacagcctttgatgtagcagatgaagacattttaggatatttagaagagttgcaaaagaaacaaaatctgctccatagtgaaaaacgggacaagaaatctccactaattgaatcaacagcaaatatggacaataatcagtcacagaagacctttaaaaacaaagagacgttgattattgaaccagagaaaaatgcatcccgtattgaatctctggaacaagaaaaggttgatgaagaagaagaaggaaagaaggatgagtctagctgctctagtgaagaagatgaggaagatgactcggaatcagaagctgaaacagataagacaaaacccctggcttctgtaactaatgccaacacttctagtacacaagcagctcctgtagctgttacaacacctactgtgtcatcaggtcaagcaacacctacatcacctattaaaaagtttccaaccacagctacaaaaatttctcccaaagaagaagagagaaaagatgagtctcctgcaacttggaggttaggacttagaaagacgggcagctatggtgcacttgctgaaatcacagcatctaaagagggtcagaaagaaaaagatactgcaggtgttacacgttcagcttcaagtcccagactttcctcctctttggataataaagaaaaggagaaagatagtaaaggaactaggcttgcatatgttgcacctacaataccaagacgactagccagtacatctgacattgaagagaaagaaaacagagattcttcaagtttgcgaacaagtagttcatatacaaggagaaaatgggaagatgatcttaaaaaaaatagctcagttaatgaaggatcaacgtatcataaaagttgctcctttggtagaagacaagatgatttgattagttctagtgttccaagcaccacatcaacaccaacagttacctctgcagctgggcttcagaaaagcctgctttccagcacaagcactactacaaagattacaacgggttcttcctcagcaggcacacaaagcagtacctcaaatcgtttgtgggctgaggatagtactgagaaagaaaaggacagtgttcctacggcagtgaccattcctgttgctccaactgttgtaaatgctgcagcttctaccacaaccctgactacaactactgctggcactgtctcctccacaacagaggtcagggagagacgcagatcatacctcactcctgttagggatgaagagtctgaatcccaaagaaaagcaagatctagacaagcaagacaatctagaagatcaacacagggagtgacattaactgatcttcaagaagctgagaaaacaataggaagaagtcgttctacccgaaccagagaacaagaaaatgaagaaaaagaaaaagaggaaaaagagaaacaagataaagagaaacaagaagaaaagaaggagtcagaaacatctagagaagatgaatataaacaaaagtactccagaacgtatgatgagacttaccagcgttataggccagtatcaacttcaagttcaaccactccatcctcttcactttctactatgagcagttcactgtatgcttcaagtcaactaaacaggccaaatagtcttgtaggcataacttctgcttactccagaggaataacaaaagaaaatgaaagagagggagaaaaaagagaagaggagaaagaaggagaagataaatcacaacctaaatcaatcagagaacgacgacgaccaagagagaaaagaagatctacaggagtttcattttggacacaagatagtgatgaaaatgaacaagaacaacaatcagacacagaagagggatccaataagaaagaaactcagacggattccatttctagatatgaaaccagttctacatcagctggtgatcgatatgattccttgctgggtcgctctggatcatacagttacttagaagaaagaaaaccttacagcagcaggctagaaaaggatgactcaactgactttaaaaagctttatgaacaaattctagctgaaaatgaaaagctgaaggcacagctacatgatacaaatatggaactaacagatcttaaattacagttggaaaaggccacccagagacaagaaagatttgctgatagatcactgttggaaatggaaaaaagggaacgaagagctctagaaagaagaatatctgaaatggaagaagagctcaaaatgttaccagacctaaaagcagacaaccagaggctaaaggatgaaaatggggccttgatcagagttataagcaaactttccaaataaaaaaaaaaaagcagcaagtaatggaattgcacatattagtaacccagtggaccataattggcagtcactggaagtctgggaagaatccttggagactgtcattttcggatatcctgccaaatgccctcttatctagaatttttgtttcattttgtttaattttctggggtgtttttgttgttgttggtttgttttttgtttttttttttaatcaagaccattgtttcatgttaatgcagctgctgagaagatttttttttaatgactgagaaaacttgtttacagctccagcatataaggaaagtgttcaaggccagatatgcctcagatatttaaccagtaagccttagttgtacataaatacttttgtgtcaacaaaaactttcagctctcacagaagacagttactcaacattttttgatgtgccacagtttcgagtttttcgatatttaaattttttggcttttcatctaagtttgggtttgtattttttccttctaaactcttcatgtggcagagtcttctatgttttcacggctttttcattacagaaaagaacacttgctcttctgtgattattgtcatgtattagggctaatgctgtgttgtctcccacctggaactgaattgcttggtggaaccatatgctttcactgtttgtgcaatatgcatttatttcttatatgaatgctttaaagtcatttgaggttagatcttttaattcctattttctgcttcattggtcactttttttttattgtagtataagatgttagattctgtaatcttcacattcattttagcaggtactgagtgatgctgtatatacaaataagtgtattgttttgatttttagaccaccacatggcatgcttgactatttcttatttcaaatgtctgctaatgcagagtaggctactccatgatagtgttaaaaaacaaaatttgctaacaatgtgatataaagactttaaaagttacacattatgtgggagccctatctttacaaaagtttcctactgtaaagtgcttttattttcagttttcatttgatagtactcaaccataattaaagttgcataagataattgctttacatttcacatacctatatttatctgagtgctgtctaaaactgttgtgctagccaaagtaatgctatgaaatcatttgcagaattaacccgtgagttaatgttaaatgcactgttattgccatgtgaagaggcatcgactttgataccaccatcatgttcagaccattttatacatttcagtggcctttttttttttaaggaaaaaaaagcgcaaaaccaagtacatagtgacgatggcttttatttggacaaatagcttttatattttcattaaaccatgcaaaaaatactacatctttctggcacataactgtctccttaaccactgaacagttcagccatttgaataaattgtacattgtaaagcttatagtagctgattgtattattgattgtattgtatactatattaaatgtgaatttgtaccccttcattttaaaaggtcattgtgttctactgcctattttagattactttggggttggggaagggtgttttggtaagcaggattttaagtcctctctctctccgattggttttatgaagatataaggttatgctcttactaccaagctcaggattcttgattttaaaggtacaaggatagttgtgggagttttatttttggttatatttgaactgtatgaatggtaggtctgaatattgagaatttccatggtcttatgtggaggtaaaatatacagataactgatcagtttgagtgactgcaacatgttctggttgcacaacagttaggcatgctatggtttatatttgtgaagtttggatgcctgtgaagaatgattaaatacatgtttctaatattttagtgttttgtatttaggttatttattctttgtatctaaaactgaacagctactgtgctatattgattttattggtagtattgagcagaccttgtttctgcatgaaactagttgcaaaacccactattttggaaataaaaatgtattttgacatatacaaataaaatggaataaaactattttaaatgtgtgaacttttaatgaagacattttaaattttgttctgagatatttaaattctgcatgggtattttttcactaattgctttacttggataccaatttgaataatttctgaaattgtaatattgtgataatttgcacagcattgtacatgcacatctgtaaatgcaatcttaattgccatatttatgcaatctgtgtaccaatttggacaaatgtttatatattttacataaagctgtctgtatgcagaaaaaaaaaaaa

SEQ ID NO: 13332 - DNA, 703 bp, Homo sapiens
  misc_feature (1)...(703): n = a,t,c or g
ggaaactaattctcagagaaaataacttgactgaattacacaaggattcatttgaaggcctgctatccctccagtatttagatttatcctgcaataaaatacagtctattgaaagacatacatttgaaccactaccatttttgaagtttataaatcttagttgcaatgtaattacagaactcagctttggaacatttcaggcctggcacggaatgcagtttttacataagttaattctcaatcacaatcctctgacaactgttgaagatccgtatctctttaaattgccagcattaaaatatctagacatgggaacaacacacatcacacttacaacacttaagaacattctcacgatgactgttgaactgggaaaaactgtaagttattttttcttaggatttatttttacttagttggttttttaggtttgttttattattttcttaagtcaggtttattgaggatttaattttccatataacattcaccctttataagtgtatagtttggatggagttttggacaangtataggttacataaccacccaccacattccccantataangcatttcnggttcaccntcaggaagggcccctcatttccctttgtagggggantccccttcntcccaccntcggncccccgttagggnaccaatccggatttccggttcccaggttttgncctttttccggg

SEQ ID NO: 13333 - DNA, 1344 bp, Homo sapiens
gagccaaagcaatgtcaagtttgtccaggatacatccaagttctggtacaagccacacctgtcccgtgaccaagccattgccctgctgaaggacaaggaccctggggccttcctgatcagggacagtcattcattccaaggagcttatgggctggccctcaaggtggccacaccgccacccagtgcccagccctggaaaggggaccccgtggaacagctggtccgccatttcctcatcgagactgggcccaaagggtgaagatcaagggctgcccagtgagcctactttggcagcctgtccgccttggtctcccagcactccatctcccccatctccctgccctgctgcctgcgcattcccagcaaagatcctctggaagagaccccagaggctccagtgcccaccaacatgagcacagcggcagacctcctgcgtcagggtgctgcctgcagcgtgctctacttgacctcagtggagacagagtcactgacgggcccccaagctgtggcccgggccagctctgcagctctgagctgtagcccccgcccgacaccagctgttgtccacttcaaggtgtcagcccagggcattacactgacggacaaccaaaggaagctcttctttcgccgccattatccagtgaacagcatcaccttctccagcactgaccctcaagaccggagatggaccaacccagacgggaccacctccaagatctttggtttcgtggccaagaagccgggaagcccctggggagaatgtgtgtcacctctttgcagagcttgacccagatcagcctgctggcgccattgtcaccttcatcaccaaagttctactgggccagagaaaatgaaggaaggccacaagctcagagcccacatcaacactgcccccctcccagcaccccacagccctcacatcccctggcctggacccaggagacccaggagaaagcaccctcccttaggaatgaggagtgggcatcaggcctgggacactgctctccttccccgcccccagcctgctaagttaagtggacaggcccacaagatgaccttgcatgtgagcagatggcagagatgggtgtgtgaggggtgaggaggcatcagcagttgagccccgaaggagatcaggcagccccacctgcaggagaacgtcagccctccaggggatcagcccctgccagttccacccagctgcaggtgccagcacggcagggatgggagaggggtggggagcgagtcactgcctcctctgagcagagattcagagtaggatcacatgaataggggaaaaaagagagtctatttttgtctaataataaagaatttctataaacttta

SEQ ID NO: 13334 - DNA, 1838 bp, Homo sapiens
ctggaagaattcgcgcccgcaaggacttcgccgtctatggattagaaaatgagtatcaggaagaagggcagcttctgggacagtttcacgtatgatcaggatggggagtcgctccagatgttccaggccctgaaaagacccgacgacacagctttccaatagtggaacttcggattttttctaactggggccatcctgagtatacctgtctgtatcggttcagagttcatggcgaacctgtcaagtgaagacactactcattatttttgtacatttttgtatatactgggacagcgtgaaacactggaatccttcatggacgagggcatatacaatgatgggacagtgccacactccttcaataaacgtggctgctggccagaggacgtgagcgtgtgacgggcgccttggccatgtttgggtgctcactgcctctgcaggtgcagaggggtcagcagcaggagaagcgtgttgaacacgtggctctcagacactccttgtttttaacgggaagctctttgcatttgcatttcctcaacaaaggagcaaagcagaggaagctgagagtctggcgtgttcttgacgctttggtcttcagccttgcactggctcttctaaaggacttttggagggcagataatttcatctgttaaatccaacacacatttctttcagggaaaaacaatgtcaccaaattttcagagttctaaactcctttccttcaagccggaattttccttttttcagcaccagtaggtactaagtctccagatggggaaataactaaaatgtgtttttctgctttgttcgctcttacttctgaggaaggtttccagtcaggactcgctgtaccaatatccatgggagggaatatggggagcgtttcgctctccttgtaggctgaagtcagtctgacttgaaggggcctggtttggatctaagcaaacacccagatggggttctctggtctcagcaaggcttttcctgttgggagtcacagtaaacagaaacccaaaaatctcatcttgggtgttttcagggcttgttttgagttttgctgaatagggagcgcaagacgccctgagcctccctctcactggtggtgataagaggagccgtctggtgtgtcagggtcacgaacccgttacatttcaggacgatcctttttccttcagcagcatttcttactggctgtggctggaatctgccttttatcacagctgtcaccattctcacgtgattcttgtgagactctttttggttataattactatttaatatttagactattttactgaggcagactttataaatgagatatctacaagggcacttaaagtgttacagatgttttaccttaagaattatttaagttgtgttgggttaagacagttttcagtgtaccgtaaatgttgtgttttcagaaaaagacaaaacgatggtgctgactggttttctgtatattgcacaacagtcctcaaatacactgatgtatgaaactattcatacatcaagcagcatttttttcactctccttagaattggaactatgcagttaaggcagataaaatgtacagatgtttcatatattacaggttacatatataaatcaaaatttcctatataaaactgatttgggatttggggtggaaatattttgaatattaatttatttttaaagatgcaagataggactttgtgcaatgtatttttgtaaatgcttttcaaaatatctgtctttggtagtgcttctgctgctgccaccaaattgataagatgctattaagaggtttaaataaagagttttaatttttaaaagggaaaaaaaaaaaaaaaaa

SEQ ID NO: 13335 - DNA, 1423 bp, Homo sapiens
aaacaccccaaggaagatgataggctccatcttgggccacctgagctatagggcaggctaatggaatcaaccatttctgagcactaaatgtatcatgaaaagttgaatggcctgctcataagtttagctcattcactggaaatgtagattgatgttcaatgttaaactggaaggagcttggtttgtgtgtcagtggttatattagtgggtagtgtaacattttatccaggttggggtgaggggagatggccacagtagcaagtggtgacactaaataccattttgaaggctgatgtgtatatacatcattactgtccgtagcaatgaaggatacagtactgtgttgtgggtgagtgttgctattgcccagcattaatatttgggtgtgtatgtttgaggctatgaaacacgcaggagtgtttttgtgctattaattttaagagaaagcagctttttcttaaaattcactgttgagaaacttgcatgtctggaggcggtgtcctctccgccctgtcgggtcctggatgagtacgagttatggtcacggtcacagcctgatctcttatgtgttcatagccattcgctctcccatcagaactgtttgtcctgaatgtgttcctctagttctagaaaatgaccactaatttaaaaaactcggttgtgaggtttgcccagaggcacttgttccagaatttcccctcctgcttcagccatgtccttgttcacttgggcattctaagctaaagttttagcttcccaattcgtgatgtggctagggccaagattcgggagctgttgccagcctcgtcaaatatggaagagaaacaacctgcggtcaaaagggagtgatttgttaagtggtgcgcgtctatctcataactagatgtaccaaccagggaagggccaaggatggaaaggggtaacttttgtgcttccaaagtagctaagcagaagtgggggagcagtttagccagatgatctttgattaggcaaacattgagttttaaagaggctgtcaagttgaggccacttggtccattagctggggccagccaagatcactactcaacggttttccacactgtggcaagattgctcttctagtggaataatgccctaagtttctctgagatgatgtaagtggcatgatgttaccctaagggcttaggcttaagccttgatttctgggcccactgtctgtgttcttaagatgccaacctgttgctttttttttttttttcccccatttaaaaggatagtacctactccctctaaccacctcaccccattcttgaatgacattttatccttcggaaagaacaaggctgtgatgtagtgactattgtctgtgtctcctgtgtgtgtctgtccttgtcacaaatgtattggggacgttggatgcattcatttcctgtaataaagg

SEQ ID NO: 13336 - DNA, 1324 bp, Homo sapiens
tttttttttttttatttgggttttttttctcttaaaaagatttattatcaaaaagtttgctccctttaaatactgagccaattcatcaatgcagctccattctttttaggattattagggcccaaataatttcagactaaaacaagaaataaaaaaactggactataggttcagtaacatattcacagacatgtcagtgtgcactcaggaacactggtttcatttcttgattggaatgcttatcaccataaaatcttctgctagagtcacttcttggagatctaacactgattcagcttgcttttttagttctgcaatgccatctgtttctccttctctggccaaggcaactggtttgtacctctgactgaagtgagtcagaaccagcctctttgcacggcacaactttgcaaatgttgctgccatctgtggtgtgctgtggccatgctcctttgctttgtccatctgggcatcatccagggttgcttcgtggatcaacaggtctgcttcaaagcacagttttactcctccatcacccacaaccccagagcagtcacccaatatgcagatttttcttccaacaataggcttttttaagacatcttggggagaaattgtaaccccattttccagaacaacagaaattccatttttcagcttcccataggcaggacctggtggaacaccaaggtctttaagtttctgtgcattgagtttacctgggcgtttcttttccacgactgaaaacccaaatgagggaattctgtgaaagaggcgaaatgcttttacaacaaattgttcatcatcaaacagaaggtatgagttttcttctgagtctaacaggatagttcttccttgttcctctttgggaggactgtctgctctattcacatgcgcaaattcttttagttcttctgcaggacattgatctgctgtaggaaccagttcatgaaccacataatggaagaccagctcccgtgtgagagagttccatggttcgccagataaagtcccgaagccctacagggccatagatttcaataggctgtttggacaccatggagccactctgcaggctgattgtgcagaggagcccaggaaggccaaagaaatggtctccatgaaggtgtgtgatgaagatcttggtaattctccctgctttaagttggcttttcataagctgtgtctgtgttccctccccacagtcaaagagccagcactcgccttcacaccgaaggaccacagcagaggcaccccgggttggagatgggtatgctgcacccgtccccaggaatgtcacatccatagacatcttccacccctc

SEQ ID NO: 13337 - DNA, 399 bp, Homo sapiens
gggaagggtcggctgattgctgccagaaatggagagctcgttttaaggaaatgcggcgtctcctgggagtgaagaggcttttgggccaccttgaggcatgacgggtgccgcttcgtttccctgcgaccgctgcctgtttcgactgagccccttacaggaggacgtggcgggggcagacgggcgcagcctcccgccctctccgtgactcagggaaacggcctcgccgcagagcgctccctcggcagctggctgcagcactcctcccccgccgggcttcagagtgggtggtttcctacagcctagggagggggcctgaaacggggtttaaaatcttccctgccctcacacaagcccttctgactgttggagaacctgacgcgcggattctaactagaactg

SEQ ID NO: 13338 - DNA, 1102 bp, Homo sapiens
attcggcacaggtggaacgatattctcgaaaggtgtttgtaggcggattgctccagacattgatgaagatgagatcacagctagttttcgtcgctttggccctctgattgtggattggcctcataaagctgagagcaaatcctattttcctcctaaaggctatgcattcctgctgtttcaagatgaaagctctgtgcaggctctcattgatgcatgcattgaagaagatggaaaactctacctttgtgtatcaagtcccactatcaaggataagccagtccagattcggccttggaatctcagtgacagtgactttgtgatggatggttcacagccacttgacccacgaaaaactatatttgttggtggtgttcctcgaccattacgagctgtggagcttgcgatgataatggatcggctatatggaggtgtgtgctacgctgggattgataccgaccctgagctaaaatacccaaaaggagctgggagagttgcgttctctaatcaacagagttacatagctgctatcagtgccccgctttgttcagctgcagcatggagagatagataaacgggtggaagttaagccatatgtcttggatgatcagctgtgtgatgaatgtcagggggcccgttgtggggggaaatttgctccatttttctgtgctaatgttacctgtctgcagtattactgtgaatattgctgggctgctatccattctcgtgctggcagggaattccacaagcccctggtgaaggaaggcggtgaccgccctcggcatatttcattccgctggaactaaaggataactgcagtgctcattttcaggcctcagaataagtgcactcttctgttcattctgaccccttcctcaacctcttcacgctggcatgtccttttgtagcagtctgtaacttaactatagtataatgaaaaagaatgacctataatataggtgttttgtagattcttgtgtcactgcaaacaatatgaactcctttttcgtattgccatcgggttgcatggaagttttattctcttgttttgctggaaaccaagaggatccaaacttcctgcaacattttcttagaggagagagag

SEQ ID NO: 13339 - DNA, 667 bp, Homo sapiens
gggagggggaggggaggggagaggaattgaggagcagaacagaataacacagaaagaaccaaccagagctggaccaaaaatcgaggccaggatgttgtagagtcttgggttcaaattctgcctcctcctgggaagtcccctgagcctgctacaaggtcttggcttgcaccctattgcctctggaggatcctcccaaccagcaccaatgaagcacctaccccatgcagggtccttcagaaacaaagagtgagatagcttccagtctcaggtggggaatatttagacttgtgaacaggggcaaagaaggagagaaacaaccaggaagtaacctccaatttgcagatggggaaaattaagtttcatcaggaggaaatgactttgcctcaggcttctcttgggatcccagatttctagaggatggggggaatgtccctgctttgggcatgtttttaagagcactggaacagccagagctgctgcccacagtctgaagtcaggaggggaactccatgtcagataaaagctttggaatccagatggagtaaggtttcattttctctgcctgcatttggtttcctaacatcacaatgtgagccttggctagcagccagcttagctttggaaaagagtgaatgatggggaaaaaaaaaaaaaaaaaactcggact

SEQ ID NO: 13340 - DNA, 652 bp, Homo sapiens
ccacctaaagaaagtccagaaacctttacttcaggcacccttcctacctccaaaagcccctccaccggtcatcaaaattccagagtgtccttccatggggacaaatgaagctgcctgtttactggacaatcctctatgtgccgatgttctgttcatccttcaggaccaggaacacatctttgcacatcgaatttacctcgctacctcttcttccaaattttatgatctgtttttaatggaatgtgaagaatccccaaatgggagtgaaggagcctgtgagaaagagaagcagagcagagatttccaggggcggatattgagtgtcgacccagaggaagaaagggaggagggcccgcctaggattcctcaggccgaccagtggaagtcttcaaacaagagcctggtggaggctctggggctggaagccgagggtgcagttcctgagacacagactttgaccggatggagtaaggggttcattggcatgcacagggaaatgcaagtcaaccccatttcaaagcggatggggcccatgactgtggtcaggatggacgcttcagtccaccaggcccttttcggaccctgctccagtttctttatacgggacaactggatgaaaaggaaaaggatttggtgggcctggctcaaatcc

SEQ ID NO: 13341 - DNA, 368 bp, Homo sapiens
ccagacagaaaaattagccaaggtttaccagccgaaacgttcagtcttatcccctaaaactactatttctgttgcccatcttttggctgcaaggcaggacttgtcaaagattttaaggacaagcagcggctctataagagaaaagactgcctgtgccatcaataaggtgttgatgggcagggtgcctgacagaggtggtagacccaatgaaatcgaacctccacccccagagatgccaccgtggcagaaggaggcaagatggcccccagcagcaaacaggaggccgaggaggagggagaggtggctatgaacattcctcatacggaggacgaggaggtcatgaacaaggtcgacgcggcgcgaattcc

SEQ ID NO: 13342 - DNA, 1434 bp, Homo sapiens
ttttttttttatccattatgatttattctctacaatacttcgttaaagtgttcaatgatttgcactcagaagttatataaccaagagccacccaagtgtaatacaaagaattggtctgaagtctttgcactgaaggccatatagtctcttgcttcagggaagtaagaacgaaatgtccaaaaagaacacatagctccctaggctccagaatctcaatagaaaataacgtcaacagttagtgaaattgtagatgtcaacacatcatggaaaacagatcttgtgcaaaaattttaacacccaggacttcttttgtatagatgatttttattataaacagtaaaataaatgtaatgtctcaaccaccaacctttcatgttggaagggtctctaacatgagttgttttattattatggagcccccaagttttaagaatctcacagtggaaataatcccccaccgacagactctagtggatccaagacattctcttttaatgtaaaaccagggcaattcataattagcagagaggatgtcctaactgtgggtattatgagacaaaccaactttgccagaccccaaggcactcacagctagggatgaaacgaactccgaaccaagccagagaaattgggctggtccttgaaaacagtggttacctactgtccagctcgagcagcccaaggacaaaggaaacactcagcagaaaacattcccttttctttaaacctaccacgcacaccgcaggtactggccgccctcatcactgctttggtcaagcgtgcagagaaggcagttcagttccagttcggagctatcctctccctatggcaaagctgccacatggatgatccagacttggtatttttcctgagagccacctgctacacactttcatgaggcgacccgtgaccgtacacttctagaccgcttcctgactaggccccgttcaggacggatactgacaatgcccattcctcacggggccaaatggtttcccttggtcgactcctgagtcccctgacaaaagcaagaggaacccaagcatttccattgctggacttgtgtgggagcatgagggaatgtgcagggagtaaggcttcttcactccaaaaaccactgagcccacttcagtgtggtgctgggcctaaccagcccaattcttgtgcactgattttttttttccccatttctcgggttttaaaattttctattcattttcttaaatggcaggtatcggtaccccccctcgataaaataaaataaaataaaataaaataataaaataaaataacataccatacattggagaagacaaatagggcaacatttctacaagaaaaaatcggcttgaggagcatggcactgtaaatgcttgcatgaccagtctcactgagcgtgctcaggggtgaaggtttagcaccaatttttttggg

SEQ ID NO: 13343 - DNA, 572 bp, Homo sapiens
  misc_feature (1)...(572): n = a,t,c or g
atcaaaaaaacagctttgaactcccccttcaaaggaaacagtcgactttcataattagcatctaccattatccccaaatcttattttattcattgacttgaaattttttccaattgcttttttttttttttttaaggttaagagcagaggtttactaggccaaagaaagagaatagctctctgttgcagagaggggtcctggagaaatgggttaccccagttgtcttatttaaatggttacccatcagattttaattttatcttctctttgagagcttggtaataagaagcacttaaatcactccaaagaagactttaaaaagggagcagtgaaaaggtcttaataatttattgattgaattaagaaatactagctaattaagaatctgagtctaaacagcacagattttttctttctgcttttaaattgtgttttaaaaaaagagacagggggctgggcgtgnttnnnnnnnnnnnnnnnnnnnnnnnnnnnnnnnnnnnnnnnnnnnnnnnnnnnnnnnnnnnnnnnnnnnnnnnnnnnnnnnnnnnnnnnnnnnnnactaaagatacat

SEQ ID NO: 13344 - DNA, 3810 bp, Homo sapiens
  misc_feature (1)...(3810): n = a,t,c or g
ttgtttagaatatataatatgatcccatttatttaaaaaataaagattacatatttgcttatatacgcatacaaatttcttgaaaattacataagaaattgttaatagattacctctggagaatagtactggggtaagaggtgagggggcagaattctcattttacagccttatatactgttgtgaatttttttttttaccatgtactttttaaaaatacaaaattgaggagggaacctcctactccaaaattacgaagcattcttttatgtacatttctctaagagttatatttgatatttttcaaggcaaactgacttgaggtactcgatgtttttaaatgtatttctaataattattagtagggtcacacctatttgacagcttttttaaaaagtcacatattgctgtatttttaaagatgacaaacctttatttaaatgagatgcttgctggagattttctttttcaaactcactttttaagttatggaaataatatcactgctgaaagtttggaaaacatatataagggtgccaaaaataccactaaaatcacataaaccaatcttaccattattaatggtgtgatttctttctttacatatctattaatacctagtactatctatgtagaaaatgtgtttgcaaagctgagatcacactgtacctatagctctggatcctgctgctttttcccccaacacttaacagatgctcagtaaacatgttaaaccaagttgttaattagtattgtaccatttctcctcatcaaaaattacttctatagaaggcatttagttggtttccagttcttgagtaaaataaataacacttaatgagtatgtctttacctaaacattgtctgcatttatgatttagaagaagctactggatcaaacggtatgaaatattttaagtttctgataaatgtttttcagaagaattatactgggttttcactcctaccaacagcgcagcctgtgttgctgtttccttgccaacactgtcaccattttaaaaagtcactgttatttcacaggtaaaaaatagaaagtttgctctgagaaaatttcttcctcccattacaaaataaagtcacagtctttccgtatgtccactctagagtgctatcttccaatctaaaacagaggaactgttttcaaacatcattagtttagcggtctccactaacaaagacatacggataaagtaacatgtaagtcagattaagaatctcaactttttaagaaaaaccaaatgactaaaggcatatttttattctatactttttgtcctataggtactctaggtccttgtgtaattattgaggacaaaacgtcagttaaaggtgagagggaaaactaggttgcagactagcagctgttttgcatctcacaagaacaaaggccttaacaaaccgtatactttatgcaaacaaagtgatgcctcactgacttaggagacaagtcacatgccatcagtgtgtcagaaaatttctttcttcagtgatagttaaggtaacctcgccagctactttccagagacagctccagggcaatactggggaaaaaaaaaatcagagacataggacctcaatagagccctgtgcaacaaaaagatgctagataacaaaactcaaagcaaaactaagatcattccaatttaggggaaagtttttttattcagtgtttaagattaaaaactacaagattttgcttgcagctgatgagtaaaaagagaagttaaacataaattctcatctgagtggctagttaaaatgctctgacaccgagtcaagttactcagtgacataccagttactttgggcttaagagtcttggagcaaagtagctctaaacaaaacgtgtcatctgaagcatagggctaatgggcatatgaaatactaaataagaagctgatggaggcaggctgtggcagatttttggttcttttagggttctagcagtggttgccatataagcaaggacctagcagagagttatttcctgtctttacttttctgagttaaacaccttcaacccacacccactaagcaggaataaagagacattttatagaccagttggaaaatataaagcagtcccacttctccagtagaattttagttgaattaaatcataagagaaacaatgattattgcacatattatacttgtcacactacatctgttgagtggaatttccattccaagtgttgttttcatcttcaccatcatcttgagtccttaatctataaattttcccctcctttttaaagtcgtctccacgtttttccagcactctttttctcactggttcccttttttctgatttgctagatgatgcagggtttgggggttctgacgatgttactctcactgaagtctgtgtgggaggcggattactaaacaagaaattgctaattaatctccagatggcaaggaatggataaagcactgttcccaacaaggtccaaatgtctccgctggaagagtgtacaatggatgcagttggtcttcctgctggcaacagtaccaccgaagcgcttggggcaagttccaaatccagtaacttctttttataatcttctttggtaaattccctcctgggaaacatggttgctaacgaaaaattaccgtaagtgttgccaacagtctgtgcagcaaactgccttgcctcttctagaggagcatcagaagggaactgatttgtaaaggaagaaccatcaggaagacggaattgaattcttgcaacagtgcttctttctcttgcataagattccctcttgacttccatttctgcctgttttgctagcaagggcagcagctttggcagcctctacttcttcctttgtctttgcaaaacgagcagctctctctgcacggtccaatgcaatctgctgttttatacgttctcgagctgccctatcttctgctttctctctgtttctttcctccagcattctttttgttaattcttcttcttgttttcttttataatccaacatttcttttccagtttttctcctctcaatttccttcttaatttctctctgttcttcctcttttcttttctcttctctcctttcttcaagtttttttgttagtctttccactcggatgttgaggtcctctgcaggtctctgatctgagcatccactagtctttccactcggatgttgaggtcctctgcaggtctctgatctgagcatccactaggctcctgagaggaagtggcatggcctgcactttctcctcctgttgcagtatctgactttgtatcagaagtgggtggtatctcacaaagctctgcatttctggactgagagttttcacaagtgttgttaggttcaaatgacgcagatggagtagacactgaactttctgactgactgccatttgctactgatgtttcactttttagcaaatgcatctgtcggaccttgtgaattcttgtaacaagttcatctgcagaaacacttcctgctattacttccaagggaattccactgtctccaataaagaaactggatggaacacacactacaggatagatttgtgaaaactgtaggcaggcttcacttttggtatcgattttaatagcaacaaaactgtttgaagatgcttctgtaactttatcatcttcccaacttgcagccatctgtgtagactgttcatcatcacctgccacgaacaccacgaagaccgcgccgctccttttggccgtcgcgatggcggccggaatggcgccctggaaccagngtcatcngctctnntggcccaggtgctcgctcggtgtgtaanctccgc

SEQ ID NO: 13345 - DNA, 450 bp, Homo sapiens
  misc_feature (1)...(450): n = a,t,c or g
gggcacctgcaaggtgtttctcagcaagattgaggaccgtgtttcagggcgtggggcattgggctttgtccacatgggctggcctgaagcccagccggctactgccacagcgggcttctcccaggctgctctcggtcggccgtgcggacctcgccaagcatcaggaactcccggggaagaagctgctctctgagaaaaagctgaaaaggtactttgtggactatcggagagtgcttgtctgtggaggaaacggaggcgctggggcaagctgcttccacagtgagccccgcaaggagtttggaggccctgatggaggggacggaggcaacggtggacacgtcattctgagagttgaccagcaagtcaagtccctgtcgtcggtcctgtcgcggtaccagggttccattgggaaaantgggaangttaaaangnctncggggcaattgggcc

SEQ ID NO: 13346 - DNA, 1884 bp, Homo sapiens
ctgacactgaacgccgcttgtcccctccggcttgccgtcctcgcagccatggcggccgccgcgctcccagcatggctgtctctgcagtcgagggcaaggactctgcgtgcattctccactgccgtctactcggccactccggtcccgacacctagcctgccggaaagaacacccggaaatgaaaggccaccaagaagaaaggcactacctcctaggacagagaaaatggctgttgaccaggactggcctagtgtttacccagttgcagcaccatttaaaccctctgcagtacctcttcctgttcgaatgggttatccagtaaaaaagggcgtgcccatggcaaaggagggaaatctagaacttttaaagattcccaattttctgcatttgactcctgtaggcaattaaaaagcactgtgaagcccttaaagatttttgcactgagtgggccagccgcactgggacagtggacgaggaaatgttgaggaaggctttttccatttgaatttgacagcactgattatgtttcatcaggaccatctgttcggaaccccagagcacgagtagtagtcttaagagtaaagctttccagtttgaatttagatgatcacgcaaagaagaaattaattaaacttgtaggagagcgatactgcaagaccacagatgtgcttaccatcaaaacagataggtgccctttaaggaggcagaattacgattatgcagtgtatctactaacagtgttataccatgagtcttggaatactgaagaatggggaaaaaagtaagactgaagcagacatggaagagtatatatgggaaaatagctcatcagaaagaaatatcctggaaacgcttctccagatgaaagctgctgagaaaaatatggaaataaataaagaagagctccttggtactaaagaaattgaagagtacaaaaagtctgttgttagtcttaaaaatgaggaggaaaatgaaaattccatttctcagtacaaagaatccgtgaagagactattaaatgtgacatgaattatggagtagaaaaatctgcttgatttattaattttatgatatatgtgatccagtatctaatttgatataaaattgaaaatgttaaaaaatcattttttttcctcagagttaaaattatttccctcatactaatgcttaatggcaatgattactccagagttttttaatttttacactggggcaatagactaggaggtctctgatttcttcttggtctaaagtgttttgattttatttctacataatagctttggtattcatgtatatacatgcatttaattgtgattttatcacctttcccatttctttccccacaagctggcatttcagtagttgcttttgaataatggttttggttacctgggaaggcaggcccagaacccatttccttgacttgcagttccgggctgtgttcacatgactgctgtctagctgatgcatttttcacatttgtcaactctggttagaaacaggtcctcaggagtattctctaacctgatattttctaaaaagatatgttgattcaactttgtttagcatcctactttctagattgtggggctcattttgccagggccaagctaccagaaaagtagaagtggagattacctggtatgtatctctctgggtgccccagttagagctgccacagctcaggaaaaagatgaggcataacgaccttgaatgtaattggagtaagtgacaaaataagaactaccctgggaaaccctgcattcaatgtagctgtcaattcagtatttttaagtacacctgtcagctgtttcttaccacttcgatggttgtgattaatttaaaatcaaaataaaggaattactgagtttaaaaaaaaaa

SEQ ID NO: 13347 - DNA, 1423 bp, Homo sapiens
tcggcggcattacctgtacccattcaccggcggctaccggcggcggcgcgcagtgttcaggcggagagacccgccgccaggaatgaatctgaagtctgctgcagtaaaacacagaaggctttaaaatgttttcttgcataaaattcaaaacttttaagtagctgcttatgagaatagggaaggcagaaagctaatgtctgtctcaagatacaggacagctgtttgctcatcaacctcaactgtgtgtgcaactgaggaacatggctcaagaaactaatcacagccaagtgcctatgctttgttccactggctgtggattttatggaaaccctcgtacaaatggcatgtgttcagtatgctataaagaacatcttcaaagacagaatagtagtaatggtagaataagcccacctgcaacctctgtcagtagtctgtctgaatctttaccagttcaatgcacagatggcagtgtgccagaagcccagtcagcattagactctacatcttcatctatgcagcccagccctggtatcaaatcagtcacttttatcagaatctgtagcatcttctcaattggacagtacatctgtggacaaagcagtacctgaaacagaagatgtgcaggcttcagtatcagacacagcacagcagccatctgaagagcaaagcaagtctcttgaaaaaccgaaacaaaaaaagaatcgctgtttcatgtgcaggaagaaagtgggacttactgggtttgaatgccggtgtggaaatgtttactgtggtgtacaccgttactcagatgtacacaattgctcttacaattacaaagccgatgctgctgagaaaatcagaaaagaaaatccagtagttgttggtgaaaagatccaaaagatttgaactcctgctggaatacaaaattcttgagcatctgcaaactaaaaattgacttgaggttttttttttcctagtcattgggaatgtagagcagtgtatcttgcatgtcatcggaagaatagatttttgttttggttttgttttgaaaatgactctgaacatttatttccattgcaatttctgtggctgaggagacttaaactttacaagtattatccttttaagatcattttaattttagttgagtgcagagggcttttataacaaacgtgcagaaattttggagggctgtgatttttccagtattaaacatgcatgcattaatcttgcagtttattttctcattgtgtatgtatatatcgcttttctctgcagcacgatttctcttttgataatgccctttagcgacaactagttatcagtaactgaatgtatcttaatcattatggctgcttctgttttttcattaacaaaggttattcatatgttagcatatagtttctttgcacccactatttatgtctgaatcatttgtcac

SEQ ID NO: 13348 - DNA, 737 bp, Homo sapiens
gggaggaaagggaactgaacgcggttctgggagcagcaagcccacgggtagcagccgaggccccagaatggccaagtttctttcccaagaccaaattaatgagtacaaggaatgcttctccctgtatgacaagcagcagagggggaagataaaagccaccgacctcatggtggccatgaggtgcctgggggccagcccgacgccaggggaggtgcagcggcacctgcagacccacgggatagacggaaatggagagctggatttctccacttttctgaccattatgcacatgcaaataaaacaagaagacccaaagaaagaaattcttctagccatgttgatggtggacaaggagaagaaaggttacgtcatggcgtccgacctgcggtcaaaactcacgagtctgggggagaagctcacccacaaggaagtggatgatctcttcagggaagcagatatcgaacccaatggcaaagtgaagtatgatgaatttatccacaagatcacccttcctggacgggactattgaaggaggagaatgggagagcctcccctgggcctgaaaacttggagcaattaattttttttaaaaagtgttcttttcacttgggagagatggcaaacacagtggcaagacaacattacccaactatagaagagaggctaactagcaacaataatagatgatttcagccatggtatgagtagatctttaataaaagatttgtattgatttt

SEQ ID NO: 13349 - DNA, 1684 bp, Homo sapiens
  misc_feature (1)...(1684): n = a,t,c or g
gacagcagaggtggtacacagagaagatgcctgctctggcagtgagggagggattcgtggaagctgcaggagccatcttttcatcctcggaggtggtggcctgggatgtagcagataccaacgcagagggaggcagaagacactgggtgaaattgctcacctgctgccaatgccaataccactggacttttcactttcataagccaagaaatttccgttaactgattaaacaaattgcctttattgttaaaccaatgattggatatcagaaacagcctaggctaatatagctccttttgggataaaagtaggaagcctcacattcacctttaatgttatttcactttttccaaaatcaatttcctgggcaccacacaaacaaggaacactgggtaaatgtatcacctggaactgcagggccacacatgcttcacgagtgtgtccctgccgtaggtgggcttttgaagccattattacatgggttctccagctctcgtggggggccaggggcttctgtgtgctcttcaaagccttcacccattgggcctctgtccatctttccagcctgggggacccaatatttgccccacaaggcccaggcaggagggcctccagcacggngcagccctgaccacactgtgagcagctcacttggcaagggtgaagggccggagtggcgtcctcctgatgtggcttccttccagcctctacccacccctgggggcctcctcccaaggagcaaggtggttagatgtcctcttgtgccccacacacacggcagggtggtaggagggatgaaccggaaaccagtccatgcttctggccccaccctgggaccccaaggtttcttctcaggcaacaaggagcacacaaagtgagcccctgtacacaggtggctgggatatgttcatcttccacagggaggccagtgctggggatgaggacaaaggcctacgcccagtcccagctctgacactgccttgctgagtcacccatcagccctaacgcttcctggacgaaacaagcagatagggtgccccagagaggagctgtgtcactaagggccaggacaccccatctctgggtcacacttggccacggcttcatttttggcttcagtttgtttactgaacagaagggagaggggccctgtgagacagaggacactgactcaggtcggtgagtggccctcactgtatagagtccatggctggggaccaagtggcactgagactcgcccaaagtcacatcacagagctggggtgccttgctgactccctggccccaatctgcttttccatttgtcgaacgcacactggcacactggctgcagcagctgcgggggtcggggggttccagggctggctgtcactcggcctcctgcagaggtaagctgagggctatgttggacccgccagaagtcaggtgacagctgctttccctttcaggatcgggagggagtcacctgagggtatattctcagtgggctaaacatgacatgcgagagcccagctctccaagcggccccttcctccttctcacaccaaggcactttcagaagccgctggattccgactggggctgtgccacttcatcgccggtgcctctgctgtgccggctctcctcttctgagggtgtggaagcaaacccaggtcaagctgtgaggagtgcctagcacctggcc

SEQ ID NO: 13350 - DNA, 848 bp, Homo sapiens
gggggcgggcagaagttggaaacatgcggctgtcggtcgctgcagcgatctcccatggccgcgtatttcgccgtatgggcctcggtcccgagtcccgcatccatctgttgcggaacttgctcacagggctggtgcggcacgaacgcatcgaggcaccatgggcgcgtgtggacgaaatgaggggctacgcggagaagctcatcgactatgggaagctgggagacactaacgaacgagccatgcgcatggctgacttctggctcacagagaaggatttgatcccaaagctgtttcaagtactggcccctcggtacaaagatcaaactgggggctacacaagaatgctgcagatcccaaatcggagtttggatcgggccaagatggcagtgatcgagtataaagggaattgcctcccacccctgcctctgcctcgcagagacagccaccttacactcctaaaccagctgctgcagggtttgcggcaggacctcaggcaaagccaggaagcaagcaaccacagctcccacacagctcaaacaccagggatttaactggatctgaagagtctgcagcccttaatcagtacccatgatcacaggcctttggagcacttttactctctgagaagaactggagctagagatgtaaaatggacagtcttgatggggttgagaaccttctggggagccagatgaccctctctttgcacaatagataaaagtctttatatgaatatatataaatttatttattttttccttcctgtgggatttctggagaatgagaattatccaaatgctcagtctacctgagatagtaaattcatggcttatgcttctggtccttaa

SEQ ID NO: 13351 - DNA, 1175 bp, Homo sapiens
gatacctctgtggtatgagtatttcagggaaaaagaaagcaggcatggcacccattcgattttccctgacagcatctgagatccttttggggagacgctgaggagtgtttgctgccatgtactcttacagctctatgctgacactcccatttgatgtggtccagaacttagacctcagtccttggatcagccctgtggtccctgcaagcaggggcatctttctgcatgtgagccagcccccttcctgttcaagggttctgctggatctgggcttttcctgtccttcacttctgggatgattcaccccacatcttccagtaccctgtaaaccattttaaaatatttaagaaaactatcctcccaaaaatgcttttgaaaatgagagccctctgtccctgccacttacagctagtctctttgggataggggtgtatgtggagagattcatgtaagtctcacatgagtgacctggtgcccctatgtgtactaatgtgtgtactgggtcagaaggtgccctgggttcccacagaccttggtttcctgcctgggtgggtgggagggagggaacttcagagagtatgtgcgaacagccatagcagagccacccctgccaaggacccagtgagggaaactcaggagcaggtggttggttcagttcccgcgctgatgtctggggcagtgcatgtgtgagaagagaggcgcaaagcagtgaaaggagtgatttggcatccagagggcccgggagccccacggataccccagggaagccactgactcacaccgctgcagaggctcctgggcccaatgcccgacccctgctggccagcatggggcctagcactggaagatgcctcaggtgtgtttggagtgggggaaacggaagtagggcacgctctcagagaccaggatagagagtcagggaacctgggaaagagtagtgccagttccgggtaggctgctgcaccaggccctaccagctcaggctataaacagtctgctttgccccaagtcttttccgtccacccccaacagccttgtcatcacttagctactgatcacgcccatggcttgacattggagggttacattagtggagtcccgccacagcttcgaaccctctccccagatgccctttgcctctgctgtggccctggggttttatcaactgtcccctt

SEQ ID NO: 13352 - DNA, 796 bp, Homo sapiens
ctcatcgactccagcatcatgattacctcccagatactattttttggatttgggtggcttttcttcatgcgccaattgtttaaagactatgagatacgtcagtatgttgtacaggtgatcttctccgtgacgtttgcattttcttgcaccatgtttgagctcatcatctttgaaatcttaggagtattgaatagcagctcccgttattttcactggaaaatgaacctgtgtgtaattctgctgatcctggttttcatggtgcctttttacattggctattttattgtgagcaatatccgactacttttgtctcctctgtctcaggtggcataaacaacgactgcttttttcctgtctcttatggctgacctttatgtatttcttctggaaactaggagatccctttcccattctcagcccaaaacatgggatcttatccatagaacagctcatcagccgggttggtgtgattggagtgactctcatggctcttctttctggatttggtgctgtcaactgcccatacacttacatgtcttacttcctcaggaatgtgactgacacggatattctagccctggaacggcgactgctgcaaaccatggatatgatcataagcaaaaagaaaaggatggcaatggcacggagaacaatgttccagaagggggaagtgcataacaaaccatcaggtttctggggaatgataaaaagtgttaccacttcagcatcaggaagtgaaacttcactttccttatgtgcaaaatggataacaccatggcataagacaatcccatga

SEQ ID NO: 13353 - DNA, 597 bp, Homo sapiens
gagcttttggtctttattttgaaatgacctacattttaactcagcccagaccttatttttctcatttttatgaaataagctcaaggtttgccaatctagaccagaaatctcaaactcctaagtaaaacaattataagcacttaacacctatcttatcctgaagtcctggaatgtcagagttggaagagatcttagagctcattttgttttatctcctcattgtatggataaagtgtagtgcaaaagagtgagttctaggccagaggtaggccaataatttaattttcccaactcacgggccaaggttctttccactgcaccataatactgatccccaattttaaggttccttgtctgtccttctaaaccatcaattcactcaacaactgcttaagtgtatatagtatgtgcacatctgtgccatttgttgggtatgcaaagtctaaaagacagggtgcctgccctgagatgctcatgacctaattcaaatgcatccttcctgtccctctccccacttctcctggatcttctcatctgtatccttttccacgtttgtaaatataaattcaatagaaataaacagttttatatatggca

SEQ ID NO: 13354 - DNA, 1453 bp, Homo sapiens
  misc_feature (1)...(1453): n = a,t,c or g
tcacacttaacccatctgttttctctaatgcacgacagattcctttcagacaggacaactgtgatatttcagttcctgattgtaaatacctcctaagcctgaagcttctgttactagccattgtgagcttcagtttcttcatctgcaaaatgggcataatacaatctattcttgccacatcaagggattgttattcctttaaaaaaaaaccaataccaaagaagcctacaatgttggccttagccaaaattctgttgatttcaacgttgttttattcacttctatcggggagccatggaaaagaaaatcaagacataaacacaacacagaacattgcagaagtttttaaaacaatgggaaaataaacctatttctttgggaaagtgaagcaaacttaaactcagataaagaaaatataaccacctcaaatctcaaggcgagtcattcccctcctttgaatctacccaacaacagccacggaataacagatttctccagtaactcgtccagcagagcattctttgggcagtctaaaacccacatctaccatttccacaagccctcccttgatccatagctttgtttctaaagtgccttggaatgcacctatagcagatgaagatcttttgcccatctcagcacatcccaatgctacacctgctctgtcttcagaaaacttcacttggtctttggtcaatgacaccgtgaaaactcctgataacagttccattacagttagcatcctctcttcagaaccaacttctccatctgtgacccccttgatagtggaaccaagtggatggcttaccacaaacagtgatagcttcactgggtttaccccttatcaagaaaaaacaactctacagcctaccttaaaattcaccaataattcaaaactctttccaaatacgtcagatccccaaaaaggaaaataggaaatacagggaataggtattcggggccattttagggtgctattctggggtgtctcattgcttactcttgtgggggctacttgttgtgtggaaaaaggaaaacggattcattttcccatcggcgactttatgacgacagaaatgaaccagttctgcgattagacaatgcaccggaaccttatgatgtgagttttgggaattctagctactacaatccaactttgaatgattcagccatgccagaaagtgaagaaaatgcacgtgatggcattcctatggatgacatacctccacttcgtacttctgtatagaactaacagcaaaaaggcgttaaacagcaagtgtcatctacatcctaggccttttgacaaattcatctttccaaaagggttacacaaaatttactgttcacgtgggttttgtcaagggaggaattcttaaaagccgggagaccngttggcaggaattgttggacagggttgttttcctnccaaaggtttttctttcttacatttttt

SEQ ID NO: 13355 - DNA, 464 bp, Homo sapiens
ggcgcccagtggcactgtgagcgattcggaaagtagtaacagcagtagcgatgcggaggagctggagcggtgccgcgaggcggcaatgccggcttggggcttggagcaacgcccgcacgtggcagggaagccaagagccggtgctgcaaatagccagttgtcaacctcccaaccgagcctcaggcataaggtgaatgagcatgaacaagatggcaacgagcttcagaccacccctgaattccgagcccacgtagccaagaagctgggagccctgctggacagcttcattaccatctcagaagcagcaaaggagccagcaaaagctaaggtacagaaagtcgctttggaggatgatggtttccgccttttcttcacatctgtccctggaggccgttgagaaggaagagtctccccaaccccgccgaaagcgacagccctccagcttccagtgaggacagtgacgg

SEQ ID NO: 13356 - DNA, 678 bp, Homo sapiens
tttttttcactttctctgaattcatttatttagaggtaaaacacagccattcaaaattgtggaatacaatgtctacacacagaataaggttggggaattaagctgaattgttatattccattcacattaataaatatttttaaagaagaaattgtagattttaaaagcttcattagacactagtgacacatacaaataactaaactctcatactgcttgattttcaggttgaaaggttacaataatctatatatttcaattacatggcagtaaatacaaaagcattttaaacatcttttgaactgtgtagtatactataagcaggagtttattctaaaacattccatcattcttctgacctgtttatgggtcatgctggacaccagcaatccacatcacataaattatccaccagtaatgaggtgtaaaatcaattatgcatgtattttgaatagaaattatttttaaatgtcagagagaatgctattattggccaacttgaaatttcctaattagctatctgagctatttaagtctgtacttcagtgtcttcatttttttaaatgagagaactggactagattttatataagtacctactaaagcctagtgttttgcagttacttccttccctgtcaaaattttgcctcctttgattttcaatatatatatattttc

SEQ ID NO: 13357 - DNA, 622 bp, Homo sapiens
  misc_feature (1)...(622): n = a,t,c or g
ggtattttcccttgtattaaaagctagaaatctgtctgttaatttccattccttggtcttaggcagtggagtgctttgtcataatttccgaccagggtgtccttctgctctgccagaaatcacgcctctcgccatctgttctctgcttaatactcttcaacagtcccgtgtgaccacaggagtccagggtcttaagctcttttggcctccgtccctgtaggcgtcccctcaggatcctgcacgccccgctttgaggaaagcagtgggattttgctttttgttttggaagccatgttgtgtggtctgtggacctgcttgctttttttgaatgtgagctgctctcaaatctccatcatttgcaccttgcctatttgaaatgttttaaatctaaacagaagacttgtgtattccagggaagctgcgctggttgtgatctgctctttagtcaagagacggtgatgaagtttgtgccgcggtacagcctcgtcctagaactcagcgacaggntngccttccggagaagcctgcatgatcccgatgggctggtggccacctacatcagcgaggtgcacgaacacgatgggcacctgtacctgggctctttcaggtcccccttcctctg

SEQ ID NO: 13358 - DNA, 1996 bp, Homo sapiens
  misc_feature (1)...(1996): n = a,t,c or g
ttttttttttcaacctctgaaatagctttttattaaacggcaaagcagaactgcaacacaatttaaatgtctgtaaattaggtcacaaaagggatgcaaaatgtttgcagtttgactattatatattcacacagctaaagtcattcatcaactcttacaccaatacataagattattccatgattaaaagcccaaatctaataaccttaagctacattagtggatctcttttcatattataagattttagcaatacttccaatattgatttccttaccaaatggaatctagaagctaaatttttaaaaattgttaaaggatgactaaaactcttcaaacccagtagcagggtttacagaaaattctagaacaagtgagataaaatactgagcaagataataagtatacatgtataactttcccattttattcactattctaatactaatacaccattacggaattttgcagaagttgacccactgggtacaaatcaacttagagaccaaactctttgtaactgttctcatccagatgtggctaacataagggtagtcaaacttaatccactttcatatatatttcccaaaagatctactctgtgccagagaaaacacaaatctggagtgaaaatatttggttactactgtttaccgagtacttttccaccctatttccatttttcctcaaaattttctattttaacatacacatgaccagaaattatatattttcagataatacaaaatgagttattttgggcaaaaagaagtttttaacaacaaatattcccaagttaattcagtttcaaagaaaaaccttcatttttagcctccatctatttccaattaattaaagagacactagcattcctatcttaacactaaatacacaaatgacaagccctagctgagacagtatcttattttggttaagtttcaacaattaaaatacaggttactctcagagatgattaactattaaaattacttttacaaatgtgacaccaatttttttccttagcggaagggaaataggaaggaagaggcaaatggagaagaggcacaagatggtggacagggtacataaagctgtgcatttagtacatgattttggtcactttttcacaacacggtggttattttctgtatatcttactaatcctataataaaagacagtgctaaacctacaaattcaataaaacattcatctttaagtttccataaatatatggcaattcctaatccataaagtctctacaatacatttgcacgttttccatagactaacataatacacaaacttatggaagtctcctgttattgtgttatttttgtctacatctgacattatcttcataaatattcaatgaagccacaaaggtactgtaacttttggaatctatccaagttttaaagaaaaaatgatcagcagcaattccataaaacagaagggtgtcaatcccttactttccttttgcctttttgtgtcagttgtttgaaaaacactagaagctgacatgagattttctatatattgtccaagaacttggttttctgattttagcttcagattttcttccttaactgcatctactcttgcagagagatcttcaagtgtggtgttggagttccaacacttgattaataagtcttgttttttcctccagttccacttgattttcagcatcaactgcatccatgtcagcattcatcatcttgggtaacaaacttttgggccttggatacaaaattcttgaggaatggtcttccgcttgaggcgccgggagaaggagggatccggccgacacctcaggccgggacacttggaccaactgaccccggcagctccgcccactccgcccacagaacgtgcgccgtgagaagaatcccatcccgtcccagccgctcgcccgccactcgtgccnnnnnnnnnnnnnnnnnnnnnnnnnnnnnnnnnnnnnnnnnnnnnnnnnnnnnnnnnngtcatagaagt

SEQ ID NO: 13359 - DNA, 988 bp, Homo sapiens
gcttcaagctggaccacgcctgggctggcattgcccgggccgtggttgaaggccggcttcaggtggccaaggtgagcccacgtgccaaggagggtgggcgccaggtcatctgtgtttacacggacgacttcacggaccgcttgggtgtactggaggcggattcagccatccgtgcagcgggcattaagtgcctgctcacctacaagcctgatgtctacacctacctgggcatctaccgggccaatcgctggcacctctgccccactctctatgagagccgtttccagcttgggggtagtgcccgtggctcccgagtgcttgaccgtgccaacaacgtggaactgacctagaggggccaaattggggagactgcccactcccccctccatgctggggttggatcctcctgtcttcctccttgtcccatgaaggccacaccccccagctctggggactcctaggtcacttgggaactacctgcatcttcagtccccttgaacttctgccctctgttcagggctgacacaagccccacaggctggggggctccggttccctgagggatgagccttcagcctccctttgtaatgctgctcctctccactgcccagcaccatgagttgggtgcagacacctagaaggagagacttcttggaacgctcatcccccgctatacctccccttcctcctgcatctccccttctttccttccccctcaggagagagaaaacttagtgcttccagcccttcttggagccttcatggtccaggggtaggggccccactggcctgagcatgccattttgaggggagggtagttgtgcctacttatcccctggcagaggggatgccaggaccatggacatgaggcttgcccatccctgccaacttacacagcctgtaccactgtccccccttccttggctactttgacatgtgcctgctcctggcatttcaataaaacccggcttgggtctgaaaaaaaaaa

SEQ ID NO: 13360 - DNA, 551 bp, Homo sapiens
gtaaactggagatcacagaagtcaagactgcaagctcccctgaagagaatccaactcaacctgcacacttgacaagtggagaaacagaagctcagagagagcactgggtttgttcaggaccacccagaaggtgtcacacggggtttccccactctttctgatatattgccttacagacctacctcaaacacactgtttccaccctcttcttgaatgtattcagtagcctttactgaatgtgtgtcttgagagtagaaaaatggaggatacaagaaaaggagcaggaagaaatttgcaaaaatccaagagcacctttgctcccccttatcctccttcctcttcccctttctagttcccctacctctctatctttctattctcaccaataatctctttgttgcatgaatttacccaggagagtcctatatttccattggtggctccacagtggtggctgtcagacccgaaggggtggggagccaagggtggactttaagcatggtgacagatggtattttgggcagaaagctcttagacaatggactatccaa

SEQ ID NO: 13361 - DNA, 583 bp, Homo sapiens
gacggagcgccggagcggagggagccggggctgggagttctcctgagggaagaggagtggagtagggggaacgcggcggcggcgttgacaatgagttttcttggaggcttttttggtccaatttgtgagatcgatattgttcttaatgatggggaaaccaggaaaatggcagaaatgaaaactgaagatggcaaagtagaaaaacactatctcttctatgacggagaatccgtttcaggaaaggtaaacctagcctttaagcaacctggaaagaggctagaacaccaaggaattagaattgaatttgtaggtcaaattgaacttttcaatgacaagagtaatactcatgaatttgtaaacctagtgaaagaactagccttacctggagaactgactcagagcagaagttatgattttgaatttatgcaagttgaaaagccatatgaatcttacatcggtgccaatgtccgcttgaggtattttcttaaagtgacaatagtgagaagactgacagatttggtaaaagagtatgatcttattgttcaccagcttgccacctatcctgatgttaacaactctatta

SEQ ID NO: 13362 - DNA, 272 bp, Homo sapiens
gttcaacgaggtcctggctgcctctaacctgggaccctgcagccctgacgctggtgtcccgcaagctggaggatgttccttgagtcgaagaacagcaccatcaaggacctgcagtatgagctggcccaggtctgtaaggcccataacggacccttgcgcacgtatgaggcaaagctgctggccttcgggatccctctggacaacgtgggcttcaagcccttggaaacagctgtgatcggacagacgctgggccagggccccgcgggacttgg

SEQ ID NO: 13363 - DNA, 967 bp, Homo sapiens
gatactaaaaataatctcgttttttaagtttggaattgggagaatgtcattgaagtttttcagtgcttgtttttgagatacacatactttgccttaaatctggggttttttcccttaagccatgtgaccctttctacaaactcagtgtatgtttttaatatttcctgggtactctgctatcgtcctaatacataatattagggtaaggctgccctaatacgagaacattttgagtatactattgagtatacatttgagtatacatattgagtatactatttatgccaacgtgaaggatgtgattagttttagccttcaagtcataatacataccatgcttgaaagcatttaaaaaggaatagagtaattttttttcccattccacttggaagctgtgtacctcaagtgtgtgcacatttacaaatgggtgaaacataacttatgttagtccaagcttgatttgacttcagttctgcttcaacgttttagtagatagggcactgaactggatgctgaaagcgtgggatctctttctgttgcttcacttccaacagtgtggtttcaggtaatacgacatgtttgttacttggtttgctgatctatgtgttgggaacaatgctcaccacaggaggattgactacataccctgctttcatagcttgtgtgtatttatccagtgccctaatagttgatactgccagtgatttactcctgtggagtaaaggtaagcatgttttagtttctggagtattatattgtacgttggagctaggtatttaagaatatttgggggtggagagggaagactccaatttactggtggtgcttggccagtaatcaaggtgacagtttaagtattgggtcttgcactgtaaactcctgcttatctagacttcagactaccacagagcccacacagccagggaagtctgtctccccatttagtctttattgagcaagattggat

SEQ ID NO: 13364 - DNA, 377 bp, Homo sapiens
caaaatcagaaacctggcaagtccaaactgcgtgaaaccaaaaattttttttgatactgatgatgatgacgatatgccacacagtacttccaggtggagggataccgccaatgacaatgagggccactcggatggcctggcaagaagagggagaggcgagagttcaagtggctatcccgagccaaagtaccctgaagacaaacgggaagcgaggagtgaccaagtgaaaccagaaaaggtgccgagacgacgacgcaccatggccgaccctgacttctggacgcacagtgatgattactacaaatactgcgacgaagactctgacagtgacaaagagtggattgctgctctgcgtcggaaatatcgaaccgagagca

SEQ ID NO: 13365 - DNA, 741 bp, Homo sapiens
tttttttttttttttgaatgacacccataacagctttattttcaaaggcgggatccctccccgggcttgtgatgggacggcgctgtgggcccgagcagcagagccgtgcaggacaggcatgggcaggggtggggcagcctggcccgggagcgccggcaggtcccagaagacacctcacacgggttccatctgcagctcctccccgtccacagcctcaatctggtggaaggcagcgtgggagccgatgaccaccagggtggctcccagcacccagaagacggccgagcccgcaccagccagccagaagaaggggaaggagatgcctccagccagagcatactgatgcgctgggctcacctctcggccaaagagcacaagcttggactccaaggtgcgcagatagagaatgtaacaggcgccgaaaaagacagccagagccaccagcaacataggggacgtcaccacacagtacaggatgaggcccaggaacacgaacacatagttgctctggtagtactccacgttgcgtacgaggcgctggcacagctctcccaggttgcggggccgtgagaagcgctgctggtccacgaaggtgctccagggccggatggtcgcgcggcgccgctccagccactcccggcctgcaccggagggaatcagcttcggcagcagggtcgtgccgctcagcccttccgcctcggcatctttctgctggtccttctgcgctgccatgtttgcgtc

SEQ ID NO: 13366 - DNA, 742 bp, Homo sapiens
aagaatgcaggctttgagcaatagttttattacttgtcacaaataaagcaccgggcatagtctccaaagcaggaaagtgacaggagggttttatggggtgatagagagggaagagggtatgtcgttgcatggaaaggggttgcagttgtgcagatgctggcggtgggagagacagtaaaaagctggaggtgaagctttggaactcttttatcactgtggtgggtctttctttctgggggtcagaatgtctcagttcttttgaaagtcccatgaaattcagggacttccctccaaggaaaagcacagaatcttgcaggaaattactgggtttttttcacatcattggttgtccatgaatcccaggttgacaatttttgctctaccaggacaaacagtatgtttatgaagatacacacgattcactaatttcaatattatgtgccagggactatgactggactaatttataattctgaacaagaaacatgctcccttgtcctcacagaggttaaacgtagtatggatactgaaattagacaaaccaccaaatacatgtttacaaaatttgtgttaatgttatgaaaggaatatgggcaacttgaaagtttgtaacaggaactaatttaaatgagggattagaggaaagcttcagggtaggccatttaatgctgagggcctgcaattcttaggtttaaggtggaaagttttgggaaatgaggtattgtaggggccccaggggaac

SEQ ID NO: 13367 - DNA, 533 bp, Homo sapiens
tttgaaaggaaaacagttttattaattggaagctagcaattggggaatggccagactcatgcttttaaaagaccagtccaactttctgggctgagtgagatggtttcagaagggagacatggtacaggaaacaggtgggaggggtgcaggaaggtgcaggtctgcaggtcttgctccaaaggctttcttgagtagtcaagcacctggaggtccagttggcatcatcttgacttctgcctattggtggtggtctccttgtttgtaagcccactaagcaagctgatttcatagctggatctgcaagcctggtttgtttcaaaattagcccctggaatttctaagccagcacataatgagataagtgagcactgttcatgggagtaccggagcaggaagagcagggacccggaagcagtttgcctgggtttaaagtctggctccgtcacttctgagctgtgagatcttggaaaattcctaatcatctctgaactttggtatcttcattttcccaggccaggcgtggtggctcacgc

SEQ ID NO: 13368 - DNA, 1293 bp, Homo sapiens
  misc_feature (1)...(1293): n = a,t,c or g
actattatattctcggccgtcgtacttttttttttttttttttactggtaaattcattttaataatgaggggaaaaaactttagttattaaaaacaaaagaatgaatacacatacacacactaaatgtggcagatgtttccaggagagattagcaacagagaggccacatgatcaaataaaatttacacttttgatgggattgtcccctcgtggccacccaagtgtttgtggaagaaagtctggagttgtttccaagcatccacctgagccatggcatgagccctgggctcccctccccagataataggactgcccaccaaggcatgcagggaagcccgacacagggggaagtaaggaggctcaatatagtgccctgtctctgggtaacagatgatctggggctttctcctcccatgggcctgcaagcgtttacaggcctcattagcatagaactcactcttccagttgtggtcatcctgacctaccaggaacaggaaggtgctctctgccctttccacaggaatgaagctcttctggtcaggtccttccaaagggctgttcaggacatccacaatgtctgcatagccatctttggtcaccttgatgcgatttctgttgacgccacagggggcagggtctcgcccttgtagcgtaaggttcccccaacattggccacagagccgttgatgacgacagcagccgtgatgcccttcaggaaagaggccatggaaaggcagagctcaccccctttggaaattccaagcagcccaactcctggaccttttacctcaggatgactgagcaagtagttcacagcttcttcaaagtactccagatggagcgtctccatggtcttggggaggtcttcatagttataataagccagagccatcacagcaaaacccttcccagccagcagactagcccgatactccagcaggccacctccagttccgaacatgtccacaatcccaggaaagggcccaggttctgcctcagctgtggagaccccaggaactgcgccgaactcttcaggctccattggtacagccgggacgctcgaaggacagcaggagatgaggccattttgaattcagacctgagaacaactgaatgggggtggggagaaagaagcttgttagacatcctctcgggctgccgtcgcatgctagagcnccactagggcagagctgtctgctaacgtgagcggggaaggccagagtccagccgatcagccagaccaaatatagacacactggaacttgcttaaagtctcctgtgttgaaacctcc

SEQ ID NO: 13369 - DNA, 1758 bp, Homo sapiens
ttttttttttttacttggcagcagcttttttaatttgaacactttcttcttgaggacacaccttcagtacagttaacaaatggttacacctgaaatctgctgagagcagagctcaagatccacaattgcaaaggccactgctggctcacttcctcacaagctgtattacctttcagagctgagtgaggctgtgctctacgtcccaatacttgttactgagtggacatgaggtgcaagtttagcaccttaaagggagaaaaaaataggttagtatgcagaatgtgattttgtcctcacttcaccttaagtcatctttttacacttgccaatgtgagttctgaaaggtactactatatctgcttagaaatggctgagtgactgtcaattaaaagccacatgataaggtaggttacaggtaagaggtaaatcaggttagacatgcatgagaacatgtaggcacagactgaatataagcacaggaacactcgtgaaacccaactgagcttttcttttgcctagaagggctaaatcctgccttctacatcagttcccatttatgctgaaaacccagttgaaagaattgtttcctacctggacagtgacacagtagtttgtttcataccagaaacacattgctaaacaaaacttaagagtctcagtttgggtttttctacaataaagtgaattccaacagttggcatttgccacagtagagaccactaaccattccctaattgtgatgattttattacccagcaccatcttctggagaaaaatatctgtaaggtgctcagtctcagcagaacacttcactgcaagctctagttcagtcagttcagaaaggctgtgaattgcccaccctgatttacagcactaattttaataatctgaagacaaattcgcttggggcttatccaagggactagtcttaaacctacgtaatttaaattgattgcattttataattaataaaatcccctgtaactcaatagttatatgtttcctttatctaaaccatgtagcactctttataaagggactttaaaccaattaaaataatgtttcatgcgcggcaagcctttagtactatttccataattggtatttatttttaaattcataatcatgaatgcaagactacaataataacccaagagatgaggtatgtagtacttatcatttgtcctatggaagacagaagtacagaagatctttagggtaagtccatagtgacctcatttataacaaagacaattcactttaagttgatggtggcgttatgtgaacaaaacaatctacctagttcactaactcccagaaggctctttcaggtaccctgctgttatgcaaccagtctcaaaaatgatttgaaaaccatcttacttttgaacctcctggatgatgaatccatccactggatattcctgggacagtactctcagcaggtattgatgaacatgaatcaattctttgtgctttctgtagcacttcataaagttatggcaaagacctggtttcactgaggctttcttcacacaggaaaggaatctaatgcttgtaaaatgacaagacagatttccaattctaactaactggctttccataagcattgtcacttacttacattccaggtctgaattcaaaagaaaaatacaaagtatctgtcaacctagttaccatttttgtatttgacacatttgaaacaagtagtacgtaagcctaatgatccaagttgaaaaattagcctatttaaaaacc

SEQ ID NO: 13370 - DNA, 344 bp, Homo sapiens
gtaattaacccttgaacaatggaaagttaactctccatagaaatgccaaaaactgaaatgttttgttattgaatttattctcctttgggagttaacactaatggagaacatctccattagtacaaacctggcaccaaacaacctgttcatccttaagctatgaatgctgcactcaccttccagttcattctggcaggatttgtaacacaatgtcctcctgggtagtcatgtacaaaccactccgaagggcaaaattatatgagtgcctaatccacttgtgaaaattaaagaaaggggatcttttttatgaaaaacacctaatatggaaagacataaattgtaat

SEQ ID NO: 13371 - DNA, 1458 bp, Homo sapiens
cataactatatactattccattgcatgaatattctgtaatttatttaatcccctatggattgataattaggttcattatagatagaagtgtaattaacattcctgtacatgtattttgctacttttgtgggtatttctgtaggatgaataactagaaatttattggatcaggtttcacatttgcagttttgaaaactactaccaaaaagatttcaccaatttacaactccatcattagtaagaatgcctgtttgcctatagtctgccaaccctgaatccttaaaaatttttgccaatctggtaggcaaaatttctttcttttctttggaatattaatgaggaggaacatcttttcatgtttcttggccatttgcatttcctattatgaattgcttttgcccattttcctttttttaattatgaaagtctaatgactaccttctcattgtataaaaaacacagttctttgaatagagagacccttttctccaatgctaccaatcacattccacttaccacagtttaacatacatcctctagtcacctttccgtacgaatatacatacacataaaaacactttttacataaataggatctcatattctgtagctttttaaaattttggtctcaaaaaaagataacaggtctttaaatttctttaatggttgaatatgattaaatactatgaaaatgccattatttattcccttaatttttttcctctcgctattacattgccaaagtaaacatcctattcagatgtctttgtgcatgtgtgtgaatatttctttagtctggagtccagtaaggtggatttttggatcaaagggtttgttctctgtccaccttcagtcttcccaaaggccttcataactgtattttcaccaagtgtatggagaatgttcatttccccatataaccatacctacacttgatagtttttatctgttgggcgaaaaagaaccttttcttattttgcatttccctgattataaaaaaaaatggtgagattggggttattttcatgtttattggccatttatagtttactgtggattgtttgtatcccttacctgctttctattgggttatgtgtgggatatattgtttttatttgttcagcatctccttccccatcttctgggtaacacaacctttaatttatttgtggggaacctattcccctgtgggcttaggtgagcatgtgaccagggcctgggcctcctgagtcccacagcttcctagccacagtgataaaagaatggggtatataacttaaggccagggctaagggaaagcccttaacagaacttctgctgggaacctactgggaaagaaggctttatgggagatcccagggaaccaagggaccatgttaagcctgaatttgtgccatgtggagagatctggctgagggagaaactcgggtgcctagcagaatgggaagagaactaagt

SEQ ID NO: 13372 - DNA, 755 bp, Homo sapiens
gcgacgctggtcagaaacattttggggctactgtgtgcaagtcttgtggtatgatatatactgcttccaaccctgaagatgaaatgcagcatgtacagcatcaccacaggtttctggaaggaatcaaatatgtgggttggaagaaagaacgtgtagtagcagagttttgggatgggaaaatcgtgttggttctgccacatgatccaagctttgctatcaaaaaggtagaagatgtccaagaacttgttgataatgaattgggcttccagcaagttgttcctaaatgtccaaacaaaataaaaacttttctttttatatctgatgaaaagagagtagttgggtgtttaattgcagaacccatcaaacaggcatttcgtgtcctgtctgaaccaattggtccagaatccccaagctctacggaatgtcctagggcttggcaatgttcagatgtaccagaacctgcagtctgtgggataagtagaatctgggttttcagactgaagagaagaaagcgcattgcaagacgactggttgataccctcaggaattgcttcatgtttggctgttttctcagcactgatgaaatagcattttctgacccaacaccagatggcaagttatttgcaaccaagtactgcaacacccctaatttcctcgtatataattttaatagttaaagctgatttcagttataaaggagttactatctggataagttcaaagagctccttattataaaatacaaactatttaat

SEQ ID NO: 13373 - DNA, 898 bp, Homo sapiens
aatccaatttgagagttgcccactgaaatcaattaaaaatgtttattctgaaagatgctactataaagtttatagactcaaatgcttataatgcttaatcaaaactaaatttacaaaaaaacctagaaacaggttgaattgaaacctgtagatcattttataatattcatgagcaacaacttttttaaagacaaaggctactgttttaatataaattaagagctttaacatgatctccctttagtgcttttaattgtcacatggctgtaaaccaaagacccctccaaattttaaatgatcactgatactacttgagcagaaattctcaggtgtcagtacttttaatgttgtgtacatcaaattacagtacaaagatgactataaacaagatgcagccctcggtttccatgaacagcacactattacagtaaaccaagtttatattccaccatcaagtgtggctctcccatgacttcgctttgtgatggatcattaagaatatcctcaaatccaatagtctcatcattacccctcaaaacatccagtgaaagatttgagcttgaaagaaatggaagacgctgaacctgctgcactgccttgaattccatctgtaattttagcggagcaaatagaccctgaatgtttctcagtgtggaaaaattcattttatcttggttgagctggaaatttttttctgataattcaaggggatgactaggcaaaagttcatttttcacacaagaaaaacctttccgaagaagatcatgactttcaaaaggtccacttgctgaaagttcagtaactggaatactgtcctttagctcagatccaagtcctctggcattcatcttccgcagctctgcgaacagcctctctgccccgttaccgtcagtcgacc

SEQ ID NO: 13374 - DNA, 1006 bp, Homo sapiens
ttttttttttttttttttcacaatgtcagatcatttatttcagagcagttacacccagcagaggggcacaggcttaaacgccggcatattagttttcccgcacgcgagccctgcatggcggtgggctggggagccggggcgttgcgattctgccacacgccacgctctactaggcccccttactcctaattaattgcctgctcaccagactgtgagaaaataattgccactataaattttccctcctctgcataaaatattcgggggaaccagcacttaaaaaacagacttcatgaaagaagggcagcaaggcgtggatgctgcgccccccacaacccccactgcagaggacacagagaggccaggagccccttcctggttccccctggttccaaatgagacagaaaggctcaaagagctcccaggaatggtcacagctgaaaaaaagtcgagtgagtggctacatgcggcagccgcttgtgttcacctgccgtccacccaggacagtccccggcagcagcttgtgttcacctgccctccacccaggacagtccccgggctggctccaggctgcagggggtcagcagagggagcctcctgccccatatccttggcaaactcacttctccttctgggaccacacaagagacatgggagaatgttcctaattaggcaagagcacagaacccctaatcccagtctctgcttggcatgagtacccaggcaggcaaggaagatggagacaggtggatttcagctcctggaaggagccccggctcagagtggctgctgagtacccagccttgccctcctctgacgtgggaacgggtgtggctgtgctgccacctggtggcctcttccctcactgcagggtgaaatgatgtggatgccagcccttaggtgtgggctccagctggggtcacagagcatcccagccctcagcactgcccgacatagagggaacccctaccactggccctatgtggcctgggggtgagagaccccc

SEQ ID NO: 13375 - DNA, 684 bp, Homo sapiens
tttttttagctgcaccaaaggcgtatcctagctttattaaagggcccgcgccgcagagtcaatataaaaacacaaaaagtcccatcagtttaataacaataaaaaaccccaaaagtggaaaactgagggggcaggggaagagacccctgggccaggggcacgaggagccctgctcatggcaccaggcctggccgcagggtcccccggtattgctgttgctacgaggttggggggcagcgattgtcctgtgggagccaccgttctcctgggtcggggaccctcacttcttctggggtgtgctcagcttctgcatgccccggatcttgtccagcaggccagaaatgaaggcctctgtgggtttgtaacagtcaaccagcagctccttgaccctggcagcccgggcatcgtcactctccatgtccaggagctcatccacgtcaatctccagttctgggatctcctcttcctggcagtcgtagaggcgcgtgagctgctccaggatccactcctctaggttgaggcgcttccgtagctccttgcggtcatacttgacggtgaccttcccttggcgcctcactgggccctcatcgtccgccccgcccgggccctcctcctgctgcgccgggggggctctgaaagtagacgcgtggtcctgggccgcacaactgccccgggggccggggc

SEQ ID NO: 13376 - DNA, 1384 bp, Homo sapiens
tttgtgagagctttaatggcacaaaatgtttatagctacaagttatacatgtattgtaaactgtatataacgatacaaagtgctaactaaaatagatgaagaatgcataatcactttggctcagttaattccaataatttccacaacgggttcatgaaaaaacttatctgactggctaagtcttcaattctcatttttttagaatagtaaatatttttactgcaatcacgggaacttgttgcactttccaatgtgcaagtttgtgcagttttgctcttgattctatttacaaacatcttgagccagttttcatcaaacatatgaaaaatgaagcctgcctttttgtccccaaattgtaaacaggtgtaaagctttttaaacattaacctcacaatttcaactattaattgttgaattctcctttccaaaccacaatgttttcgttcaacacaaatctgggtgtagcagtaaaacgttcatcccatgtgttagggctacagatacatactacatgctctcataataaattctactgtgatgatgtattcacgttttaagtaattttccataatttcactgatgctttaagaaaaagggcaacactatgtttctttttaacgctgaaagaaatcataaatatacccagtttcagtggcaccactgatagaactgctgctgaacttggaaagagcacaatgcactagctgtaagaagtcactttcaggtaaagtgtaattttacttttcccccctgtaataccaattgtaatagaaattgcatactgtagcagtttagctagtcagttctcctaactttccagtctttccaattttattcaggcttttcaaaaatcagtgagccatcagatttactttcttcccaaagaaattcaaatatgaacacttgaaataaataggttatagaaggcaaatcaagtgttaccaggtttaagagtaagacagaaacatggtctaggaaaaagatgtccaaaattatttagacatcaaatgctagaaagaaaaaagaaaattactttcaaaactaggatatatcatctttcttaaagatagcccagctatattcttgaaaaaagataaaaattttgtttaatctatatgttattttccactataacacatcaattttacaaatgttgatgtgagaaaagagttagtttctgcaaactggcaaacctgtctgtcatagtgtttttattcaagttgacctgatgcactttatagattgctagttttaaaattaacaacggttctctaaatagtcaatatcaatgtctatatcataaacagtaattatttatatataaaacatgtggtatccttcagagtcatgctagatgttctgaaatccaagaaaatctactcga

SEQ ID NO: 13377 - DNA, 237 bp, Homo sapiens
taagattgtccgggcccaagggcagtacatgtacgatgaacagggggcagaatacatcgattgcatcagcaatgtggcgcacgttgggcactgccaccctctcgtggtccaagcagcacatgagcagaaccaggtgctcaacaccaacagccggtacctgcatgacaacatcgtgggactatgcgcagaggctgtcagagaccctgccggagcagctctgtgtgttctatttcctga

SEQ ID NO: 13378 - DNA, 427 bp, Homo sapiens
gctcacttgttctgctcttgagccaggattaagattgtgagtaggggctgtcaacacagatgcctgggtgggcatccctctgcttatctccagtcctcagtttcctctgtaaaatgggaacagtaagaacagcactagccagtgattgctgtagtgatcagacatagatctcatggcatttgcctgggttccgatcccagcttggccagcagtagaaatgggagcttggatgagatcacccttctctgtgccttgtgtccttaggtgtgtgctctgcataaagctgggagatgagagctagccacagtgcagtgggggacagaagtagccagcatgcctaaagcagggagggctgggcagagggaatgaagggtccatggccccagccggggttctgtgttaaccaagtagcagattatatttaaaa

SEQ ID NO: 13379 - DNA, 1308 bp, Homo sapiens
tttttcactttacaagaagttcactcttattcatggaggcatcatgctgacaggactggatccaaggaaaatgctagtgactttcccaacttcattccccaatcaaagaggacagtttctggtttgccactggtgagtttattacacgactaaagttcaaataaaaaaataaaaaccaaaatcttggcagggaagctagagccagaatcaggaaaatctgcttccttgtccccagactccctggccaagcccagctccactaactcatcttgactcgatcaagttcctcatcaagacttgcatctgtaccctggacatctctgctgctcccactggagagtgagtctggagtccctggcactggggctttggtgagggctccatatacacccatggcctgagccaccatgctggtgacatcgccagggttggagggcagtaggatagtgttggagtccttggccagtttggagaacgcgctgacatactgctcggccacagtcagtgaagctgctgcatctccattatgttgtgtcagagctgcagccaggattcgaatagcttcagctttagccttggccttcgccagaactgcactggcctctcctgctgcctgatttatctgttcagccttttctgcttcggaggccaggatctgggcctgtttcttcccttctgccacattgatggccgactctcgggtcccctcagactctagaactgtggcccgtttccgccgctctgcctccacctgcatctgcatagactctttcacccggggtggcacatggatatccttgatctcataacggaggcagcggataccccagcagtcagcagcttggttgatggcatccacaatgctggcattcagggactcccgttcccggaagactttgtccagagagagtttgccgagctctgatctcatggttgtttgagctagctgggtgacggcatactcagggtcctccacaccgtagcttgccttgtaagggtccatgatgcgcaggtaaaggactccatcgatttgcagagttacattgtcgagagtcacagccgactgctcaggcacgttgatgacaatttccttgagactctgcacatatcggatccggtctaacacagggatgaggatgttcaaaccaggctccaggatccggtggaatcggcccattcgctccaccaccccaggcctcctgctgcggcacgaacagtaccacggtgtttcggggcaatccagaggaggcgcggcgcggagcgcggccagaagccagtagagagcccctcagcaaaagggccccaagt

SEQ ID NO: 13380 - DNA, 908 bp, Homo sapiens
  misc_feature (1)...(908): n = a,t,c or g
tttgagccaagaagtgcagtaggctgcggggattttatttctgcccccagaccaaggcaacggagccctcacctgcctgccacccccacactgggcccaagcaagctcaggtgagcgcacatacatccaccgtggcgggctcctctcgggtgaagccatcaccgaagccctcatcgtccaccaggtcgggctcacggcagcacatgggacagaggctgttgcgcacagcagaggctcggagccagacgacaaggttccaacgctcaccagtgcccaagggccgggctccatgcagctggccgccacggtggaggacaccctggcccaccacgtgctccacctccaggggctccgtcagggcttgtgggtgcctgggaagaggcccccaaaatacagggcgccccctgtgaagaccttgcccaaggccacattgagggtgagctcggcattatcatagtggcagcccagctccaggtcctggcccggtgcgtatttgaccacaaaggcccggtggctgtcgagccggcccccgcccacagtcagggtacagcagggcccatcagcggctgccaggaaagcntcccgcagtggtgtcatcagcggctcgtccagcccgagctcgtgcagcagcaccccgtagttgttcatggtgttgggcctccccttaggcatgtccgattgctcgaagtgctccagctcttccagcagggcctggcagaagggcgctgtgaaaacaggcacccggtagatgcgcttctcctccgatactgtctccagccgctggagaaggcccttgaggtctgcgtctggggacacgctgtactcagtcacggccaggaactcgggggccagagctcatcctgcagtgagtcgtagacctcaggccgtgccgggtggtaggaactcgc

SEQ ID NO: 13381 - DNA, 229 bp, Homo sapiens
ggcaggccaaattttatttaagaggtagtgtttcagtaaaaaaaatgtcaaaggaggagtgaggtatgcccatttttagagtcatcaatttatagagctttggtgttctctagatctttgatgtgacttagggccgttgtttcttaagaataaggtccaaaggccataggtctgaattcacctgtggatatctatttaaatatgggagaggcctggaccccgaccctgg

SEQ ID NO: 13382 - DNA, 2275 bp, Homo sapiens
cccgggaaagtcctcagcatgatggtgttcgttggggcgggtgggcctcaagaccatgactgcagtgttgcgacaggacggacttctaaggcaaccggggtggggacggagaggtggacccggtgcttggcaaggggccctggaccggaagacggaggactgagtagtcggggcggggggggggggggacaacagtctagaaatgcgcagacatggaattagggtcacgagtttcgtttgggtcatgttcagatggagaggctgtgggatgcctttagcaacctagaccacttgcattgcagccgagctagcagcagctggtgccccgccaggccccgcgtaccttcccagggtcttggatccgcatccccgagaccctcgatttgcatacgccgctcacagcccggccaggccccgcctccgatcccgctctttgcacctcatcagggcaaggggcaggctcgggctggggagccggcgcgggcacggcggcagcccgccgagggggacgcagggcacgtcgccccgccccggcccgcccgccagctgcggcggcgcgtcgggaagtgcttggggcggcgagcatggcggcagcggctgcaggcctgggcggcggcggcgccggcccgggacccgaggccggggacttcctggcccgctaccggctggtatcgaacaagctgaagaagcggttcctgcggaagccgaacgtggcggaggccggcgagcagttcggacagctgggccgggagctgcgcgcccaggagtgtctgccctacgcggcctggtgccagctggcggtggcgcgctgccagcaggcgctcttccacgggcccggggaggcgctggccctcaccgaggccgcccgcctcttcctgcggcaggagcgcgacgcgccagcgctggtctgccccgccgcctacggggagccgctgcaggccgccgccagcgccctgggcgccgcggtgcgtctgcacctcgagctgggccagccggccgccgccgccgccctctgcctcgagctggccgccgccctgcgcgacctgggccagccggccgccgccgccggtcacttccagcgcgccgcccagctccagctgccccagctgcccctggccgcgctgcaggcgcttggcgaggccgcctcctgccagctgctggcgcgcgactacaccggcgccctggcggtcttcacgcgcatgcagcgcctggcgcgggagcacggcagccacccggtgcagtcactgccgccgcccccgccgccggcaccccagcccgggcccggggcgacgcccgccctaccggccgcgctgcttcctccgaactccggctcggcggcgccctctcccgcgccctgggcgccttctcggacgtgctggtccgctgcgaggtgtcccgcgtgctgctgctgctcctcctgcaaccaccgcccgccaagctgctgccggagcacgccccagaccctggagaagtactcctgggaggcttttgacagccacgggcaggagagcagcggccagcttcccgaggagctctttctgctgctccagtctttggtcatggctacccacgaaaaggacacggaagccatcaagtcgctgcaggtggagatgtggccactgttgactgctgagcagaaccacctccttcacctcgttctgcaagaaaccatctccccctcaggacagggagtctgatccatcccattcacccagtgacttctttttgcccaggcctggactttttgcatcagtcacgttaaccagatgactttgcctgttaccaaacctcatgcatccacgtttgcgtctggggaggaataaaaagacatcgttcccgcttctgcgttttgttattcctactgccgccataggaattatttcgttggctgaacgttaccagcaccccgagaacacattttgatagaatcagagtagaggacatggctgtcttctaaaaagccacgacatgaaaatgacaatccctttcgtctccttcctccgctgcttccacctaacgcagcctcctgcctccgcctttgtttcatagtgaggattttattttgcacggcgccctccctctaaatacctaccctagatgatttcatcctgcccctcacttcttaacatattcctgtgtctttgtaatggccaaatttctccttccactcgtccgcacggtacgtcttcatgggagtcattttattccttacagcttccttgtaaccacagccctaaatccatgataaagctactcttgtactcctcaaaaaaaa

SEQ ID NO: 13383 - DNA, 351 bp, Homo sapiens
ggcaccataggcggcacaggcaccaagatgtccaaccgagtggtctgccgagaagccagtcacgccgggagctggtacacagcctcaggaccgcagctgaatgcacagctagaaggttggctttcacaagtacagtctacaaaaagacctgctagagccattattgccccccggagaattttcatccttgggccttctcatcatgtgcccctctctcgatgtgcactttccagtgtggatatatataggacacctctgtatgaccttcgtattgaccaaaagatttacggagaactgtggaagacaggaatgtttgaacgcatgtctctgcagacagatgaagatgaacac

SEQ ID NO: 13384 - DNA, 1137 bp, Homo sapiens
  misc_feature (1)...(1137): n = a,t,c or g
cggcgggcggtggctttggggccgaagtgggcgtgcggctcgcgctgttcgggccttcctggtgacggagctgctccccccgttccagagactcatccagccggagaggatgtggctctaccggaacccctacgtggaggcggagtatttccccaccaagccgatgtttgttattgcatttctctctccactgtctctgatcttcctggccaaatttctcaagaaggcagacacaagagacagcagacaagcctgccctggctgccagccttgccctggctctgaatggcgtctttaccaacacaataaaactgatcgtagggaggccacgcccagatttcttctaccgctgcttccctgatgggctagcccattctgacttgatgtgtancaggggataaggacgtggtgaatgagggccgaaagagcttccccagtggacattcttcctttgcatttgctggtctggcctttgcgtccttctacctggcagggaagttacactgcttcacaccacaaggccgtgggaaatcttggaggttctgtgcctttctgtcacctctactttttgcagctgtgattgcactgtcccgcacatgtgactacaagcatcactggcaaggaccctttaaatggtgaaaatgggcagatgaatagcaataagtggacctttgttactcttctgagttagaaaaattctaatttagtacactctgaacaaagcttattatacttacttaagatgtgttttgatttggtgttcagaaagcaacctgacaatgataatactgtaactatgataaaattgagaataaaaagattttatttagaaatcataagtctggaattgaggttattttagccccacagtacagtatcctggagggccaggtcctctatgctatgtgtatgtaataggatttaggagcctaatattaagagaagaccttgtttccactctcttcagatgtactagttggatccatgattggaatgacatttgcctatgtctgctatcggcagtattatcctcctctgactgatgcagaatgccataaaccatttcaagacaaacttgtactttccactgcacagaagcctggggattcttattgttttgatatttaaaaattgaat

SEQ ID NO: 13385 - DNA, 1772 bp, Homo sapiens
cggggcttcgcgtctgtgcttcctgtggctgacgtcatctggaggagatttgctttctttttctccaaaaggggaggaaattgaaactgagtggcccacgatgggaagaggggaaagcccaggggtacaggaggcctctgggtgaaggcagaggctaacatggggttcggagcgaccttggccgttggcctgaccatctttgtgctgtctgtcgtcactatcatcatctgcttcacctgctcctgctgctgcctttacaagacgtgccgccgaccacgtccggttgtcaccaccaccacatccaccactgtggtgcatgccccttatcctcagcctccaagtgtgccgcccagctaccctggaccaagctaccagggctaccacaccatgccgcctcagccagggatgccagcagcaccctacccaatgcagtacccaccaccttacccagcccagcccatgggcccaccggcctaccacgagaccctggctggaggagcagccgcgccctaccccgccaggccagcctccttacaacccggcctacatggatgccccgaagcggccctctgagcattccctggcctctctggctgccacttggttatgttgtgtgtgtgcgtgagtggtgtgcaggcgcggttccttacgccccatgtgtgctgtgtgtgtcctgcctgtatatgtggcttcctctgatgctgacaaggtggggaacaatccttgccagagtgggctgggaccagactttgttctcttcctcacctgaaattatgcttcctaaaatctcaagccaaactcaaagaatggggtggtggggggcaccctgtgaggtggcccctgagaggtgggggcctctccagggcacatctggagttcttctccagcttaccctagggtgaccaagtagggcctgtcacaccagggtggcgcagctttctgtgtgatgcagatgtgtcctggtttcggcagcgtacgcagctgctgcttgaggccatggctcgtccccggagttgggggtacccgttgcagagccagggacatgatgcaggcgaagcttgggatctggccaagttggactttgatcctttgggcagatgtcccattgctccctggagcctgtcatgcctgttggggatcaggcagcctcctgatgccagaacacctcaggcagagcctactcagctgtacctgtctgcctggactgtcccctgtccccgcatctcccctgggaccagctggagggccacatgcacacacagcctagctgcccccagggagctctgctgcccttgctggccctgcccttcccacaggtgagcagggctcctgtccaccagcacactcagttctcttccctgcagtgttttcattttattttagccaaacattttgcctgttttctgtttcaaacatgatagttgatatgagactgaaacccctgggttgtggagggaaattggctcagagatggacaacctggcaactgtgagtccctgcttcccgacaccagcctcatggaatatgcaacaactcctgtaccccagtccacggtgttctggcagcagggacacctgggccaatgggccatctggaccaaaggtggggtgtggggccctggatggcagctctggcccagacatgaatacctcgtgttcctcctccctctattactgtttcaccagagctgtcttagctcaaatctgttgtgtttctgagtctagggtctgtacacttgtttataataaatgcaatcgtttggaaaaaaaaaa

SEQ ID NO: 13386 - DNA, 1105 bp, Homo sapiens
ggctgagaggcgcacccgggcggccagctgggctcggagcggaacggggtcaggatggacgaggacgtgctaaccaccctgaagatcctcatcatcggcgagagtggggtgggcaagtccagcctgctcttgaggttcacagatgatacctttgatccagaacttgcagcaacaataggtgttgactttaaggtgaaaacaatttcagtggatggaaataaggctaaacttgcaatatgggatactgctggtcaagagaggtttagaacattaactcccagctattatagaggtgcacagggtgttatattagtttatgatgtcacaagaagagatacatttgttaaactggataattggttaaatgaattggaaacatactgtacaagaaatgacatagtaaacatgctagttggaaataaaatcgataaggaaaatcgtgaagtcgatagaaatgaaggcctgaaatttgcacgaaagcattccatgttatttatagaggcaagtgcaaaaacctgtgatggtgtacaatgtgcctttgaagaacttgttgaaaagatcattcagacccctgggactgtgggaaagtgagaaccagaataaaggagtcaaactgtcacacagggaagaaggccaaggaggaggagcctgtggtggttattgctctgtgttataaactctgggaaattccatctcttgcatatttgatcagatagtgacatctttctgtatataaactctttaactgctattttagggaccttgcagtttgcacataattgttttatatcatagcagtaaatatttgcaagaaatcccactcatcgaccccgggtaaaatgttatggtaagcatgcacagtttgcagtctacagtttttttatgtagcacaaaataggtgtacctttataagtacattcaattttatgatttacatttatcatgtaatttttaaaaaaatccatctatctaggatatgttgatacaaagtctgcttttgctattcttattgcttaaatactcctatcattttctgaattacttggtatttagaactcctagcaccacggggaagaatagtggtatcatcaaacatagcaaattt

SEQ ID NO: 13387 - DNA, 364 bp, Homo sapiens
gaatgaaaatggcatatttgaacataaacttagggcagatttttactacttttgaaaaaatgttggaaaatatttctgtatgaaacgtaaaacaacttttaattttttttagaagttgagaggattctattttgcaaagctgtattatgaagctaaagaatatgatcttgctaaaaagtaagtacaaactgtaacatgtattcttttttttaaaatcaatgccttttctcattttcttctttgaaataggtaaaaatatgttcttagtagttcttcctaagtgtattctggaataagggatttatcactcagactgatgctaaggaccagcctagattccattgagattgaaactgcaattagt

SEQ ID NO: 13388 - DNA, 1136 bp, Homo sapiens
cagagtaaactgccagttgcaaatttgataggatagttagtgaggattattaacctctgagcagtgatatagcataataaagccccgggcattattattattatttcttttgttacatctattacaagtttagaaaaaacaaagcaattgtcaaaaaaagttagaactattacaacccctgtttcctggtacttatcaaatacttagtatcatgggggttgggaaatgaaaagtaggagaaaagtgagattttactaagacctgttttactttacctcactaacaatggggggagaaaggagtacaaataggatctttgaccagcactgtttatggctgctatggtttcagagaatgtttatacattatttctaccgagaattaaaacttcagattgttcaacatgagagaaaggctcagcaacgtgaaataacgcaaatggcttcctctttccttttttggaccatctcagtctttatttgtgtaattcattttgaggaaaaaacaactccatgtatttattcaagtgcattaaagtctacaatggaaaaaaagcagtgaagcattagatgctggtaaaagctagaggagacacaatgagcttagtacctccaacttcctttctttcctaccatgtaaccctgctttgggaatatggatgtaaagaagtaacttgtgtctcatgaaaatcagtacaatcacacaaggaggatgaaacgcccggaacaaaaatgaggtgtgtagaacagggtcccacaggtttggggacattgagatcacttgtcttgtggtggggaggctgctgaggggtagcaggtccatctccagcagctggtccaacagtcgtatcctggtgaatgtctgttcagctcttctgtgagaatatgattttttccatatgtatatagtaaaatatgttactataaattacatgtactttataagtattggtttgggtgttccttccaagaaggactatagttagtaataaatgcctataataacatatttatttttatacatttatttctaatgaaaaaaacttttaaattatatcgcttttgtggaagtgcatataaaatagagtatttatacaatatatgttactagaaataaaagaacacttttggaaaaaa

SEQ ID NO: 13389 - DNA, 1629 bp, Homo sapiens
tatgaattcagaggaagttacatatatattttttctagttggtacctgaacaaagcagattcccttgcctttgctgccacgtcttattttcaatgccatgtgataaaccagtgtcatacatgaaagttgtgcattgtaattttcaaaaaaaagggagttcattaggccagtggcactgatttttccttcccatcatagctatttattctagtaagaggataataaaagaaatttcctatacaagaactgaaattttccatttgtatggatctagtcactttcagatttcaatttgaggttaagtatataaagcacatcccaattttatatgctgccttgagaaaattacaggatgcacggcaatttgtaggaatttcaaatgggatcatttaaacatttgaaaaattattttaaaaaccatctagtttgcttttggattttagacattaaagcctatgttgtcttgttaacaggggtggaatgtataaccatcagattcagcatgtgatttcacctttgaatctgagtatttcttccctatcttctttgagtcatttttggagcagactgtcaccagtattgataactaagcattaaagggaaaagttgcattgcaactatgcattggtttcctggaagaacttttcttttgttttagtgaatgaagaggcttgatgggatcacttactgtaactccttctacataaggaccccttctgcaagcagaacacaaaagaacatgctcaaggagtatcccattttctggataaattgaagaagtttgctagtaatgtctttatactagcgtcttccttgtatccctttgctggcaagggaatacaaggcgtcaagaccacagatcaaaacaccccacatttgagtggagtcttatttttactccaagagcagttattcccttctagtctaaaattggcagttttttcttttttttaataaaatttttaaaatattcccaaaccagtggaacacagacactggctgcacttagtactgccaaaagccaaggtcatttgcacatattccatcaacctgtcgagaattaggcctcactttataacccaaggcatggaagtgcatgcattctcttagctgggcaaacaattatactgtagttgtgatacaacacatgtggcttttatttgtactgcacatatccactgtacagccacttgggagtatcgtggttagcttgcagcaactgctgtctgcatttatactgtttattgcatattcttttccctggaagtgaaagagaaatgtttttcttgttgccattgattacattttataaatttgcttagctggaaagtttgggaaaagaggcctgtttgtcaattgtacaaccgattgtgaagctctagtgtgaatatttttacgtctgtattagacattttctttgcaaatctattgttcgattgaaatgtaaatgaaattaaagatggtgtacacccatcatgtaaaaagcaggcaccatctctaagatggatttaatgctcatttttaaggcatatactcagcttctatttaaaactataatttaaaataattctgtacaatgaaatggggaatatatatgggaataaattctattccatttatttcaatttg

SEQ ID NO: 13390 - DNA, 1075 bp, Homo sapiens
gcgatgggcttgagagagtgtcgggcatccctgcctcaaagctggttgaagctcatggaacctttgcctctgccacctgcacagtctgccaaagacccttcccaggggaggacattcgggctgacgtgatggcagacagggttccccgctgcccggtctgcacctgccgttgtgaagcccgacattgtgttctttggggagccgctgccccagaggttcttgctgcatgtggttgatttccccatggcagatctgctgctcatccttgggacctccctggaggtcggagccttttgccagcttgaccgaggccgtgcggagctcaggttccccgactgctcatcaaccgggacttggtggggcccttggcttggcatcctcgcagcagggacgtggcccagctgggggacgtggttcacggcgtggaaagcctagtggagcttctgggctggacagaagagatgcgggaccttgtgcagcgggaaactgggaagcttgatggaccagacaaataggatgatggctgcccccacacaataaatggtaacataggagacatccacatcccaattctgacaagacctcatgcctgaagacagcttgggcaggtgaaacccagaatatgtgaactgagtggacacccgaggctgccactggaatgtcttctcaggccatgagctgcagtgactggtagggctgtgtttacagtcagggccaccccgtcacatatacaaaggagctgcctgcctgtttgctgtgttgaactcttcactctgctgaagctcctaatggaaaaagctttcttctgactgtgaccctcttgaactgaatcagaccaactggaatcccagaccgagtctgctttctgtgcctagttgaacggcaagctcggcatctgttggttacaagatccagacttgggctgagcggtccccagccctcttcatgttccgaagtgtagtcttgaggccctggtgccgcacttctagcatgttggtctcctttagtggggctatttttaatgagagaaaatctgttctttccagcatgaaatacatttagtctcctcaaaggg

SEQ ID NO: 13391 - DNA, 1837 bp, Homo sapiens
  misc_feature (1)...(1837): n = a,t,c or g
cgccgggatgaccctccatcatccccatcctctacgtgagtcccgccccgggcctgcccccaacagatgccctcttgcggccccaccctgggccagcgccggcaccccaggtccccagggtgctgtggcgctgctggctctgacgcagccttgatgtggccttgtggcctgtgtctgtccccaggaccatgagcacgcaaccttcgaggacatccttgaggagatagagaggaagctgaacgtctaccacaagggagccaagatctggaaaatgctgattttctgccagggaggtcctggacacctctatctcctcaagaacaaggtggccacctttgccaaagtggagaaggaagaggacatgattcacttctggaagcggctgagccgcctgatgagcaaagtgaacccagagccgaacgtcatccacatcatgggctgctacattctgggggaaccccaatggagcagaagctgttccagaacctcaggaccctcatgactccttatagggtcaccttcgagtcacccctgggagctctcagcccaagggaagcagatgatcgagacgtactttgacttccggttgtatcgcctgtggaagagccgccagcacttcgaagctgctggactttgacgacgtcctgtgagggggcagaggcctccgcccagtcaccatcaggccactccctctgcaccgggacctggggctgggccgcctcgtgctccccgggactgtgtggctccggtctcgcctggagccacttcagggcacctcagacgttgctcaggttccccctgtgggttccggtcctcgctgcacccgtggccgcagaggctgcaagtccctgggggccgggaggatcccgccctgtggcccgtggatgctcagcggccaggcactgacttgccatgcctcgcctggaggctcagctgtgggcatccctccatggggttcatagaaataagtgcaatttctacacccccgaaacaattcaaagggaagcagcatttcttgttaactagttaagcactatgctgctagttacagtgtaggcaccccggcccagcagcccagcagcccacatgtgttcaggaccctccctgcccaccccctccctgccgtatcgatcaccagcaccagggtggcccgtgtgcgtggggccagcgtcgccgggctgcccagcctggctctgtctacactggccgagtctctgggtctgtctacactggccgagtctccgactgtctgtgctttcacttacactcctcttgccaccccccatccctgcttacttagacctcagccggcgccggacccggtaggggcagtctgggcagcaggaaggaagggcgcagcgtcccctccttcagaggaggctctgggtggggcctgctccccatccccccaagcccacccagcactctcattgctgctgttgagttcagcttttaccagcctcagtgtggaggctccatcccagcacacaggcctggggcttgggcaaagngccagctggggctgggccctgggttttgagaaactcgctggcaccacagtgggcccctggacccggccgcgcagctggtggactgtaggggctcctgactgggcacaggagctcccagcttttgtccacggcccagcaggatgggctgtcgtgtatatagctggggcgagggggcaggccccccttgtgcagagccaggggtctgagggcacctggctgtgttcccagctgagggagggctggggcgggggccgggcttggaacgatgtacgataccctcatagtgaccattaaacctgatcctccaccgcgaaaaaaaaaaaaaa

SEQ ID NO: 13392 - DNA, 631 bp, Homo sapiens
ccttgcccagcccacatcatacagtttgaaatgaaactttgccacaaccagcctttgctgtagcacacacatatatcactgaacctgtttgaaataaagttttttttctttttcatgattcgtctttgagtacctccaggctgaaagactgttgtaccagtaaaaacttaaaggcacaaattctccttgaagaccttctcccttttatgtggccccatattttatgttgctttatctttgaaattttgcatgaaaaggaaatgaatggattcgaatgaaattgtcctttagagcatgattacttgttcccatggacaaatatttttctccccttgctcttcctggcctgaaacacgggaaaccagagtcaaaagttatctccctctccctgtgatgccttgagatttttttctgcgttgtttaatgcctgaaatccaagtcttcctccatgggaaaatactgttataccaaataattctagatgagtaacaaagatctttttaggccttcattttatgttttttcttaactgttatattatgattgtgacatagattatactactactaatttttggatgtttcaaaaggtcaagaagtaaaagatgttagaaagcaataaaaaaaaaaaa

SEQ ID NO: 13393 - DNA, 1957 bp, Homo sapiens
  misc_feature (1)...(1957): n = a,t,c or g
gcagaggtgaacaagcttggacattgagtcgtagccagaggaattctctgctggatgatttgcattcagctattttgaaatggccaactccagagtgtgagatggtagcatacaggtcctttaatccatttttcccattacttggctgtttcacaacaccaggagttcagctatgggcagtttgggccatgcaacatgtctgcagcaagaatccttcaaggtattgcagcatgctgattgaagaaggaggattgcagcatttatacaacatcaaagatcatgaacatactgatccccatgtccaacagattgctgtggccattctggatagcttagaaaaacacattgtgcgccatgggaggccacctccctgtaaaaaacagccccaagccagactaaattgatagccataagtattggatagttgaatcacaggaatcctttttgtggattggtccatttgggaatatcttaccctccctgatgttttgggggtttctatgacaagagtcataaaatcagtttggggattggnttaatgtgtagtacttgcccatgtggaacagtctcttaatttgtcttgtgattttaaacttatgagtcaagaagggtctcttcctttatcattgccttttaggaaattttccacatctttcagtgtttgaacttacttgtgcttgagattctacagttttatggtaaagtttgcacgaacccttaggccagacttttctgatctcagagtcccttccaatcaatttgcagcttcacataagctgttgacctgatttctgacactgcttcagttgtaaattttatactgcttctgtataaaatgcctttcttctctatctgtgtatattttataagatgtccttcttagtgtgaaagaagggaaatgtggatcatcttgtggaagctaatcactggcaggagcctggatggctggcggaaagatatatgagaaagaaaaattatgaaggtagaacagagtgtaggaactgggaattggtttcatggtataggttttaaaatgagacaggctacccttcgggagtccacctctcttgaggcggtgacagaagcttgtcctccatatttatacctagaagtgtggactgctggttcctgcacagactgccggttattcactaggaatatttccccaagcaccacagtataaaatactacagcactctgtgttaaagactaactgtctacatctccatatgttgtagtgttgtgaaaatgtgattttaaaaaattatcgccagttaaaactggctattcttttcctctatttcaaagtcatttttgttcagtggaatagagacagcaacatggtgttaacctctcaattaaaatacaattgacaccagtaaattttgccataaaaagttaaaatctcttgttcaaaatatgtgtatcttcttaatgtgttcatgttagagaaagtgtccccatctcactgccaaaaatgaaagaaaataattaaactctttaaatgattaaatgtaatgattctactcgcagtgcataacagcacatatttttgacagattattttttaggcaattacctttccttaaggtatctgatacagtatagtaaagaatcacttatatcagtaatagcacttgagagatagcaagtcaccaagaaacttaattttcatttaaaattttattttgtgaataaggtcaatctacaatcccagataactacattttttttcatagatggccagtgttttcaacagagatttaaaatgggaatattaaaattatagtgattattcagaagcattttaatttagaaaggagctggtttgttagttcactgatgacattttttgacaaacattttataccattatcacaataatcagacttgaatttttttttggagttccttcatgtgaatgaaaactgagttaaaagaaagtaggcatttaggt

SEQ ID NO: 13394 - DNA, 386 bp, Homo sapiens
gggagatagattacttaggaaatgtaaaactaataatgcacccttatggtggagaacgctggcagtcacctccaagagacccaacttggcttcactaataatgggaaggctatgagtgaagtgggcttcacctagaactgacgtactccctgacgtgaggcaatatgaagtacccaataccaccactgaggtgttcttgccaaaaaatatttaatctgcatctaatcaaacctctcaacatatttccagtctacaggaaatataggagagaaaggaacaagttaaagcataacatgaggaaaccatcaaatccagaatacaggatactttacaaaacaatctggcttaaatttcttacaaaagtcaattttctttaaaaataaaat

SEQ ID NO: 13395 - DNA, 1768 bp, Homo sapiens
acatatatattcatcaactattttagaagatttaattctatcaaatcttgtattacctcagatcattttaaatagcaagccaataacgagctttgaaggctattttaccattcctgttcacaaaaggttctcatggtgcctgacaggttacccttgagggcttgtgtctactttttaaaagtcaatggttttttttcttgtgttctagtttccataataggagagaaaatatagaaatatatgcaaaaattatagttttctttagatcagaaactgatatttttgggtcagccatatgtattttgtttaaaggatttaaaataaagtgccgtcatgtaggccctgtgggaagggaggcacataaccagctgtttggcatgacaggtgacttagtatatttgtaattggttttaaaaccaatacaccatactttctttctgcaaacagccatctttatacttagggaagaaaaatttttgggttctagacttttttaatataaattttgttgatatggaattaggtaagtttaagtgtctatgtgcatatgttttttatataagttttttctattcagtttcactgatccaactggcagtgggtaaatatggcataagttaataacacttttccccaaaatggtgctttggatttgaaaagggtctgatggggagaaggagaacgtatcatcctagcttcctctcttaataaacctagaaaaacgggtagtaaactgtggatagtcaggaaaacacccagcaagggacacagctgtcaggaaatgaatcttccccccaacccccaccatgcagatggatagacagaatctttcctgactagtcattaggatcaggggcctctgttggatttgtgtttcttgaagaatagctggcagagtggtataaaagacacgaatatctcctggtctataaggatactctgatttggggtttgcatttttcatggtttttatttcctgttccccctggagttttccattagtgagtttttgtgcaaggatcttatttgtgatgccttccctcccctagaaagattttgtgcaatatattaaatggggacagaattctaaatggataaaacaatggctggttctagccctgagtgacagtcttaaggctagatccttcccatagtatcatctgtcctctggaatgactctcctgtccctaaaggggttaagagagagatcacctagaaatccctctggacacttgtgggttctttagggtttgagtttcttcttccccttgagcttcagagaggagagttggcatggttaaatctgaatggttacctcactgctgaaaacccagaggggcgtggcacactcgcttgtgtggaaaagcctctaaatgcatcccttcctttctttcctgcttcctttgccttacaattgaagcagcccgtggtaccatcacagtatgcagagacttcctcacctttcatatctagggaccacccccgatgcattggtgagggtgggcacttataaatgcctgctattgttaagccattccagcctcttcctctgaatagaccagacgccctttcacttagttcagtgccagtccttttgccttcccaaccctgctgttaggcctgctgttccctttgctcttgattaggagagatggaaggagatgagctcccataactgaattggcctttggttcatgttttctccccatatgtatatatgccatatgtgaatatgccatatatatgtgccaacaaatctatctacgtt

SEQ ID NO: 13396 - DNA, 1386 bp, Homo sapiens
tgtttctcgcctacttcctggtgtcgatcgccggcctcctctacgcgctggccagccatgtgactgccttcctcccctgcggcagcagccgagcagctacggcagaaggatctgaggatttcccagctgcaagcggaactccgacggccaccccctgcccctgcccagccccctgaacccgaggccctgcctactatctatgttgttacccccacctatgccaggctggtacagaaggcagagctggtacgactgtcccagacactgagcctggtgccccggctgcattggctgctggtggaggatgctgagggtcccaccccgctggtctcagggctgctggctgcctctggcctcctcttcacacacctggtggtcctcacgcccaaagcccagcggcttcgggagggcgagcctggctgggttcatccccgtggtgtcgagcagcggaacaaggccctggactggctccggggcagagggggtgctgtgggtggggagaaggacccaccaccaccagggacccaaggagtcgtctactttgctgacgatgacaacacctacagccgggagctgtttgaggagatgcgctggacccgtggtgtctcagtgtggcctgtggggctggtgggcggcctgcgattcgagggccctcaggtacaggacggccgggtagtgggcttccacacagcatgggagcccagcaggcccttccctgtggatatggctggatgtgccgtggccctgcccttgctgttagataagcccaatgcccaatttgattccaccgctccccggggccacctggagagcagtcttctgagccaccttgtggatcccaaggacctggagccacgggctgccaactgcactcgggtactggtgtggcatactcggacagagaagcccaagatgaagcaggaggagcagctgcagcggcagggccggggctcagacccagcaattgaggtgtgatggcggccccaccccaactaccacctcttttcaggcacagaccttgtgggactgggccccaggcttgccccaggaatgtggttttccaagtcctgacccttggagccagaagttggcccctctgcccctccaggcccagggcatgggtcctgctgcttcacccctcccctagcctccgtgtggcactgcccacaggctggggacaagcagcccttgtgttgagtcaggttggccctgtctagggtggaacagaaggacagatggacccaggagggagggcagctgagtaactgggtaacttattggggctgggcatgcactggggggctggaggagctgggctggacccttcccacctgagcatgctgacccccttcctacctccagaataaagaatctcaacctggaata

SEQ ID NO: 13397 - DNA, 1279 bp, Homo sapiens
ttttttttttttttcatttaacttttggtaataaaatactttattggtaccatttaataaatgtcaaaaacgtatagcatttccattgcttagcttccatctttaaacttaaagctagttaaaaacaacaggaacaaaagtaaactcatttgattctctcaaaaaacaagctgtaacttacctttgcaaataattaagttctctcactttaaatatcgtaattcactggtcttcataataaataattataataatatataaaaggagacagtggcctgaattattttgcagagaacatttcacacatcttttaaaaaaatcactaaactaccacaacttaaaacttgtaagaataattaggtaagagttattgtaatattgaattaatatagcacctagaaatttgaaatttgtaatatttcagatgatatgatttactgagaaaaagagtaatgatttttcttcagtgaattttcaggggttttcaacataggtctcttttaaaagggttaaaaaatttatgcatactaggaattgacctgatggtaacagatccatgtgtgacaaataatgtagtgcagtcctatctgaatataatttctttttcactttgtctcattaatttatacctcaattaaaacattctatatgcaagtgacatatttctctaaaacattccgtatttcagatttccattcagactatcttcccctcctcccttttctcaaatcagaagtgatcttgtggcataccatttgctttttctctccacaatgaaactctttttcaactcaaagtattatagtaatgcaaatacaaatgtagcatatattaatatattagaaaaaggatagtaaatacatatggatccatgccaaattagaaaattgaaagcacaaacacacaaaaccatgctatgctcatctattctgaaccaccatgggaagaccctgatagagctggctcacataaactaatgttcccagacagagctaggatcctgtattccaacataattaaatgctctgttaaaaatgtttccgtgttcttttctgtttgttcaaaatagtttacagcaactgactactaatcctaatcctgaacatgataatgtaataacatatttttaatcaagccatagattctaacctattttctactattacccatttgcttaaaaacagactttcaggggtgtaagcaacagtaagttaaggagtttttagttctacctttctcttgattgattgattggggatttcagatgtgtcaattaatt

SEQ ID NO: 13398 - DNA, 723 bp, Homo sapiens
  misc_feature (1)...(723): n = a,t,c or g
ggcatggctggtacatcaacagcatagaggcgctgtcatgatttccaggcacagcttgcgtatatcccaaacatctcacacttgataatatacctgttccttagaaacataactgggtaaggaaggattatcttagttcagtgaagccattacatctacggtctcttcagcttttataccttgttcccattctcaagtgcagcaacatctcatcagtactggaaaagcagtctgcacagtgaaccagaagtccttggtcaagtacaagtaacttcagcccagattttcatgtatcttgggtttagtatattcctgtaaattatcagttacaaatttcaaggatgattcaggcacagccagcacatgtgcctggtagtcctagctactcaggagactnagagaannnnnnnnnnnnnnnnnnnnnnnnnnnnnnnnnnnnnnnnnnnnnnnnnnnnnnnnnnnnntcataaataaacaaggttaggcatggtaagccccacacctgtaatcccaacacttacggaggttgagacaggaagatcccttgagcnnnnnnnnnnnnnnnnnnnnnnnnnnnnnnnnnnnnnnnnnnnnnnnnnnnnnnnnnnnnnnnnnnnnnnnnnnnnnnnnnnnnnnnnnnnnnnnnnnnnnnnnnnnnnnnnnnnnnnnnnnnnnnnnnnnnnnnnnnnnnnnnnnnnnnnnnnnnnnnnnnnnnnnnatggt

SEQ ID NO: 13399 - DNA, 1135 bp, Homo sapiens
ttttttttttttttttactcagaactccagcattttttggctattttatttctagcccttggaagcttgtttcaagaaaaagacaccatatcataaacatcagatatcagttcactgacatgaaattattaacaatacaactctcaaatggaatctcaagtacttccaagtaaacattcagttaagattttgacaaatattttcatcctgcagtctgtctcatactgtcaaaaaaatgtctgactataacgtaatagaactgaggttctaagtaccacacaagcccaggaacacacagctgagtgtcgctccctttcacgcagccaccactgaaaagcacagtgcttttacccccagacatcttgtaaactccctatttagggacactcgctcgagaggaaccagctgcacggcccacttgtagtcaaaggcagcgcaggttggtcctgttgtcactgaattctcaggggctcagcccccagagcttttataaagggatctctaaagcccaaactcccttccatattattaaggcttgcccccattgtggggtccaaagaagacgcccctagatttgagtagagttccaacagaattcaaccaagtggtctccgtgtgctgccgcttccctgcaggaacgatccggacctcccagcaagagcgcactggagaaacctacctgcggcgtgggagtggagtcggcctgctcacagatccggcacctcgctgtgcagtcacaccgcctaccaccacctggtgtgggggttgaacacacacactctgggctagtggacgatcaggttctagaaaaaatgccaacttggaagcttgtggcaccaattcaagctgggatggaacagcaggagatatgaaatacctcaggctcagtatggcagagagggagccaagcccgtcccggccccaacactaccgattaaatacagttctttatcaagtgctctgggtctgccgacctgaagaactaacccctgcccccaaaacacatcccaatctgcaaaaggaataacaaaaactcaaatatcatttggttcctaaaaaagggaatgttttcaagaaaaataaaatagaggggccttttcaattataaaaggcagagcttcctttgctggttttc

SEQ ID NO: 13400 - DNA, 342 bp, Homo sapiens
gccttacagcaggaacatgcaggggcaccagaggaagctgaatagggcacagagggctgggggaattaaaggaattccccgtaagggctggacccagctcctttctgggcttgggtagtcaaatgtctgagctaccccaggtcctcatgtcagcagagtggcgcctgcctgtgctggcccatggaacggagacagcattgggctgactgtgggcatgaggagggataaggctgatttggaccccaggcttctgccctggacagcacttgtgtctgcagattatttaagtggcttttgatctgtaaataaaatcagtgcactgtgcatcaaaaaaaaaaaaaa

SEQ ID NO: 13401 - DNA, 1341 bp, Homo sapiens
gtgagccagcatgcatgggtatgaagaggcaagtaaactgcattgtgtcatcccaagtaaaacacagcacggcctcctgccactgacagaccctgtttccccataatttctggatgaagaaagcccaagtcatgtcagtagttaatcagctctggaggaaagtgaaacacctataaacacggcagaatgcaatacttccagaaaggcttttaacacctacagaatctaaacattttgtaagaggtggggttaacaagcttgtgtgctatttgggggtggggctgagcatcagaggcaaagtttttcgtaagcctctttctctcgatggattaggcaggaatgactttcctccaggggacggtcccatcttcagaaagttaaaagggtccatttgggatcccagagcctagcacggtgctatgtacaaagcggtggcccaaggtttcttgaatgaataaaaaactcaagagcacagagaaaatctggctctcccaagtaaactgtaatttacattttcatgggattataataggatcttcagtgagtggagcaagaagatagacagcagtaatccggaaggcagcataggagtaatagcaaaagttaagagatgtaggggccacagtgaaaacagctttgtgactgtgggagagtcccagaaacagtatttctttccttatccacacacggagcatggcccaagaacccccagctctagaactctgttattctttaagcaataagtgctctggttcaatcaactgtggtcaaagaccacttcatctgcctctaaagccattccgcgaatagtgtggcctcttaagcttttctcttagctgtacattctcttgtcaactgtaggtttcatgaagcacatggtttccttcaaaacagaacaaaaaactttaaggtaagtcataaggatggtttcctcttgtgaaaaatggggaagttagtctatatcatgtctatggtctctaccagatccatgagtcagagaaaacatgaagcgcatcacattttttgggcaacccatagaactatcctactctccagccatcctaactgccactgtgcctggggctgtgcaatgctgctgcctcctctgttcttatccctgtgtctgctttgggaacgcccccttatcgctgggttctcagcccaggcatctgggacctctggctagaaatcctcaggtaaagacgatcctccttcctgagtcctcccatttcacatcaggacttctaatctaacacggatctcattttcctgagaattttagtctccatgccaacctccctcactataaaatgaatttcttgcaacagggatcttacttgc

SEQ ID NO: 13402 - DNA, 823 bp, Homo sapiens
  misc_feature (1)...(823): n = a,t,c or g
tttttttttttttttttgacaacttgctcttttaatgtggaatggatgaccctccaatatttccccagagcaccccatgctcttctatcagggaacttattaaaatcatgtaacatgtttcttggtgacaagatttaggtcttttgtttctgtaacacatgccagatacttagcccggtatctggcatgtggcatgcccagtaaatgtttgccgaataagtgaatccatgtctcttgcttgccgctatttgcccactgaatccatgaagtgagttttcataatggataccactgaaaattcaaccctgaaaagaatgtcttcggttgtgggcccataaagtcttagaaatagtgaagctcctactgtcagtccttgaaagggaacaggacagctgctgtatgccttgagaatgggcaaaagacaagcgacaaaaagagcaccgaaggcacctacttgtccctctgggccagggcctcagtgtattggtcgggcttgacctggtctcctggtacatcttcccagtttttggtgactcccttcagtttctctgagagcttccaggttacactccttctctgcttccaccaggantgccattcgcgcagcttcattctttgctagcctggattcctcctgcagaagctgcatcttattctccaagagctcataaacatgctccgtctccctgtgtcgctcctcaaactggcgtcggagctcagcttcattctgactgttgagattctccacatcagcccatgttttatccagatgctgtttcttgtcctggagttctcgtttcaagctctccacttcaaccttcag

SEQ ID NO: 13403 - DNA, 1170 bp, Homo sapiens
ggaaagacggtgcttctccatcttgagagtgggcctggatcccaacaagtgtcagactttgaggacaatacctgcgaaatgaaaccaggaacctggtctgacgagtcttcccaaagcgaagatgcaaggagcagtaagccagctgccaaaaaaaaggctaccatgcaaggtgacagagagcagttgaaatggaagaatagttcctatggaaaagttgaagggttttggtctaaggaccagtcacagtggaagaatgcatctgagaatgatgagcgcttatctaacccccagattgagtggcagaatagcacaattgacagtgaggatggggaacagtttgacaacatgactgatggagtagctgagcccatgcatggcagcttagccggagttaaactgagcagccaacaggcctaagtgccaggttccctggcgtttggtgacatgctgcagcctggaactctgatctccagtgtgactgcaaagctgtcttctcactggtactgccttgtgagtactggttggactgtggggcatgtggccgctgcagttccagtggttatttctaagtctatgacaggacaggctgttcttgcttcagaaccttctctgacagacacggtaactaaatgtgaaaaaccaataagctggtgactcatgaatacacacgaggaaaagcagaggtttattttatctgccttttcaacatttctttccctctgtgaaatgattggtcagatgtctttgagaagtgttaaactaattcacatggtagtgtagggccaacatacaagctaccagtctaatgtgtatagtagactttgggaaaagcgattttttttcatgtattcattctgaatagttgaaatgtatatttgtacagtcttttagacctattcaagtgatgctcatgatcctgtttactgtgtgccccatcatagatttctttttttagtgttgcccttgctgtgtaataaacgctctatctagtttacctagcaaaagctcaaaactgcggtagtatggactttttggacagacttagtttttgcacataaccttgtacaatcttgcaacagaggccagccacgtaagatatatatctggactctcttgtattataggatttttcttgttctgaatatccttgacattacagctgtcaaaaaa

SEQ ID NO: 13404 - DNA, 938 bp, Homo sapiens
gaattttcactcattacctagagtaaacttattgcatattttcataatcagtcaaaataataaaactaaaaacaaaaagtaaaaattagttcccaagtaaatatatcagtgtttcctgtgtttgggcagaagtgcaaagtagttttaatttctcacgttgtagaaaaagaggccaaaaaggtcaccttagtttatttttccaaaacataactttaggtattctaatgtattttgttagttgcttagaaatggaaataaaatatatgtgcttattaaataatgcacagtacactagattatagagtttatttttgcttttatgctttaaagaatgcatgcccaaaacactactaccaacaagaggattttttaaaatcacagaattgatatttatctcaagactatcttaagctaatgtacttctgttacataattaaactatttctgctattatttttaaagcagtattattttataaccaattctaaaattcagctttaaaaatattgaacataccttcctaccacttacgcttcaagtttcatttattgaataccagggtcatatcttagaattgtatataaaacaacatgtaacccattcatgaaaaacgtttttaagtattgctttttgctgctatgttctgcattgagcctagttttgccattgtcccctgaatgtagtattatctatagattatacataactacatctattgcttttggtggtaaatcaagatttagttgtaattttccagctgtgaaaatgttgccttgtatttaaaagggtttcatgaatggaaacctaagtaaaactaagctcattagtgacagacttgttttcttcttgttattcctccagcaactccctcaccaccacgcctccctgcctaccatccccggaaggtggcttaattccttaacaaagagaatctaaaa

SEQ ID NO: 13405 - DNA, 987 bp, Homo sapiens
gctactgggctccatcctgagctccatggagaagccacccagcctcggtgaccaggagactcggcgcaaggcccgagaacaggccgcccgcctgaagaaactacaagagcaagagaaacaacagaaagtggagtttcgtaaaaggatggagaaggaggtgtcagatttcattcaagacagtgggcagatcaagaaaaagtttcagccaatgaacaagatcgagaggagcatactacatgatgtggtggaagtggctggcctgacatccttctcctttggggaagatgatgactgtcgctatgtcatgatcttcaaaaaggagtttgcaccctcagatgaagagctagactcttaccgtcgtggagaggaatggggacccccagaaggctgaggagaagcggaagcctgaaggagctggcccagaggcaagaggaggaggcagcccagcaggggcctgtggtggtgagccctgccagcgactacaaggacaagtacagccacctcatcggcaagggagcagccaaagacgcagcccacatgctacaggccaataagacctacggctgtgtgcccgtggccaataagagggacacacgctccattgaagaggctatgaatgagatcagagccaagaagcgtctgcggcagagtggggaagagttgccgccaacctcctaggcgccccgcccagctccctttgacccctggggcagggcagggggcagggagagacaaggctgctgctattagagcccatcctggagccccacctctgaaccacctcctaccagctgtccctcaggctgggggaaaacaggtgtttgatttgtcaccgttggagcttggatatgtgcgtggcatgtgtgtgtgtgtgtgtgagagtgtgaatgcacaggtgggtatttaatctgtattattccccgttcttggaattttcttccccatggggctggggtactttacattcaataaatactgtttaaccca

SEQ ID NO: 13406 - DNA, 644 bp, Homo sapiens
tttttttttttttttggagcaaagaaggtattttattaagaattttccataaaccataagatatattttatattactttgcgagccttcttcctgtcttgacttaattctttttgagagaattcatttcattttcatttggttggttttcttcttgttacaaagatgatctggtcccatgggtgggcctgtcctggggcattggtggcattctgggggcatgtctcttgctgtgccatctctgcctccccctggtaagagctctgtcttcctcttcattttgttcccatctcttcactcagagacttttctttggattgggaagggtaaaatatccgaagatttgaactccaaaagaaacaaaatgattctatgcaaacgtttcctacttaaaactcattcattggacaaatattcacttagtccctggcactatttggtaataggaatacaggagtgcatatggcagataaagttctgttgctgcccttaccaagtttcgtgggggtgagatgtggtgttagtaaatgcatactattttgtctgtatttaaatcgagtccaaatctctcgctttacagcccgccttgggatgtttcttatatcccaagaaacagaatattttgatgggatcgctgatgtttcc

SEQ ID NO: 13407 - DNA, 1156 bp, Homo sapiens
gggtggtcggtgtgcttgtgaccctgcctttgtgtggctgtcaccggtgggactggcggggactgtgtgattaacctccatttcagctaatcatgggagagattaaagtctctcctgattataactggtttagaggtacagttccccttaaaaagattattgtggatgatgatgacagtaagatatggtcgctctatgacgcgggcccccgaagtatcaggtgtcctctcatattcctgccccctgtcagtggaactgcagatgtctttttccggcagattttggctctgactggatggggttaccgggttatcgctttgcagtatccagtttattgggaccatctcgagttctgtgatggattcagaaaacttttagaccatttacaattggataaagttcatctttttggcgcttctttgggaggctttttggcccagaaatttgctgaatacactcacaaatctcctagagtccattccctaatcctctgcaattccttcagtgacacctctatcttcaaccaaacttgggactgcaaacagcttttggctgatgccctgcatttatgctcaaaaaaatagttcttgggaaatttttcatctgggcccggtgggaccctatgatgggctgatgccattgatttcatggtagacaggctagaaagtttggggtcagagtgaaactgggcttcaagacttaccttgaattgtcaaaattcttatgtggaacctcataaaattcgggacatacctgtaactattatgggatgtgtttgatcagagtgcgctttcaactgaagctaaagaagaaatgtacaagctgtatcctaatgccccgaagagctcatctgaaaacaggaggcaatttcccatacctgtgcagaagtgcagaggtcaatctttatgtacagatacatttgctgcaattccatggaaccaaatacgcggccattgacccatcaatggtcagtgccgaggagcttgaggtgcagaaaggcagccttggcatcagccaggaggagcagtagtgtgtctctcgctgtcaatgatgagttgacccggtgtgttcttgtatagtcagtggcatcagcacccgtcagccggccttttccttcaggttcgtcaggctcaccggttctcactgtgtctgggaa

SEQ ID NO: 13408 - DNA, 450 bp, Homo sapiens
  misc_feature (1)...(450): n = a,t,c or g
acctttnnnnntttgaataccgtnnnnnnnnnnnnnnnnnnnnnnnnnnnnnnnnnnnnnnnnnnnnnnnnnnnnnnnnnnnnnnnnnggcacgagnnnnnnnnnnnnnnnnnnnnnnnnnnnnnnnnnnnnnnnnnnnnnnnnnnnnnnnnnnnnnnnccgtgagggtggagacccatgctggggttggtgcccttatggttctcccatgtgaggacacnnnnnnnnnnnnnnnnnnnnnnnnnnnnnnnnnnnnnnnnnnnnnnnnnnnnnnnnnnnnnnnnnnnnnnnnnnnnnnnnnnnnnnnnnnnnnnnnnnnnnnnnnnnnnnnnnnnnnngcactcaatattttgttacagtagcccaagctgactgagcagatattcatatggaaagtgaattttgatctctacttcatgccgtacataaaagccaattccagattgactg

SEQ ID NO: 13409 - DNA, 723 bp, Homo sapiens
  misc_feature (1)...(723): n = a,t,c or g
gatggtttgataaaccacaattggctgatattgaaaatgaaagaaacttaaaaggtgggatggatcatgattactgtcgataactgcagataaatttgattagagtaataattttgtcatttaaaaacacagttgtttatactgcccatcctaggatgctcaccttccaagattcaacgtggctaaaacatcttctggtaaattgtgcgtccatattcattttgtcagtagccaggagaaatggggatgggggaaatacgacttagtgaggcatagacatccctggtccatcctttctgtctccagctgtttcttggaacctgctctcctgcttgctggtccctgacgcagagaccgttgcctcccccacagccgtttgactgaaggctgctctggagacctagagtaaaacggctgatggaagttgtgggacccacttccatttccttcagtcattagaggtggaaggggaggggtctccaagtttggagattgagcagatgaggcttgggatgccccctgctttgacttcagccatggatgaggagtgggatggcagcaaggtggctcctgtggcagtggagttgtgccagaaacagtggccagttgtatcgcctataagacagggtaaggtctgaagagctgancctgtaattctgctgtaataatgatagtgctcaagaagtgccttgagttggtgtacagtgccatggccatcaagaa

SEQ ID NO: 13410 - DNA, 937 bp, Homo sapiens
  misc_feature (1)...(937): n = a,t,c or g
cttttcagcctgggtgccacagcgagaccctagttaagagaaaaaaaaagtaaaaacaaattgtgggtcaaagtaaatgtatacagttttattacaatgtaacaaaagttgaaaatcaggcagatgtgtattcagtatccaattcaatatatcttagaaaaagcacaggaaacagaccttaaaattgtaacctaccaactaacttacatgcttataaaagtaaaggagaataactgggccgggcacggtggctcatgcctatannnnnnnnnnnnnnnnnnnnnnnnnnnnnnnnnnnnnnnnnnnnnnnnnnnnnnnnnnnnnnnnnnnnnnnnnnnnnnnnnnnnnnnnnnnnntttattttaaaaaaaagagagagtaactacagaagaactttaaaaaataaaaaataagcttaccttggattcttggcttagagtagaggttttttttaagttatggaggaaacatttttggtaaaagtttaatgaccccactttagatgctcccaagaacaagcatcccttccatgtatgtcttgagaaagaaatcacagaagcatttctcaccaatactctttggcttaaaatgttcagcagaattgggcagtgggggtgacttttcttatattaataatatttacatccaatacactgaatcttcctttagaggtaagactttaatatctatactgtaaatatttggtttatttggcactactgtaagttttgtttttcacaaagctcttattatgaagcaaaataaaaattctagtttcttgtatgattttttgtactcattcattcctgttaagctgccaaaaattaaagtgcaatattgtatatttttaagaacaaatttaaaatagaattttgatgtttctcagatcacaagaaatacaaatctatatagtataataaaatcagcaaaaagatca

SEQ ID NO: 13411 - DNA, 1290 bp, Homo sapiens
ctgcgatcccgcagggcagcgacgcgactctggtgcgggccgtcttcttccccccgagctgggcgtgcgcggccgcaatgaactgggagctgctgctgtggctgctggtgctgtgcgcgctgctcctgctcttggtgcagctgctgcgcttcctgagggctgacggcgacctgacgctactatgggccgagtggcagggacgacgcccagaatgggagctgactgatatggtggtgtgggtgactggagcctcgagtggaattggtgaggagctggcttaccagttgtctaaactaggagtttctcttgtgctgtcagccagaagagtgcatgagctggaaagggtgaaaagaagatgcctagagaatggcaatttaaaagaaaaagatatacttgttttgccccttgacctgaccgacactggttcccatgaagcggctaccaaagctgttctccaggagtttggtagaatcgacattctggtcaacaatggtggaatgtcccagcgttctctgtgcatggataccagcttggatgtctacagaaagctaatagagcttaactacttagggacggtgtccttgacaaaatgtgttctgcctcacatgatcgagaggaagcaaggaaagattgttactgtgaatagcatcctgggtatcatatctgtacctctttccattggatactgtgctagcaagcatgctctccggggtttttttaatggccttcgaacagaacttgccacatacccaggtataatagtttctaacatttgcccaggacctgtgcaatcaaatattgtgggagaattccctagctggagaagtcacaaagactataggcaataatggagaccagtcccacaagatgacaaccagtcgttgtgtgcggctgatgttaatcagcatggccaatgatttgaaagaagtttggatctcagaacaacctttcttgttagtaacatatttgtggcaatacatgccaacctgggcctggtggataaccaacaagatggggaagaaaaggattgagaactttaagagtggtgtggatgcagactcttcttattttaaaatctttaagacaaaacatgactgaaaagagcatctgtacttttcaagccactggagggaaaaatggaaaacatgaaaacagcaatcttcttatgcttctgaataatcaaagactaatttgtggttttactttttaatagatatgactttgcttccaacatggaatgaaataaaaaataagtaataaaagattgccatgaatcttgcaaaaaaaaaa

SEQ ID NO: 13412 - DNA, 715 bp, Homo sapiens
  misc_feature (1)...(715): n = a,t,c or g
gcccccgttcccagctctagcatttcttaaggacaaaattggtgtgtaagtaacagggaaatttcacattatgctgtaattcattctctaattattcacaggccatgtttaggaacaaattttggggttttttcaaaaacaaggcgttaantggaacagagtatatatatgtatgtatataaatatatagaaatcctaaatggtccctgtgacaataagaaatacacatttggtctctgcccccaggtccctggcacagagcttcctaaaatgcctagtaacttccctgaagtggtaggggtgaggggaacatcttttgttatacataagaagcccttttcaaacagatctgagtttatgctaatgatgtgactggcagaggatgggggctggttgccagagaaaccaaccatgtgattagaaggttgaaactttcagccttatccttcctaccgggaggggacaggggctgaagactgagctcatcatcaatgatttaatcaattgtgcccatgtaatggagcctccacttccaaacgaagggtttcagagagcttctaggttggtgaacacatccatgtaccaggaggtctaccccactccacggggacagaaactcttgtgtaggggacccttttagatttcattctatatacctcttcagctggctgttcattttataatcaaccaataaatgttaagtaaagtgttaaaa

SEQ ID NO: 13413 - DNA, 511 bp, Homo sapiens
ggataactaggtacagcgactttaaatacagttgctataatcctgaaaagccccaggagcacatcagggagctgggaaacacagttgcagagaactcagctgtatgttgccctctgaccttggccccagaccttcagaggctcagtctgttgagtctgttgtgactgtcttatgaatcaaatctgttgtgccaaccctttctgagattcagagaggtccagctagaaaaagtggcagttttaaccaccaacgtagaagcattttttttccccacaagaccattgtactgcaatacttgactatttgtgtagcaaacagcctcttaggttggagagtattgatttcaaataggaagttggtagactaggtgtgaggatgaaataatgaccttgatttttgggtgtgtattgcagaagcctcgtcgctttcaagtcacatcatatatgcgatctggcctaaccatggagatattggttatcagtttgcagatgaatacacagttctatccaac

SEQ ID NO: 13414 - DNA, 546 bp, Homo sapiens
ttttttgcaaatcaatatatagtgcttcataaatgttaacatgttactaaggatcagtgaatacagccctcctcctttcttaggtttcccaccattttcgagaactcatgcagctcttccacactgcctgtgaagccagctctgaggatgaggatgatgcaaccagtaccagcaatgcagaccagctgtctgaccatggggaccttctgtctgaagaggagctggatgaatgagactctgggaatcatctacacaggaccaaacccaacaggcgccctggcaccggggaggcgggtagttgtactctgcttgtacagtccttgagcccagtttacagatctggagagcaggaggccaggacaaggacaaaggctggaggatggagtaggacccagggggttctgccatcctaggcatcattcaaggtcttttatgaagactttacagatgtcctctgtaagtagcatcgagagtggagttcagctcctttctctacttttttttggtctgatggcacatatttattgttctgtggtctaatcacag

SEQ ID NO: 13415 - DNA, 1743 bp, Homo sapiens
ggttagggactgatactcagattgtggataataattgaattggtttttaaaggcaacatagcattctacagcagggttaatctattatcaagaacagtcaccctggttaataacaagttttactgatcagttgctggttggttggttggttggcatgtgggtgtgtggggtgtataggtgtgtgtgggtgtgtgtgtgtatttttccccatgagtcctttttttaatcctgtggctttttcacttacaactagcctaaccctgtaattttcctacatccaagaaaacaatcacaaagtagtggtttaaatactttgttgtatttgggctaattttgctgtcttaatgcagcctattaagagttggggttaaaaatcagtaatcagtactttattacatcactgaactaaaatatggagacatcctcattgaaaatggagggcactctatcagtctataactatcaacgtagtgcaacagggtgttttgatacctttgttttcacctcttgacataatgctatttaaaggcttgaatttttccctttatataattttcacctttactttcaaagtgttttgttgtagttgggctattgcagagagtgcattgtccctatccattcctaaaacctggtctgctttctacattcatggtatggaaaccatgtgattctttgtacagtttatcctgatgttgcttgtaatgcagtagaggctattacgccttcgcttttctttctcgacctttttgtaaaccctataattatgaagcgattgcttgagaaaataacatataaacatagaatagaatagactgaccaagatggttcacagtttctttttttaactaggttatttataatgtatttctgaaccacttggcagacaaattcacaacacttaatgttcatattttgagtaaaggaagctaaaaccatgtttgctttctggtactacatgcattagcgaaaggttaagtaagttttgttctccactgaagtaatacttaacatctcagaaaaaattttgcatgttctgtagttttgtattaaatcagtcatttcatatgcactatatcaagtacaaacaggtagtttacctgtttatagtagtgtactaacaaagtctcccttgcagcttcagactgttatctataggcttatcgttcaaatacagcacttgaatatcccaagtagttcttctacgcatagctcacctttctaaacccagttaagcatggaagagaggtagtaggtaggtgcagtgtgtggaagctgcaaacaagtaggccttttattcattgatatcttttcccaagtactggattttaaatctgtatgtatctgtttgattttttttttctaatatttcagttgagctgctgttttcttccatgcaatattgtatactcaattgtgtatagaagaagctggtgagagtgccctcctacataaataagcaattgcagtgttttgcatgcaaaatataaaaaatttaaattgtcctgattctattttgtaaatggagaaacaatcatatctttctaagcggtaatggaggaagactagtgctttgtgcattttgatatatttgagttcattttttccacaatgtcatacttttgacgcagttgggtttctcataagtatcctagttcatgtacatccgaatgctaaataatactgtgttttaagttttgtgttgcaagaacaaatggaataaacttgaattgtgctacagct

SEQ ID NO: 13416 - DNA, 1393 bp, Homo sapiens
aaaagctgaacgtgagccacacaggagtccccctaggcgaggagtacattctggtctttagccgaacccagaacagactcattctgaatgaggcagagctgctgctggcactggcccaggagttccagatgaagacagtgacagtgtccctggaggaccacacctttgctgatgtcgtgcggctggtcagcaatgcctccatgctggtcagcatgcatggggcccagctggtcaccaccctcttcctgccccgtggggcaactgtggtagagctcttcccatatgctgtcaatcccgaccactacactccctataagacgctggccatgctgcctgggcatggacctccagtatgtagcctgggcggaacatgatgccagagaacacagttcacacaccctgagcggccctggggatcaggggggcatcacccatctggaccgggctgagcaagcccgtaatcctgcaaagccgtgaggtcccacggcatctctgttgccggaaccccgagtggctcttccgaatctaccaggacaccaaggtggacatcccatccctcattcaaaccatacggcgcgtggtgaagggccggccaggaccacggaagcagaagtggacagtcggcctatatccaggcaaggtgcgggaggcacggtgccaggcgtcagtgcatggcgcctccgaggcccgcctcactgtctcctggcagatcccatggaaccttaaatacctgaaggtgagggaggtgaagtacgaggtgtggctgcaggagcagggggagaacacctacgtgccttacatcctggctctgcagaaccacaccttcactgagaacatcaagcccttcaccacctacctggtgtgggtccgctgcatcttcaacaagatcctcctgggaccctttgcagatgtgctggtgtgcaacacgtagcgagcatgccacagcctggcctcgggaaggtggctcctgcagttcagcgtccctgggcccattaatcccactgtggagacttctgggaactatttattgagcaggcctgtgcctccacatcatcttgttgtctctggggtgtggtgtcacagcactcctctttgccctagagataagggacctgacttccccttctcccatcctgaacatttgtacccctggagaagttccttagcagggaggaggaagaggagaggaggaagcaaagaatcacaaggaacctctggctaggtgatcctgatgtttcctactgagtttttctggtatccagatttctggaaaccgagtaatcatgtactgtttgattgggtggttcatctgcttccatcccagtgaaatttacctgtagcccagtgaagggtgtgtttggaacattcattaaatgattctaagcatcaaaaa

SEQ ID NO: 13417 - DNA, 450 bp, Homo sapiens
  misc_feature (1)...(450): n = a,t,c or g
ggagatggcttcgccacaccaagagcccaaacctggagacctgattgagattttccgccttggctatgagcactgggccctgtatataggagatggctacgtgatccatctggctcctccaagtgagtaccccggggctggctcctccagtgtcttctcagtcctgagcaacagtgcagaggtgaaacgggagcgcctggaagatgtggtgggaggctgttgctatcgggtcaacaacagcttggaccatgagtaccaaccacggcccgtggaggtgatcatccacttctgcgaagganannnnnnnntacnnnattcngagcaggaactgtgancactgtgncanncaacngaaatgtntcnagcccnnttnacaccctggaaaaggcccgggttgtactgnnaanggtccaancncntngananacagcccttgggnntnngantttt

SEQ ID NO: 13418 - DNA, 754 bp, Homo sapiens
ccacaaacaagaggagcaccagacctcctcttggcttcgagatggcttcgccacaccaagagcccaaacctggagacctgattgagattttccgccttggctatgagcactgggccctgtatataggagatggctacgtgatccatctggctcctccaagtgagtaccccggggctggctcctccagtgtcttctcagtcctgagcaacagtgcagaggtgaaacgggagcgcctggaagatgtggtgggaggctgttgctatcgggtcaacaacagcttggaccatgagtaccaaccacggcccgtggaggtgatcatcagttctgcgaaggagatggttggtcagaagatgaagtacagtattgtgagcaggaactgtgagcactttgtcacccagctgagatatggcaagtcccgctgtaaacaggtggaaaaggccaaggttgaagtcggtgtggccacggcgcttggaatcctggttgttgctggatgctcttttgcgattaggagataccaaaaaaaagcgacagcctgaagcagccacaaaatcctgtgttagaagcagctgtgggggtcccagtggagatgagcctcccccatgcctccagcagcctgaccctcgtgccctgtctcaggcgttctctagatcctttcctctgtttccctctctcgctggcaaaagtatgatctaattgaaacaagactgaaggatcaataaacacccatctgccccttcaaaaaaaaaaaaaagtc

SEQ ID NO: 13419 - DNA, 308 bp, Homo sapiens
  misc_feature (1)...(308): n = a,t,c or g
ggcacgaggttttcttttggggtgatgaaatgttttggaactagatagaggtggtgtttgcacaacattgcaaatggactaaacgtcattgagagagttaattttacattatgtggatttcaacttactaaaaatgaatgccagagtggcagctgagcctcctcactccacacccaccctcctctgcatcctgcagataggcccttcacccttatggtctgcaagactgagagagacatgccttctccatacctgtcactgtaggagttcctgtgggaacagctatgtttcctgagcactcangatga

SEQ ID NO: 13420 - DNA, 311 bp, Homo sapiens
tccacattttttatttttgtactatatactggggttctactaccaaaaaaaggaactactagcttataaagtttctttcaccatttaacattctatctctcacacatcaataccactcagggaataggaagaaacgttgaagtgccatcaagcaagttttacctgtgaatctgatcttgcctgcgtgaccgtactggagccagaccatcaatttcgtcaaaaaaaataattgatgggcgcatctgataggcctgatcaaacagcaatcgtagctgtctttcagattctcctacccatttacttagacaatc

SEQ ID NO: 13421 - DNA, 1902 bp, Homo sapiens
atgaaagtgaagttgcagccaccttctgggacagaactctctccatttagccccatccagccacctgcagccatcacccaggtcatgttgctggccaatccactgaaggagaaggtgcggcttcggtataagctgaccttcgccctgggggagcagctgagcacagaggtgggcgaggtggaccagttccctcctgtggaacagtgggggaacctatgaccccagaggacgctgtgatctccaccttgaagccaggcaggctgccctgagacgaggagggctctggtcccgtcactctccatgccctgacaacagtgcttgtagctttgatgtggaaacaggggccctgggcatttctgctgagaaccaaactgctgctgtgataacctctcctttggcccctaaaaggacctgtttttatctacctgtgtgacttgaagtggccatatgctgtcaggggtgcggagtggcccctgacttcactgctgtcccgggaacatggacccccaggcttggcgtaggtgtttgcttccttctactggcattcactgaagccactggggtggggggtggggggtgggagtctctaaagagagactgtcatgggtcattccccacaagagccacatcctcacacctgacagatgcacggcccaaggggctgcagccctgttgcaattccatgcttcccccgccaaccagctcctgctgccatccccagggaggtggcccaggaaggtgcctggcccagaataaggaactggcatactgcaaagtccccagccctgcctctggtggacagcatcgtcctggaatggccacggagtgatgagttgtgtgcttgtccctgggcagtggcaggctgtgtcctatggacatcttggcaggacatggaatttggcctcatgacaggcccaactagggataggaaggaaaatgaagagagccagtatttccccttctccagaagcaggtactcagctttctgggaaaagcgtgcctcccagccgtggggacaggccatcctactgactacctcttgcttggcatgaaataaactgctatcctccccttggaatctaccgccactctacatcctactgctttggcctccctctcctctcaccagatggcatgtggtgtggcacctgtggctggacacaggaggcctcaggatcacaaatgttacactagacatatgtcctaatgtgctgcccagaaacctcaactgttccccagctactgaggggcactgtcagcgagatgttgggtctggaggtgatgagatcgggccacacttgagctgagtcaccagaccctattgcttcaacagtgcttggcccccgccagcttgtcccagccactctagctgctggatgtgatcctgggacatgtactccaagcctccgtcacaaaaaaaaaatcaccagctgccatagacacgggggaagcttgcggagcccaggtgaacaagctcagcaatcggacatctctggggaaaggaaggtggcacagaccatgttccctggttcctccctgccccttgccaggcttccttattccttactatgggaagaggtcatatcccttccctgcccctcgctgtctttagcaagcaggtttcactgcttcattagaagaggacaagtcaaaagtgaatcatttttcactacttaaggaataaatccaagagctttccagagactggctgctgcagccctgggaatgtctgtggaattactatgtggaaatggaactttgtgttatgctctagacattacagttatttgagtgttactcgttactgttgaggtcagtgcttcgtggcaaatggctgtactggatatccccagctctgctgcccttgttttgctgcatgttaaataaaaccattttcactgt

SEQ ID NO: 13422 - DNA, 789 bp, Homo sapiens
ttttttttttgttagaaaagtctctttttaagtttttaaattaaaatttcgccctggtgagatgggattctgattcgggaactaaacccaaaggcaggctctccactttggacctggacacgcagcgggaggggcagggcgcccagggcagtcaagtctccctgctgggcagagcctggcctttgaccaaagtcagctcctcagtgccacatcagccctgcacattcagcaggagacaggggtgatgagctatggggccacaaccagcaatcagaggtggggaagaggccatggggagagagccctgataccaagagggccttccacagctttgacctcaggccctcctgggacctgcagctgctatgtggctgcccggtgactgcaggagtggtgtcctcttccagattccagaaggcatggctgttaaaggaggcagctgacagatgccttgtgcccacaacatcactccatcagctctgcagcatggcagccctacccccgagcaccccaggtgtgccaggcccattctcacgcacattagttatatttatctattcatatatattatagttatatattaaaaacagaggaaaaacttgcctgaaaaactcctgaaggacccacgtggcccaggaagtttactgtccccccgacccacaaaaattcttttataaaatcttccagtgcgatcttcgggaaaccccctgccctccccggctcccccctccctggccctcctgtgtccccacaaccctgggctgcccccagctccagcccagcgcccgg

SEQ ID NO: 13423 - DNA, 904 bp, Homo sapiens
  misc_feature (1)...(904): n = a,t,c or g
gcgaccgcctgccccgcccctgcccccgccccctgtcctgagcaccgttgctaacccccagtcctgtcacagtgaccgtgtctaccaggtgggtgaggccacgggtggagnctggggcggcgtctcagggctctctggaggggagtgaagccctggctgtgtctccctgtagggctgcctgacgcccgcccgcctggagccgcagcccacggaggtcggagcctgcccacccgccttgtcctccaggatcggagtcaccctgaggaagccccgcggcgacgcgaagaagtgccggaaggtgtatggcatggagcgccgggacctctggtgcacagcctgccgctggaagaaagcctgccagcggttcctggactaagtccggctcgttcaagaacataagctaccaccttctccctccccaccccctccaggcccggggctgaaacagcccgaggcacagccccaggggctggctttcaccagctgcagggtctgcttttacttggggtgggggggcggggctgaccctgaaccctcccccccgccaggtcggggaggggtcccaccactcaaagtgcctctaaagaaaccagctttttgcactaaagccaaaccacaccgctgtccccttagccccaagggccctgggggcagccaccctcccgcctgtcggcccgtagatttatcaagggtgttatgggcccagctttggggggccagtcccgatgcactttgaggggtgttggagaggggactcccccactcgcacttaactcaacggctctcgggccctggggctgtttttaccatgtttgtttttgaagctcaggtgtctcacgtctgggctgcaccaggcgaagagagaaattaaagatttgaggtttttccagaaaaaaaaaaaaaa

SEQ ID NO: 13424 - DNA, 762 bp, Homo sapiens
cggaagtggcgtcaggggcgctttagggactggacttgcagtgtaaacagagacgctgcaaattgcttgtggacggtgtaggccgctgcaggccaccatgaaccggcttccggatgactacgacccctacgcggttgaagagcctagcgacgaggagccggctttgagcagctctgaggatgaagtggatgtgcttttacatggaactcctgaccaaaaacgaaaactcatcagagaatgtcttaccggagaaagtgaatcatctagtgaagatgaatttgaaaaggagatggaagctgaattaaattctaccatgaaaacaatggaggacaagttatcctctctgggaactggatcttcctcaggaaatggaaaagttgcaacagctccgacaaggtactacgatgatatatattttgattctgattccgaggatgaagacagagcagtacaggtgaccaagaaaaaaaagaagaaacaacacaagattccaacaaatgacgaattactgtatgatcctgaaaaagataacagagatcaggcctgggttgatgcacagagaaggggttaccatggtttggggaccacagagatcacgtcaacaacagcctgttccaaatagtgatgctgtcttgaattgtcctgcctgcatgaccacactttgccttgattgccaaaggcatgaatcatacaaaactcaatatagagcaatgtttgtaatgaattgttctattaacaaagaggaggttctaagatataaag

SEQ ID NO: 13425 - DNA, 2828 bp, Homo sapiens
gaagtatgattcgtagcttaggtccccccagcccccacctgggcaggtcgctctcccggctgcgtcccttttcgtccatgtcctagcagagactacagagcagtacagaggctctcgctgaaaccagtcccaggctccacagagtcagatcacggcttcacaccagtcgttctggtcacttaggcgttcgcgtgagccgtcaaccccttaccgccacctcatcgtcactctacaccattccagcacacggcaaaatgcagaggactacctttccctggtccgccccctggccgccccttgggagatgcagacttcgtgttctgctgcggagccagacgcccaggccaggtgggagtctgcactcttcaaggggcctgggctgctgctcacgggtattaaagaactccgcgttgttcatggctgaggcgatgcattaggaagatcctggacctagagaacaagtcccccgaacgctgagttggaggcgggacttcgggtgcgcgttggcgggacatgctggggctctgggggcagcggctccccgcggcgtgggtcctgcttctgttgcctttcctgccgctgctgctgcttgcagccccgcgccccaccgcgcgtcctacaagccggtcatcgtggtgcatgggctcttcgacagctcgtacagcttccgccacctgctggaatacatcaatgagacacaccccgggactgtggtgacagtgctcgatctcttcgatgggagagagagcttgcaacccctgtgggaaacaggtgcaagggttccgagaagctgtggtccccatcatggcaaagggccctcaaggggtgcatctcatctgctactcgcaggggggccttgtgtgccgggctctgctttctgtcatggatgatcacaacgtggaattctttcatctccctctcctctccacagatgggacagtatggagacacggactacttgaagtggctgttccccacctccatgcggtctaacctctatcggatctgctatagcccctggggccaggaattctccatctgcaactactggcatgatccccaccacgatgacttgtacctcaatgccagcagcttcctggccctgatcaatggggaaagagaccatcccaatgccacagtatggcggaagaactttctgcgtgtgggccacctggtgctgattgggggccctgatgatggtgttattactccctggcagtccagcttctttggtttctatgatgcaaatgagaccgtcctggagatggaggagcaactgcctgccaggcccacccaccagtctgagctgcttctgctgaggctggtctgcttgaagcctcccaggagaaagaagccagcctgtagggtccagcgtcaaagcgaatcatggggtccagggctgagctgtgcactctcttaggcggattctccttcctcctgctactgataccaggcgagggggccaagggtggatccctcagagagaggtgacaacagagggggtagggcccggggtgagctcttctcaggagccttctgctgggggtggggcttcacaggaggcaaaacataactgtaagtttagaatgggggtgagaggctgtcatctggagggagagcggggggcctcagtagcctcttgagggaagtgggactcctggctccccagggcctggcctactcaatctctcccacctcatcctctggcatggacgcagtcagggagtctgctccaagcagacactggtggtcccgctccactacaacgagtcctacagccaaccagtgtacaagccctacctgaccttgtgcgctgggaggcgcatctgcagcacttacaggaccatgtaccgcgttatgtggcgggaggtgaggcgggaggttcagcagacccatgcagtgtgctgccagggctggaagaagcggcacccgggggcgctcacctgtgaagccatctgcgccaagccttgcctgaacggaggcgtctgcgttaggcctgaccagtgcgagtgcgcccccggctggggagggaagcactgtcatgtggacgtggatgaatgtaggaccagcatcaccctctgctcgcaccattgttttaatacggcaggcagcttcacctgcggctgcccccatgacctagtgctaggcgtggacgggcgcacctgcatggaggggtccccagagcccccaaccagtgccagcatactcagcgtggccgttcgggaggcggaaaaagatgagcgcgctctgaagcaggagattcacgagctgcgagggcgcctggagcggctggagcagtgggccggtcaggctggggcctgggtcagagcggtgctgcccgtgccgcctgaagagctgcagccagaacaggtggctgagctgtggggccggggtgaccggatcgaatctctcagcgaccaggtgctgctgctggaggagaggctaggtgcctgctcctgtgaggacaacagcctgggcctcggcgtcaatccatccgataagaagcctcttacagcaaccccttgccccctaatttatacagaaaccggacccactaatcctctgggattggccgactgtgagctgcagataaggctatcagccaccaaagagcaatgaacaatggaaacttcagagagctgaagaaagggggaggcctgtgttcttggcctgcccctgagtcttctggctgggggcaggttgcctgggcaagaactgcttcttcaattccttaacaaatgcaaccaccaacacccagatctctctctctctttattttcagtttttttgctgttatccagataattaataaaaaccaaccacgcaaa

SEQ ID NO: 13426 - DNA, 1150 bp, Homo sapiens
ctggcctgggcaaatccacacttgtcaatagcctcttcctcactgatctgtaccgggaccggaaacttcttggtgctgaagagaggatcatgcaaactgtggagatcactaagcatgcagtggacatagaagagaagggtgtgaggctgcggctcaccattgtggacacaccaggttttggggatgcagtcaacaacacagagtgctggaagcctgtggcagaatacattgatcagcagtttgagcagtatttccgagacgagagtggcctgaaccgaaagaacatccaagacaacagggtgcactgctgcctgtacttcatctcacccttcggccatgggctccggccattggatgttgaattcatgaaggccctgcatcagcgggtcaacatcgtgcctatcctggctaaggcagacacactgacacctcccgaagtggaccacaagaaacgcaaaatccgggaggagattgagcattttggaatcaagatctatcaattcccagactgtgactctgatgaggatgaggacttcaaattgcaggaccaagccctaaaggaaagcatcccatttgcagtaattggcagcaacactgtagtagaggccagagggcggcgagttcggggtcgactctacccctggggcatcgtggaagtggaaaacccagggcactgcgactttgtgaagctgaggacaatgctggtacgtacccacatgcaggacctgaaggatgtgacacgggagacacattatgagaactaccgggcacagtgcatccagagcatgacccgcctggtggtgaaggaacggaatcgcaacaaactgactcgggaaagtggtaccgacttccccatccctgctgtcccaccagggacagatccagaaactgagaagcttatccgagagaaagatgaggagctgcggcggatgcaggagatgctacacaaaatacaaaaacagatgaaggagaactattaactggctttcagccctggatatttaaatctcctcctcttcttcctgtccatgccggcccctcccagcaccagctctgctcaggccccttcagctactgccacttcgccttacatccctgctgactgcccagagactcagaggaaataaagtttaataaatctgtaggtggc

SEQ ID NO: 13427 - DNA, 1915 bp, Homo sapiens
  misc_feature (1)...(1915): n = a,t,c or g
agaagatagaagagttggtacaacaaatcttcacttagatgtgtctgatgctgttaatgtgatggtgtatgttgggattcccatcgagggagggtgctcatgatgaagaggtactcaagacaattgacgagggagatgccgatgaggtgacgaagcagaggattcatgatggaaaagagaagccaggtgctttatggcacatctatgcagccaaggatgcagagaagatccgggagctgctccgaaaggttggagaagaacaaggccaagagaacccccctgatcatgacccaattcatgaccaaagttggtacctggaccagaccctccgtaagcgactctatgaggagtatggcgtgcaaggctgggctattgtgcagttcctaggtgatgctgttttcatacctgctggagcccccaaaccaggttcacaatctatacagttgcataaaagtagcagaagactttgtatctccagaacatgtaaagcactgtttccgcctgactcaggaattcaggcatctctctaacactcatacaaatcatgaggataaactgcaggtgaagaacatcatttaccatgcagtgaaagatgcggttggcaccctcaaggctcatgaatccaaactggcaaggtcctaggcatggagaaactccaagctcctctgtgaagcaggtctttcactcacaacacttaacagggaacggcagggctctttgctggagcagaggcccttcacccagagccagtgtggtcagtattccaaactctccagccactctcttctacgctgcctcaacactgaaggttgacacaggaaagtcgtactgttcacacacacagtttgagactccaagccaagagtgccacatccctatcctgtggccttttggaaatccaaattgcctgaacatggcggggctttcctgcacattctcctgatttgagattcacgggcacacctttcttttcttttcctcttgtgcctagttaagtgggaatgtgtttggagataggggaaatcacataactggtacaagtatggggtaattgcttaaacatgcctggtggaagtctgatagcgtctctgcacgtgacctctgacaaagcccatcccaggagacggggtgaagctattccccacactctcctgtgaacactggagtcttgcaagacccaggggagaacccactgcttttcccaggaggctccaggattaggaaatgtgtgtatttagtgaaaaataggtttgtagtgaaatagttactatttcatgaaagtagatatttttagaatttttgaaataccacagttgttttcctggattataaggaaaggcacattacatttagtcttcctttcgatataaaactctttgaagaaatatgatttttagaaatcagctacccattatagcacaaaatcagccaaagcagaatttttaaaaattggcttttttaggattctttttctccccctcccatcttagtcttaccttgagggaacagtcatatgagaaggaactttgtcacatctaagctgtggtgtgttccccatgtgtgtgtacaacactggtgactccaggaaccattttcacctattaccagtgttccctggggactcctcttaatgtttccaaatgggaaggacagttgatttccaacatgaggttttttgttttttatccagaaattatttttcagcaaaacttttccaactggagtgggagtcttgatttaagggttttattttgaaaatgggtggggattcattgggcccatagggtacattggggaaaatgtatatctctcccagctgttactgtaggtgccctgcagggctgtttanatgttcacagttacttttttttttttttaaataaaagtcatttaatgtagggatacttttaatttt

SEQ ID NO: 13428 - DNA, 905 bp, Homo sapiens
ctggggcatgtgcaaaggcagcacgtaatgtgtaagttctagatcgtcagggaggaagggtcagttgggtgcctgtttttctgtttttagtcctttaaaatgagtagaagcaacctgttaccctggaaagagcactggacatagacctagtgctgcgtgatgttgagcacgtttcttcttccctttgagtcccagtttcccttttggttacagggggatagtagcccccagggatcatgtgaaagtgagaaagcccttttcacactgtggagcggtgcagatgtgggaaacctcaaagatggttgcccattttaaatcctttcatctctcatctctctttcttctctcccttctgccctgacgtagccatggttgggtgggtgaggccagaagaaactgcctccggcaagaggtagcagccgctcaggtggctctgctggcatcggagcccacagaagtgaggagtggccgatggacctgccctccaaatgtgcctgactctgggtcttgctgtcactggatttcctggcatggcagacagaaagaaagatagtttgaccaagtcgtagaagctgatccagcgggtaaaaagggggcaaggaactcgtcccttttattcttgcctcagagctgcctgaagacatgggccaggcccgaaggctggacaactttggataacgctgacctgtacttccaagtaaatgcctcctgaagagcccgggacccttcctgggagaattctgcagccagaatgaaggtgccatcagcaggaggcactgtgaagcaccatcctgtcgctgtccttgtccattcctagcaagttaatcgtgtcttgttaaccagcagttcctgttcaacgtgtaaagagacctgatgttttccctaataaagctgataacagaaaa

SEQ ID NO: 13429 - DNA, 949 bp, Homo sapiens
ttttttttttacaaagcagaggctcttttagtaatgtgctagaaatccagagacacaatgggttttctaggaaacaaaccaccagtgtacaaaaccgtacagcattgctcccgtgatccgtacaaaatgattgtccgcatggtggagtaaggctggggctgtgggaggggaagcgaggagctgaggaggggcacagttctattgccaccaccaccagggctgtgccccctggccgccagtgggtgccacttgggtgcactcaactatgacatcaaggatgagagggcatctgagctagatcacatcccagggcccacagagctcacagcctgtggggggaccccaactccctgctgggtggggccaggcataacctggggatagctgtccctaacctcaatgacaagggcacccaccctggctggactcccgtctgttgacactgctgccattgggtatttgtcaggtcctggccaaaaccaggtcctttctcaggacagggttgggcagatggacacattaactcgctctggacagggccgagatcccactcctcctggaataggcccccccacctcggggccttgactcccctgggcagaccccggggtgctgctggcccctccacgtttccacccctggggaggaagaagggccgaggcgaggcccagatgctcaggtcagagactcacacctttagaagctgtcccctgacccttgcttccaaaacgcccatttcaacacacaaaagctaaaaggcacccaattgtgcaataaagttccctctctgtgaaagggagggggttctagcctggggctcgatgtggagctcctgctgatggcccatggccctccagagaggaagaggacaaagccagtctgactcccgggggaatcacagtgagtctcaataatgtgttgctttcccaaagggctgtgctttaaaaac

SEQ ID NO: 13430 - DNA, 185 bp, Homo sapiens
catatctgacacacaatagctaagacccaactgggattagataccccactattgcttagccctaaacctcaacagttaatcaacaaaatggtccccagaacactacgagccacagcttaaactcaaggacctggcggtgcttcatatcctctagaggagctgttctgtaatcgataaccccgttc

SEQ ID NO: 13431 - DNA, 713 bp, Homo sapiens
gagcagacattgcaggcctgaagaaaggtggtcacaagaggggtggaacattcctgcaaatggtttcaatatatgcagatgtctcgatataggaatgaaattacgtctttggaacaacttaaataagtcaaatatacttggagctttaaaaattaaaaggagagagattcgagcaccttttctgctgccatgacaaccatgcaaggaatggaacaggccatgccaggggctggccctggtgtgccccagctgggaaacatggctgtcatacattcacatctgtggaaaggattgcaagagaagttcttgaagggagaacccaaagtccttggggttgtgcagattctgactgccctgatgagccttagcatgggaataacaatgatgtgtatggcatctaatacttatggaagtaaccctatttccgtgtatatcgggtacacaatttgggggtcagtaatgtttattatttcaggatccttgtcaattgcagcaggaattagaactacaaaaggcctggtccgaggtagtctaggaatgaatatcaccagctctgtactggctgcatcagggatcttaatcaacacatttagcttggcgttttattcattccatcacccttactgtaactactatggcaactcaaataattgtcatgggactatgtcccatcttaatgggtctggatggcatggtgctcctcttaagtgtgc

SEQ ID NO: 13432 - DNA, 286 bp, Homo sapiens
  misc_feature (1)...(286): n = a,t,c or g
gcttatacgtaggaatgtaattaggttctaggctttggtaattatacagattttaaaaatccagttaactattcatagggaagtgggagaataaagacattttttctttgtgctggacttgcctatgctttcctggcctctgccaattgaatgtcagtaacactttttttttttctgnnnnnnnnnnnnnnnnnnnnnnnnnnnnnnnnnnnnnnnnnnnnnnnntgttatgtaggcaaacctgngccatgggggttggntgcncanatcaactcatcacctagct

SEQ ID NO: 13433 - DNA, 587 bp, Homo sapiens
atcaagcttgctctgtcaccatcgccccggaatcctgcagagcccattgctgtccagaataaccagcagctgggcgctaaaggtagagggagtggttcagcacggatctaaaccaggactcttccgcaaaattcagtctgtctgtctgaatgtttcttccacactgcaagagtaaatctggacaagactacaagatacccattgacaacatgaccaatgagatggagcaaagggttgaacctcataatgattacttcagtactcaatttctgttgaactttgctatccttggaacacacaacattacagtggaatcttctgtgaaagatgccaatggtatagtatggaagactggtcccagaactaccatatttgtaaaatccctggaagacccttattcccagcaaattcgcttacaacagcagcaagcccagcagccattacagcagcagcagcaacgcaatgcctacacacggttttaaccatggaatgaatgcactgcagactctcaagagatcaatcaaattgccagaaacagtttggtttttcatatggaataagtattaaagttacagtgtagttcattt

SEQ ID NO: 13434 - DNA, 367 bp, Homo sapiens
ggttttctcagctgtgaaaggaatattctggtggggacaaggttacagagttgctgagagggtctcatgacatgaaggtactggccttggcacagtgcctgggggggcggggactccgcacatgcctgtgatgtcacagttactgtcagttcacagcgaaccttccctccttttcctgttgactttcccacactcctgtaaccctccctccctcccttcttcctctctctctcactcacgcacacgcacacacacacacacacactccatttcactgtctccatgactctggagtaaactaacgtctcgagttgccattggaagccccattgtcctcattttgttttgttttgtttgtttgagacgg

SEQ ID NO: 13435 - DNA, 1810 bp, Homo sapiens
  misc_feature (1)...(1810): n = a,t,c or g
aaaacacacaatcccattatatgtgaaccatatccacaataccagaatctaagattcccactctgaaagagtaactagaacaacttctttttgaggcaattctgcttacttagcacattactcccccctacagttttccttcttttgtttttgtactaaggatatttgtataaaaacaggatctttgttgcttagtaattcatctgctccagctgcttgtattctgttcccaatcaaaattcttggttttcagcctcctcatcatttttataaggagttgaatgaattggccaagcttgttcctttctccctctccatggaacaccaggccccaagctccccgacactgctcctctttttatttctatctttgggttgtgtgtacactctagaacacttgtatcagtgaagagtgtaacaaagtattgtgccacgcatagtctctcatatatcatctatcagctcatcaaaaagtgctcactgattaacagaggatcccctcctcagtttcagaattctctagctttaagttaggggagggttaccccaaagtcagagagggtacatgggagagggttgtgaaggccagtagcccagagaaaatcaagggcagctgggtgcatttaggtggataagaaaacaatgaattactccatcaaaagcaaaagcacaagcaccttggtaaaggtggatcaccccactgttaatgtcaattcagtttaaagcactttattaaccacacatacatattttccagtgtctaattctcatcgtgttcttttccattccagacttccctgtctctttcccagagctctgttcctcttctcactgtttctggaaggcagttgcactcaaaagtgaagtcaccagtctgccgacaggtgcctccattgacacaaggcgagggtgcacagggcacatacaggctgtcacagtactggcctgtgaagccctgaaggcactggcactggtaggaaccaggcaggttgaggcaggtgccaccatgctggcagtgtcctggaatgtcacactcattgacatcagtctcacacttctgccctgtgaagcctgtgaggcatttgcaggagaactggttggccacagtggtacaggtacttccatttgcacagggatgagacaggcaggcatcggtccattggcactccttacctgtaaacccgacctgacaggtgcactcataggtatcccggctgagcatatggcatgtgccgccattcaggcaaggtcgagacacaaagcatggatgagatgtcgagtactggcagtcctctcctgtaaaccctgaggcacatcggcacgtggctttccccagcatggcctgggccacacaagttcccaccattctggcagcggttcttctcacaggggtctcgatgttgacaatattcccccaagaagccttctggacatttgcagtatcctgtgccattgtggtaggtaacacacattccttcatttacacagggttcatagccatctcgacactgcaatgcatgcgcgggggtcgcgcagcacagccagagcgccagcagcgcccacagcagagcggggcgcagggcgggtatcttctcggtcgcctcctccgccgccgccgccgccgccgcctgggcagatccacatggggagggggtcccaatagaggagccccactctctcctcccctcctcctgcttcaaaggctcaggccctggcgctacgctccgaagcccaggcgcaaatgcctcgactccccncgccccgangtccncgctccntnccgccgcctcagccgccgcccgaaagtttg

SEQ ID NO: 13436 - DNA, 449 bp, Homo sapiens
gcagcctcagcaagctccggccccaagccctcaccttctcccctaagttggggtggaccaaagagcctgcctgttcccgccccacctggggaaatggggaccacgccttctgctccaccacaacgcaatcggaggaaatctgttcaccgagtgttggcggaactggatgatgagagtgagcctcctgagaacccgccaccggtccttatggagcccaggaagaaactccgtgtagacaaagccccactgactcccactggaaatcgacgtggccgtcctcggaagtacccagtgagcgctcccatggctccccctgcagttgggggcggggagccctgtgcagctccttgttgctgcctgccccaggaagagacagtggcctgggttcagtgtgatggctgtgacgtctggttccatgtggcctgtgttggctgcagcatccaggctgc

SEQ ID NO: 13437 - DNA, 2975 bp, Homo sapiens
ccattccggctccagtccccgggctcggcctcggcgaggtgtaattcgcagcgcggccggccccggaagctctcggcgagcgcggcgggtaacaagtgggcgaggatgccgtacgagatcaagaaggtgttcgccagcctcccgcatgtggagaggggcgtctccaagatcatcggcggcgaccctaagggcaacaattttctgtacaccaatggaaagtgcgtcatcctaaaggaacatcgacaacccaagcccttgctgacatctacacagagcacgcccatcaggtggtggtggccaagtatgcgcccagcggattctacattgcctccggagatgtgtctgggaagctgaggatctgggataccacgcagaaggagcacctgttgaagtatgagtaccagcctttcgctgggaagatcaaagacattgcttggactgaagacagtaagaggatcgccgtggtcggggaaggaagggagaagtttggagcagtcttcctctgggatagtggctcttctgtgggcgagattacaggacacaacaaagtcatcaacagcgtggacatcaagcagagccggccataccggtgtgccacgggaagcgatgataactgcgcggcattctttgagggacccccattcaagttcaagttcacagttggcgaccacagccgctttgtcaactgtgtgcgattctctcctgatgggaacagatttgccacagccagtgctgacggccagatatacatctatgacgggaagactggggagaaggtgtgcgcgctgggcggaagcaaggcccacgacggtgggatttacgcaattagttggagtcccgacagcacccatttgctttctgcttctggggacaaaacttccaagatttgggacgtcagcgtgaactccgtggtcagcacatttcccatgggctccacggttctggaccagcagctgggctgcctatggcagaaggaccacctgctcagtgtctccctgtccgggtacatcaactatctggacagaaacaaccccagcaagcccctgcacgtcatcaagggtcacagtaaatcgatccagtgtctgacggtgcataaaaacggcggcaagtcctacatttactctgggagccacgacggacacattaattactgggattcagagacgggggagaacgactccttcgctgggaaaggccacacgaaccaggtgtccaggatgaccgtggatgagtcggggcagctcatcagctgcagcatggacgacaccgtgcggtacaccagcctcatgctgcgggactacagcggacaaggagttgtgaaacctggaccgttcagccaaagtgccgtagccgtcggccccgggggatacgccgtggtcgtgtgcattggacagattgtcctgctgaaggatcagaggaagtgcttcagcatcgacaaccccggctacgagcccgaagttgtggcagtgcaccccggcggggacacggtggcaattgggggtgtggacggcaacgtccgcctgtattccatcctgggcaccacgctgaaggatgagggcaagctcctagaggccaagggccccgtgaccgacgtggcctactcccacgacggcgccttcctcgcggtgtgcgacgccagcaaggtggtcacagtgttcagcgttgctgacggctactcggagaacaatgttttttatggacaccatgcaaaaatcgtctgcctggcctggtccccagacaatgaacactttgcctccggtggcatggacatgatggtgtatgtttggaccctgagtgacccggaaaccagagtcaagatccaagatgcacaccggctgcaccatgtcagcagcctggcctggctggacgagcacacgctggtcacgacctcccatgatgcctctgtcaaggagtggacaatcacctactgaggagccccacccccgcctctggatggaccgaatcagggactagagtttaactgcagcggaacatgtcatttctctatttctgtgacgcgcccccatgcccccaccccaccacaagaggcaggagggcccagtcatgaccctcgtctctgcagggtgtctgtacacgttcttctgaaagctttagacagtaacagtttgcacatgaaaaataaagcgagcacctaaacaatgtgtggagcataactaaaacccacagcccaaccaaaccttgagaatgcgaaacattccagaggcagtagcctccaaagcacacagagcccctggccccgccgcggctctcactatctgtcaggggaggttgtacaggtgaatgagccggggggctcatgttcctgcctgcagaacatttctgtactagtgagaagagggaatatgcattgcagttcagcaaagccggaattctgtgttgaacagatgtctgtctccctagtgtgtgactcacaccttgtggctgccttcagagcgccacctccagatcagatggggacacacaacccctggatatgtttcattgtcagattttgtgcttgattttaagaatggaattgtgggtatctttccttttttttttaatgtatcttaactgttgcctgtcagtgtttacaaactagtgcgttgacggcaccgtgtccaagtttttagaacccttgttagccagaccgaggtgtcctggtcaccgtttcaccatcatgctttgatgttcccctgtctttccctcttctgctctcaagagcaaaggttaatttaaggacaaagatgaagtcactgtaaactaatctgtcattgtttttaccttccttttctttttcagtgcagaaattaaaagtaagtataaagcaccgtgattgggagtgtttttgcgtgtgtcggaatcactggtaaatgttggctgagaacaatccctccccttgcacttgtgaaaacactttgagcgctttaagagattagcctgagaaataattaaatatcttttctcttcaaaaa

SEQ ID NO: 13438 - DNA, 722 bp, Homo sapiens
ttttttttttttttttttcaggatactccatttattgaactccaaatctaacaaaattaagatcgctgcagtgtttcaaaaggaccttgaccttgttcccactgctatgctcactaaagtcagctcatttatgtttctgtagcctctgtatctgtagcttctgcatctgttttctgagaagctaacaggacttcacgtgcccgtttccttcgcagtctctcagcatttgtgatcatcataggatgcagagggaaaaagccagcaagacccagaagcttttccataggcttagagaggtgggccccgcagccaatccaatgacggatcctgtctaggttgagggcaacgagtttttctccatgactgttgggcaatggatcataggagcccagctgctctacgaaacggccatccctgggacacttgttgtgagcagccacaatgcggtagaacggccgattggtgcagccacccagggcaaggcggatggttaagtggcccccacggtaggccttgcagaggagagtagtgaggtggaccatggtgccgccggcgtgcggctcctcggagagccccgctacccgcacgcaccagctctacggccttggcagggcagagaacaaacacagaaagaacctgcaagccgacaccaggccgcaccgccaagcggtacaagcccgaaaacctcgactccggaagcggatgatccgctcgccatgccc

SEQ ID NO: 13439 - DNA, 671 bp, Homo sapiens
ggcttgcagtagcgggcggcagagctggagtgaagggagctagtgtttaggtagcagtcaccattatgctcaaagcggtgatcctgattggaggccctcaaaagggaactcgcttcagacctttgtcttttgaggtgcccaaaccattgtttcctgtggcaggggtccctatgatccaacaccatattgaagcctgtgcccaggtccctgggaatgcaggagattctgctcattggcttctaccaacctgatgagcccctcacccagttcctagaagccgcccagcaggagtttaaccttccagtcaggtacctgcaggaatttgcccccctaggcacagggggtggtctttaccattttcgagaccagatcctgggctgggagccccgaggcattcttcgtgctcaatgctgatgtctgctccgacttccccttgagtgctatgttggaagcccaccgacgccagcgtcaccctttcttactccttggcactacggctaacaggacgcaatccctcaactacggctgcatcgttgagaatccacagacacacgaggtattgcactatgtggagaaacccagcacatttatcagtgacatcatcaactgcggcatctacctcttttctcctggaagccttgaagcctcttcgggatgtctttcagcgtaat

SEQ ID NO: 13440 - DNA, 1167 bp, Homo sapiens
  misc_feature (1)...(1167): n = a,t,c or g
cccggaacagaggcggcagagaccaccccgatgtggcaggccctgaagctgctcttctgtgccacagggctccaggtgtcttatctgacttggggtgtgctgcaggaaagagtgatgacccgcagctatggggccacagccacatcaccgggtgagcgctttacggactcgcagttcctggtgctaatgaaccgagtgctggcactgattgtggctggcctctcctgtgttctctgcaagcagccccggcatgggaacccatggtaccggtactcctttgccagcctgtccaatgtgcttagcagctggtgccaatacgaagctcttaagttcgtcagcttccccacccaggtgctggccaaggcctctaaggtgatccctgtcatgctgatgggaaagcttgtgtctcggcgcactancgaacactgggagtacctgacagccaccctcatctccattggggtcagcatgtttctgctatccagcggaccagagccccgcagctccccagccaccacactctcaggcctcatcttactggcaggttatattgcttttgacagcttcacctcaaactgggcaggatgccctgtttgcctataagatgtcatcggtgcagatgatgtttggggtcaatttcttctcctgcctcttcacagtgggctcactgctagaacagggggccctactggagggaacccgcttcatggggcgacacagtgagtttgctgcccatgccctgctactctccatctgctccgcatgtggccagctcttcatcttttacaccattgggcagtttggggctgccgtcttcaccatcatcatgaccctccgccaggcctttgccatccttctttcctgccttctctatggccacactgtcactgtggtgggagggctgggggtggctgtggtctttgctgccctcctgctcagagtctacgcgcggggccgtctaaagcaacggggaaagaaggctgtgcctgttgagtctcctgtgcagaaggtttgagggtggaaagggcctgaggggtgaagtgaaataggaccctcccaccatccccttctgctgtaacctctgagggagctggctgaaagggcaaaatgcaggtgttttctcagtatcacagaccagctctgcagcaggggattggggagcccagg

SEQ ID NO: 13441 - DNA, 1734 bp, Homo sapiens
ggaatgcgttcgttgctcagtgtcggacttccccctattcccatcggccgaggctgtcactttacgctcataaccgtttttctttactgcactcgtgtcgggaggaaagggacttgcgtggcacccccagacctccccgtctccgcttccacgtttggtacatcctgcctgaggcaggaagccgcagctgagggacggcctgtcgtacggtgcggatggtggtggcctgcgaggctcatttctagcaaggaacaaggctttcccgctttgattttataaatattatgtttacaaagctgtaatatatagaaattgataagacgtgtccctgtccctggaaacgcaggcaccgcgtgtttggaaagacattcatctgggctgtttgacagactccccagttggtgccatgctctgtgcttagggaactgtgagacccctggaggggtgggtaccgggaccgcactcagcctggggtttggaggcggcctcctataggaagcgacctgggacctaagatttttagactgactgtgggttcactggaataaaaaggaagaaacaaagagcattgcaggcatcgggactgtcacatttgacaagatcaaagctgcaggaaaatggacagtgaggttcagagagatggaaggatcttggatttgattgatgatgcttggcgagaagacaagctgccttatgaggatgtcgcaataccactgaatgagcttcctgaacctgaacaagacaatggtggcaccacagaatctgtcaaagaacaagaaatgaagtggacagacttagccttacagtacctccatgagaatgttccccccattggaaactgacgcttggctcctttcttgtggatggattttctcaaagtacacagataaagcatggtttgtttcagtctccaaattcaaacctttgagtaataaatcagcactcaaaaatgttacacccatttagtttgtggtagcaaagtgcaatgcgaaattgaatgagaaactgagatttctcagtaatggtgaatatttcgctctttaaacctaaaactcttcattgagtagcttatatttgaacatgattggttaaacatttgcctctacctctgattttgctttgctgtcaaagtttaacaccttccaactacttatgtgtgtcctgtaacacagggtgattgaacgtatgagagggaaaggcaaagaaaaaggaagccagacactaggagaattattaacttctcatacttccccacattgagaagcattcggagtgtatttagcctgtagatgttgtgatatgcaaatatcccattccctggttactggcattcctaagattcttcatggtattttcaaactttggataaatttacagattagaaagatatctgacagttaatctctgttctccttacaaattccttttgtgctgctggaaaggatctttggctaggtggatgactagttttattcaaagccttttctcaaagccctttcagttacaaccaccccactatggaatcagtatttagttatacatttgtataagaacctgtattttgaaaaacacattcatgtatatttattcctggaattatttgcctgttaaacagtgtctttcatgttctctccccagattgtaaactctgtaagaagctgcttgtatctgtatcccttgttgaaactctgaaaacactgaataactaaaatctcttctcatccttaaaaaaaa

SEQ ID NO: 13442 - DNA, 1402 bp, Homo sapiens
cttcagaacctggaggagacaattgaatacaacgagatcctagagtgggtgaactcccttcagccagcaagagtgacccgctggggagggatgatctcgactcctgatgctgtgctccaggctgtaatcaagcgctccctggtggagagtggctgtcctgcttctattgtcaacgagctgattgaaaatgccacgagcgtagtgtccccagggtcttggcacactagagactagacagatgaaccgacgctactatgagaactacgtggccaagcgcatccctggcaagcaggctgttgtcgtgatggcctgtgagaaccagcacatgggggatgacatggtgcaagagccaggccttgtcatgatatttgcgcatggcgtggaagagatataagagaactcgactggctatcaggaagagatggaaatcagaaaatcccatcactccagcagctgggacctgagtcctacccaccattcttaatactgtggcttatacctgagccacacatctccctgcccttctggcactgaagggccttggggtagtttgctcagcctttcaggtgggaaacccagatttcctccctttgccatattcccctaaaatgtctataaattatcagtctgggtgggaaagcccccacctccatccattttcctgcttagggtccctggttccagttattttcagaaagcacaaagagattcaatttccctggaggatcaggacagaggaaggaatctctaatcgtccctctcctccaaaaccagggaatcagagcagtcaggcctgttgactctaagcagcagacatcctgaagaaatggtaagggtggagccaaatctctagaaataagtagtgaggccgttaattggccatcactgatggcccttagggaaagactggacctctgtgccaagcagtatccctgttcagcccaccttaaaggtgtaggcacccactgggtctaccagtatgcaggttgggatactgaaaatttccagatgagctcttctttcctacaagttttcataattagggaatgccagggtttagggtaggggttaatctgttgggggttgatgtgtttagcaagaagctacttcctagcttttgctaaaatatggttgggcactgcctcttgtgggcacaggccataattgttccatagacccctctctagccctgtgactgtagttagttactttgataattttctttggccattgtttgtttatatttcacaaactccacctactgccccccccccctcttttttttaagaatggcctgatcatggctatctcagccacattgttggcaatttaatttatttacttccttttttttttttaagaaaggaaaaaagaaaaaaaaatcaaacttgaaaaaaaaaaa

SEQ ID NO: 13443 - DNA, 456 bp, Homo sapiens
gtgtgtccccatcctggcagggcattgtgacctttgaggacgtggctgtttacttctcctggaaggaatggggtcttcttgatgaggctcagaaatgcctgtaccacgatgtgatgctggagaacttgacacttacaacctccctgggtggttctggagcaggggatgaggaggcaccttatcagcagagcacttctccacagcgggtgtcacaggttaggattcctaaggcccttccttctccccagaagaccaacccctgtgagatatgtggcccagtcttgagacagattttgcacttggttgaacaccaaggaacacaccatggtcagaaactgtatacagacggggcatgtaggaaacaattacaatttactgcatacccttcatccagcacccagaagcagcatgttggacagaaacacttcagaacaatgggggcagagacatgttttt

SEQ ID NO: 13444 - DNA, 592 bp, Homo sapiens
tttttgttacatacaagtgaaaactttatttgtccacaccaggataccgaacagaaaaacaaaggtggtgagaagttggtatacatagcaccttatttacatgatggacttgaggaggcagttaatcctatggttgtgtatcacaacctttattagcaatgccatcttctcttcctcctcctacttgaatatcccttacggtcaacagcccacgggcttggcacacaccagcactaatgtgctccagagtctttcccctacttgttacatgacagtgccttacatgtctgaaagtgctcatacattcatctgttcctttgatcctcacaacacccctgtgagggtaggtaggacaattatgagtttcccactttataaatgaggaacctgagttatggaatgctggaaaagcttttctaagggggttcaagtagtaatggttgggtctaccacataggcagattcctggcttgctttcttgcacactgtctccctgtattccaatttccctccccttaatatttttagcctatttttctgtgtacttattcaagacctttcccttgacttttattcccacattagggttact

SEQ ID NO: 13445 - DNA, 978 bp, Homo sapiens
cttctcttcctgcaattgctctatcacttcttccctctcaagtcccgccctttcagctacctccaactgctgaggaaccggttgcctaaaaggagccggcaaaagcgcctacgtggagtccagaggagcggaagtagtcagatttgactgagagccgtaaagcgcggctggctctcgttttccggataacgactacagctccgactgtcagtgccggccttcctcgtgtgaggggatctgccggacccctgcaaattcaatttctttcccattccgggcccttccctatcgtcgcccccttcaccttggatcatgttcaagaaatttgatgaaaaagaaaatgtgtccaactgcatccagttggaaaacttcagttattaagggtattaagaatcaattgatagagcaatttccaggtattgaaccatggcttaatcaaatcatgcctaagaaagatcctgtcaaaatagtccgatgccatgaacatatagaaatccttacagtaaatggagaattactcttttttagacaaagagaagggcctttttatccaaccctaagattacttcacaaatatccttttatcctgccacaccagcaggttgataaaggagccatcaaatttgtactcagtggagcaaatatcatgtgtccaggcttaacttctcctggagctaagctttaccctgctgcagtagataccattgttgctatcatggcagaaggaaaacagcatgctctatgtgttggagtcatgaagatgtctgcagaagacattgagaaagtcaacaaaggaattggcattgaaaatatccattatttaaatgatgggctgtggcatatgaagacatataaatgagcctcagaaggaatgcacttgggctaaatatggatattgtgctgtatctgtgtttgtgtctgtgtgtgacagcatgaagataatgcctgtggttatgctgaataaattcaccagatgct

SEQ ID NO: 13446 - DNA, 439 bp, Homo sapiens
  misc_feature (1)...(439): n = a,t,c or g
ggtccagtgggccgctgctctggtccgaggctgctgctcttgacctctgctctgcggctgttttccattggagtagaggctcctcctgtcctgtcctgcctgtggagggaagcaaaccttcccctggaccagagagaggagaaagcggagacaggtagcaacgctgtggaactggtgatgacaggctcttcagctccctgcaagtgaccgggcctggggaacagggcatggcacaggcacacaggaccccccagcccagggctgcccccagccagccccgtgtgttcaagctggttctcctgggaagtggctccgtgggtaagtccagcttggctcttcggtatgtgaagaacgacttcaagagtatcctgcctacggtgggcttgtgcgttcttcacaaaggtgggngatgtgggtgccacctctctgaagcttgaga

SEQ ID NO: 13447 - DNA, 1432 bp, Homo sapiens
cccgggggtttttgctgcgccaacgcattgactcgaaggctccgctcacgcccggcctgatcctgcctgaagatggtgccactggtggctgtggtatcagggccccgtgcccagctctttgcctgcctgctcaggctgggcactcagcaggtcggcccccttcagctgcacaccggggccagccatgcggccaggaaccattatgaggtgctggtgctgggtgggggcagtggcggaatcaccatggctgcccgcatgaagaggaaagtgggtgcagagaatgtggccattgttgagcccagtgagagacatttctaccagccaatctggacactggtgggtgctggtgccaaacaattgtcctcatctggtcgttcccacggcaagtgtgattccatctggtgtagaatggatcaaagctagagtgactgagttgaacccagacaagaactgcattcacacagatgacgacgagaagatctcctaccgatatcttattattgctctcggaatccagctggactatgagaagattaaaggcctacctgaaggtttcgctcatcccaaaatagggtcgaattattcagttaagactgtagagaagacatggaaagctctgcaggacttcaaagagggcaatgcatcttcaccttcccaaatactccagtgaagtgtgctggagcccctcagaagatcatgtacttatcagaagcctacttcaggaagacagggaagcgatccaaggccaatatcattttcaacacttctcttggagccattttcggggttaagaagtatggcagatgccctgcaggagatcatccagggagcggaacctcactgttaactacaagaaaaacctcattgaagtccgagccgataaacaagaggctgtatttgagaacctggacaaaccaggagagacccaagtgatttcatatgaaatgcttcatgttcacacctccaatgagcccaccagtatgtcctcaagaccagtcctgtggctgatgctgctggttgggtggatgtggataaagaaactctgcaacacaggaggtacccaaatgtgtttgggattggggactgcaccaaccttcctacgtcaaagaccgctgctgcagtagctgcccagtcaggaatacttgataggacaatttctgtaattatgaagaatcaaacaccaacaaagaagtatgatggctacacatcatgtccactggtgaccggctacaaccgtgtgattcttgctgagtttgactacaaagcagagccgctagaaaccttcccctttgatcaaagcaaagagcgcctttccatgtatctcatgaaagctgacctgatgcctttcctgtattggaatatgatgctaaggggttaactggggaggaccagcgtttcctgccgcaagttgtttcatctaggtatgagttaa

SEQ ID NO: 13448 - DNA, 2040 bp, Homo sapiens
ttttttttttttttcatttttgtcatttattaacctggaagcaaatatgacaaaacagtcatactagtaagtcatctgaattttttaaatctcttaataaaacaaccaaatcccacgcaaatcagtccacaagggaggcccccgcctccacagtgcagggtgactgagtgtacaactacgggccaacccccgcctctcaaccggaagggagggcactcaaaagaggaatttagagaaaaggcggagagggcggacctcgggaaagggtctgggcgggagccccacctgggctccccacccctcccgaaaccaggggaaaagcctgtggcgtgggcgctgctgtctcccattagcagttacagggccgaggcttcccgctgattggtggaaattccgatcttctgatccctgatttgcatagagactggggcctgcacccccgccccccaccagcagcaatcggccaacgccaacggtcgtgcgccaggagcgttctgggctcggcgccgcccagtcctcctggtcatctcggaagctgttttcttccagctgcttgggacagcttttgtgaatgcctcccttagggatgttcgaaagaggagtggcccgacactgctagaaactggtcctttccttcccacctgtggtaaggatagtttctgctacggcaagcactcaaactcaggctggtttgaagctaaaggattcagacgacttccaagtatcaagaatgaaagaaaaagaaacataataaggagcccaccaccaagacttgtagttatttcctcagaaagcccccatgccccatttgtgacaaaatccattcctgaagactgattctagaagaaaccaagtaagatctagaactttccccaccagcatcactttccaaaatgtaggcagaagtttaccaaatacaatttattcaggaaaaaaataaattttaagaacttatttttattttattttagaacttaaaaataaatttttaagaactaaaaaagtgaaagagcccagtggctgagcagaaaacagcttactacaaggagtaccagatcagggcagagacttcccagctgggtaaggcatgctttgagggaagactccaccagccctgccaggaaagggcagcaggcgcagtgcccctatggggcccacatggctggtaacagcagcaggacacctcttccaaagctgtccaccagccccactaggggctcctactcatggcaaaaaagactacatgagcccacaactgtcaactaacacagtgccacctcctcccaaagcaaacacatatacatacaatgttaagaacctattatcagaacagcagtgcagcagaccctggccttggtctctgaaagtcctgtgtcactggctgtaaggacgcttggccacaggttcctcctccttctcccgcttcagccattgctctaggagtcctgcagtgcctctcttggtggggagtggactcttctgcaggaactgactggaccactggggaacatctgactcttccttttgaggtgtttttgagtcttcctttttgggtgactttgtggccaaccactgcaacatcctctggctactgccacttgccctgagctcctttttgaccaccaagtcgacaggagccagacactcaggagtgttgtttcgcgagttgttcaccacagaagagactgcatggaaggtgatgttctctgttgggtggattaatttcagagcttcctgagttgagacttcaccaaagtcaagccatttagaaactgcctcctctccatctaatatggcaggccatcctgtggtggatgtcactcaagcctttgcaggaatccactgtgatgatggtataggaatacaggacatctccgtcctctgggggctcccagcagtcaaagatcccggccattgtcagcagcctccagttgtcccagactttctcccagttctcaggactatctgcagcaccaatgctacctgacttctctgtcttgatttgaggaaaatagatgaagtatggctgcctctggtttg

SEQ ID NO: 13449 - DNA, 1050 bp, Homo sapiens
gcagcttcagcgaggtgtccagcttcatgcctatcctgaaggctgtcctcatcatcgctcataagctgctggtctaaaccaggcagcctctcttgctaggaggccacttctgctgttacataactcctccctgcagaagaggggacttctgcaacagattctgtttcttttcccgactcttttccttgctgccaggtatgtgatgctgtaggcttggctccaaaccagctgagtgcctgctttttactcctttatgtctggccttctaggatctgtccaagacactctcaggcctggagccaggggcatagaatcagttcttcactctccctaatactacactctgtaaggacctggggcaggatatcttctcccccagggatcttctatttaagtggcttctgagagggtgaacaggattgttacttttaagcctacctctgctgtgacccatcatgtgggtcttttgtttctcccttctgtggtttatgagcctgcccttaccttttccctgcctctgacttggtatttccaggtccgtatttctctgtagcccagggtctggggtagagctgactgctgttcaccctttgaacaactcatggacgtgagggatgggtgctgagcagaaccaagagaggaaactttggcgctgttaaaatggaatttctcatctgccggcattattaagggtgggctaggttggatggaaggtgaaagggatgaactgccttttgctggaagctgtcttaggctgtgagacaggagcaggggaaccacagcctatggggaactgcccttgactccacctatgttggagccttagcccaaggccattccttctgtgatgataaagcccagttctggaattggagccatattaaggaatgattctcttccagcgctgctcctcaagggttgggggtccttctccctcgcagccaccacatgtctcagggctaccttctccgattggatttgcatttgtggcactgtctttgatgcagtgatgtacttaatggtgcaataaagctgcttcgatttggttaa

SEQ ID NO: 13450 - DNA, 399 bp, Homo sapiens
tgatgctgtttggccatggcacccggaagcgtgtccccctgggcaggctggagctgctggaggaagttttggccctggggctacgcaccgatgtggggatcactcaccagcactggcagcagtttgagccccagctgaccctgtgggatgtgtttggagcgaacaaggaggtgcaggagctgctggagcggggcctactgcagctggatcacaggggtcttcggtgttcctgggagggtctggctgtgctggactctctcttgctgaccctcctgcctcagctccaagaagcctggcagcagagaaccccctcccctgtgccaggaggatgacaaaaatgttcctgtgttccagggtaatgccaggtgggttttgagagctgggtcggtacttcagaca

SEQ ID NO: 13451 - DNA, 914 bp, Homo sapiens
tttttttgagccacccaagcaggaaggtcggagagcatctttattgtggggaggggcccggcccccaaagttctgacaccaaagacagacaccagacaggcagctgcagacagtgagttgtgtggatgaccacggcctgtgtggcggacaggggaccaggagccatcgcctcagactctgcccttctgtgcaagggctagtgccccgggctcaggcatgcaggaagcggttgaaggcgttgtaggctgactccaggtcgaacagcatctgacgcacctgtgagtcgtccagctcatctgacgccgacatgccgctcagggtctgcagccactggctgaccgtctggcggccctcaaagtcgggtgggaggtggctcatgcggtgcatggtctccatcagctctcgcaggtcgggctggatctcatccatggcgcggatctccaggcgcagcttgtccatgaccgtgatgaagagcgagaccacgtctgcgatgcagcggttgaggttgcccttgtcgtccttgatggtgatgggccggtcctccttgatccgctccatggccagcgggcagtccaggcggaacttgcggcagaattcgtcaatagagctgatttctgagccctggacctgcctgaaggcagctttgtattggaccaggagccgggagcaggctgcagtgtactcgctgggggagacacagtccttgatgtaggccttctccagggcttgcattgtcttcaccaccgcaaacagctctgccatgttgtcgtacttctccctctcccgggcgttcttgtacaacttcacttcctcatacagctccggcttgttcccaggggctcctatgcccggcgtggctgggatcccatgaaacatcctctaggctctggggggggcacagcactgagacctgg

SEQ ID NO: 13452 - DNA, 740 bp, Homo sapiens
tttttttttttttttttttgcacaataaatactcgccagtttcattattattaaagaatccatttgaatgtcagctcaacacagcctcctataccgaggcattgtgaaccgcatctccccagcttctccaggcttttccaagaatcagggacactgtagcctgttggtctcagtgtatgacagacacggaggaagcacatctttagctgatacttaaacagagaccctgagcgcacatacacccgcgcacacatgcatggagcttcaccttctctgtcattctgcagtgaccaggagagcaagagctcccacctcccttcaaaacactgtgcccatcccgggcactaaggcctctttaaagcacggcacctccacgagggagggccacagccacatacactccacctggcaggtggacagcgtgagcatgtggaccatagcagggacaaggtggccccggccaggccccaacgccctctgccgctgacagggacagaagccctctccagctgcgtgtgctgcagaggccatgcgtagcctccagctgcattctattccactccagtgcctgggccagttagcaccagtgtggaagacagctgagctggctccggacaacagggatggaggaaaggtcccacattcacattcctgatacgtggacaaggtgaggggccgcaatcgctctggcagcattttaaagatggggaagtagcagacacccacgcgtgaaggcaggc

SEQ ID NO: 13453 - DNA, 787 bp, Homo sapiens
ggtgctccgcagccgtctgtgccacccagagccggcgggccgctaggtccccggagaccctgctatggtgcgtgcgggcgccgtgggggctcatctccccgcgtccggcttggatatcttcggggacctgaagaagatgaacaagcgccagctctattaccaggttttaaacttcgccatgatcgtgtcttctgcactcatgatatggaaaggcttgatcgtgctcacaggcagtgagagccccatcgtggtggtgctgagtggcagtatggagccggcctttcacagaggagacctcctgttcctcacaaatttccgggaagacccaatcagagctggtgaaatagttgtttttaaagttgaaggacgagacattccaatagttcacagagtaatcaaagttcatgaaaaagataatggagacatcaaatttctgactaaaggagataataatgaagttgatgatagaggcttgtacaaagaaggccagaactggctggaaaagaaggacgtggtgggaagagcaagagggtttttaccatatgttggtatggtcaccataataatgaatgactatccaaaattcaagtatgctcttttggctgtaatgggtgcatatgtgttactaaaacgtgaatcctaaaatgagaagcagttcctgggaccagattgaaatgaattctgttgaaaaagagaaaaactaatatatttgagatgttccattttctgtataaaagggaacagtgtggagatgtttttgtcttgtccaaataaaagattcaccagt

SEQ ID NO: 13454 - DNA, 1332 bp, Homo sapiens
tttttttttcatttttgttttctttttttgattgaggtaaataaaaaagctttatccagcaacacggagataagagtctgtccaacccgacaagttccagaccccaccctgccctcacatcaggctcttccggtactgactgtgcggggtggtctgtctgaggtgggagtccggggtctgcaggtccatctgtctgtacaggtctctcagctccctgacctcctgcagcaccctctttgcctggctccaattcgatgatgcctctcccagcagccgttccgtctccagcagcagctgctctgactcagaatccggcggagaccgaggggggtccttggcctttcgcttcccatctcccagtccctgaacctctgccagaagctcctgagtctcctccagtttccttgctaccaggtcctggatccgggacagctgccccgggttggggagggcaggggttgggggttcctcagcccgcagctggagggtgcgggcagaggcagcatcccgctgagataggatctcctccagggagcgcagcgcctttctctgtgggcgtcaacttcttgggtgcctgggggtgtagtgcccctttgtctgttttttcccaaggtcgggagagactgcttgcccggtctgcggagggctggatgcggtctgagtccgctctccgccggctccctgcccagctgggcccacagacttgtccaggtcaacccgaaagctctcagcacaagaggttggttcctcaggggaagggtcttcctcttggatcaagtccaaggtcagcatcccatccgaggtagaggtggaagccacagccattaggtgtccccttgttggggggcggcgggagtgctggatttttgccctgtctcgagtgggatgggcaagatagctgtcctcctcaacggtgacctgaagagatgtactcatccaagatacggttcttggctcgggtgatggcagagttgagggcattgatccacgattccttctcttctggactcactgccaggaagatcaggttgggtgccgtgttaccgggctgtttggagtgggcaagagtaaacttgctatgatttttcttgctcctgctcttggacttccggagctcttcacacttctcatagtcactcaggtcaaatacctcttgaatatttttctcatcttttacctccttctcagagatgtagagctggtcccctttcagcaccacatagcggtttttccaaatctccctgaaaatccctttcccgcagaatttccggacccagccgaccttctcgggcggtgcaggctgctggtttccatcctgaggtcccctcgtgc

SEQ ID NO: 13455 - DNA, 1415 bp, Homo sapiens
ttaattaaatttaatcccagggaaattagatgtcgaatttgaacacctaactttccatgtactctctcatttttgtcggaagtgtttctatactctaatgcctttacaaatgtgatttttctcttagctcgtttgaagtatgagaattagagtttttggtctcgcattcacctgctacatctaggattgcccactgtcatgactcccaggaaaaggtcctatcttagcttcctcctccctactttcctctacatggtcagcactgtaatgtagctaagatatagtaaggcattgctccctccccctacacttcaaggagttcacagtctaatggggagttcaggaaggccagagtattaatatccccatctgtgtcttttgccttccatgaacctgggttttgagccctctcttgtaaaatggggcacagtaatattacctacctcagggagttgtgaggattaaacatgaagtgctaagcatagtgcctggtacaaagacagtactcaataagtgctacctaaaactagtattcatagcaatactgttaggataaagaattatcatatatgagatagttccaaatttttgtttttttaaaaaaaaaagagttttataagttcaagataatattttcttacttcaaagaaacaatctcacaacgagggaatggtaagaatcaggagagattactaacctggcagaggagctatcacaatcacaaaggtggtttttccagggcacggctcatccattacactccagatgtgctgacccctgccatttccccaaatgtgggaaacccaactgcacagtttgtagtagtgggtgactgtgttcatgcgctcccctgaaaacaacaacaacaacaaagaatcagaagagatactaggctgtctaattcctaaatccaaacctgatatttctaagtaagattataagaatttttattgcattttctgaatttgcttttgcataagttatgttatttttacagggtctatattactattatttcttagaataatactaattataaaacaaaattctgtatatcacatttaaatgtaatttaatagaattataatcacaagacaagaccaaactttgttgataatcctcagtaattgcgaaaggggtatatacatgtaggccagcatacatgcataaactacttcttattgctagtctaattgttccatatgtagcaaatacagcagttcagcaatatcttgtgcttacagggtcctaagcagaggtgatgagtcaagtgtaaatatatatatatatttttttatttttcatggcaattgtatattagtaacctggggagaaaaggtttattgacaaccactctgatccatctgctgctatttttactgctaatttggtgcacattaaaaagaatgatcatg

SEQ ID NO: 13456 - DNA, 942 bp, Homo sapiens
gcccgtccgactggaaagatctgcctcttctccaagaaactcaaccactagtgacaatgaccagcctcctgactactccttctccaagagaagaactgatgaccaccccaattttacagcccactgaggccctgtccccagaagatggagccagcacagcactcattgcagttgttatcaccgttgtcttcctcaccctgctctcggtcgtgatcttgatcttcttttacctgtacaagaacaaaggcagctacgtcacctatgaacctacagaaggtgagcccagtgccatcgtccagatggagagtgactttggccaagggcagcgagaaagaggaatatttcatctaatgactcccaggccccaaggagcttattcctggctccatcgctaacacgttgactgcttattatgggaaagttttctctgaagccagggagaagcattgattgatgtgggcaaatccaagctccagccaggtcgcagtcccaaatgccgacatcactgactccagggaccagggacatggagaaagctgtttatgatatctttaaccaggccctcttactagagctggtgtttgtgactggccaacaagatgtggctatgccaggggacatctgagtatgtgcccagtcatcttttttcacaggttgaagggagagaaaagattttgagttaaggtcattggctgctctactctgtcccctacctggtcacctagtgatagccccagtggagatactgtccatacaaggtcttcccagaggctggataccacagtaaaaggccaggccaggaggggtaggagactatggagatcttacctcctgataaatgtgctacaccccctaatctgagcccttcctttccgtgttccccaacaacctcatgcttacgtgatttttattcaaattaaaaattttcattgctacagaaat

SEQ ID NO: 13457 - DNA, 2166 bp, Homo sapiens
cccacgcgtccgcacggtggccgggtcgtatgcagtgactgcaacaccgaagtggactgttactccaggggacaagccttccacccccagcctgtgtccagagacagcgcacagccaagtgcgccaaatggcccggagccgggtgggagtgaccaagagcattctccacatcaccagtgcagcaggactgccgctgggtcctgccccgagtgccaagggtcgctctaccccagtaaccacgatagaatgctgacggctgtgaagaaaaagccaatggcatctctagatgggaaaggggattcttcctggactttagcaaggttgtatcacccggactccacagagctacagcctgcatcttcattaacttcaggcagtccagagcgcgcggaagcccagtacttgcttgtttccaatggccacctccccaaagcatgtgacgccagtcccgagtccacgccactgacaggacagctccccgggaaacagagggtgccactgctgttggcaccaaaaagctaggttttgtctacctcagttcttgtcataccaatctctacgggaaagagaggtaggagaggctgcgaggaagcttgggttcaagcgtcactcatctgtacatagttgtaactcccatgtggagtatcagtcgctcacaggacttggatctgaagcacagtaaacgcaagaggggatttgtgtacaaaaggcaaaaaaagtatttgatatcattgtacataagagttttcagagatttcatatatatcttttacagaggctattttaatctttagtgcatggttaacagaaaaaaattatacaattttgacaatattatttttcgtatcaggttgctgtttaattttggagggggtggggaaatagttctggtgccttaacgcatggctggaatttatagaggctacaaccacatttgttcacaggagtttttggtgcggggtgggaaggatggaaggccttggatttatattgcacttcatagacccctaggctgctgtgcggtgggactccacatgcgccggaaggagcttcaggtgagcactgctcatgtgtggatgcccctgcaacaggcttccctggtctgtagagccaggggtgcaagtgccatccacacttgcagtgaatggcttttccttttaggtttaagtcctgtctgtctgtaaggcgtagaatctgtccgtctgtaaggcgtagaatgagggttgttaatccatcacaagcaaaaggtcagaacagttaaacactgcctttcctcctcctcttattttatgataaaagcaaatgtggccttctcagtatcattcgattgctatttgagacttttaaattaaggtaaaggctgctggtgttggtaacctgtggatttttctatactgatgttttccgttttgcccaatataatgaggtattacattggccttgggggacagaaaggaggaagttcctgacgttttcagggctaccttatttctactaaggacccagaagcaggcctgtccatgccattccttccgcacagatgaaactgagctgggactggaaaggacagcccttgacctgggttctgggtataatttgcacttttgagactggtagctaaccatcttatgagtgccaatgtgtcatttagtaaaacttaaatagaaacaaggtccttcaaatgttcctttggccaaaagctgaagggagttactgagaaaatagttcacaattactgtcaggtgtcatcactgttcaaaaggtaagcacatttagaattttgttcttgacagttaactgactaatcttacttccacaaaatatgtgaatttgctgcttctgagaggcaatgtgaaagagggagtattacttttatgtacaaagttatttatttatagaaattttggtacagtgtacattgaaaaccatgtaaaatattgaagtgtctaacaaatggcattgaagtgtctttaataaaggttcatttataaatgtcagtatagttggtggtccttcttttacaaacgcagtcattctgcctttaattatcttcccccaaaaaagaaaaaaaaaataggcgaatcaaaatcacatactgtttgtttgctccagggcagacaacactgctagattcctgacattttgttttggaattttttctacacc

SEQ ID NO: 13458 - DNA, 888 bp, Homo sapiens
  misc_feature (1)...(888): n = a,t,c or g
gctttttttttctccagtgagggttctgccactgtctcaatcccttggttcctgcaaaaaacagctaaatgtgctctcagggccagtgggatgttctgtgttgcagccccagctcttgaaagtgacctggcccagatgagctctgcctgcttgtcatctttaggtcctgctgcccctgctgcctcagccctcaggctcctaactgctcaagccagaaggagctacaaagccaaatcatttgtcatttttctctggcagattgttttaaaatctccctcccctcttttattttaattatgccacctgtgttaatcctatagcctgcttctttgctttgtgggattactgatttcaagttctataacttggggaaagttaggttgagtgaatggggaggacagacactgaatgtgtgttttgggaaaaatgggactctctatctttcaggattattatagcttctccacctatcacctctacaacttggggccttccattgggagaagttttagttggcttattcctgggaacaagaccacctagaggcttttagccttgtcagcctgccctcttctgagggttggaccttgttttaaattgtgtgcatggtgggcttgagactctcttgtaatggaggtaatgggactatcactgaggggttcagcctatccaggtaggctaccgttctagtcatacccatcacttaaattctgccacagtctgcacagacggttggtcctccaggcatattgtcctattaagccaaataggtggacatcatgggatngatgagggtcatcatggaanaacagatttacttggatttatgggacctagtnattatacttatgttancagatgggaaaactgaattttacaatcttatta

SEQ ID NO: 13459 - DNA, 395 bp, Homo sapiens
ggctttttctccctacccagtgtctccaatgagctgactttcttttctggattactcttttatgtaataaaaagtagacatgagggtcaaacagaaagggaaaaaggggaatttgtttaatttctaccaagtgccaggcatagtacaaagaacatttagataaggcagaaggcattaattatttttatctacccagaaccccctgccccacctaagcaccccagcccctgaccctggccacgtgggtggctatgtgacccgagctgaaccaatcagagtccttccctgggatctttttcacatcataaccacatgagaaggtctcccattatgaaacagagaagcttgttggcagccatggttctagccaaggatggaaaaaacaaccaaaaaaa

SEQ ID NO: 13460 - DNA, 1294 bp, Homo sapiens
  misc_feature (1)...(1294): n = a,t,c or g
ccgacccagtgagaaaggagagaaggaagagaaaagcaaagcaaaggaagagagcatatgaaagtaaggaaggaaagatatgaaaataatgataaatacagagatagagaaaaacgagaggtaggtgttcagtcttcagaaagaaatcaagacagaaaggaaagcagcccaaattctagggcaaaggataaatttcttgaccaagaaagatccaacaaaatgagaaacatggcaaaggacaaagaaagaaaccaagagaaaccctctaattctgaatcatcactgggagcaaaacacagactcacagaggaagggcaagagaagggtaaagaacaagagagaccacctgaggcagtgagcaagtttgcaaagcggaacaatgaagaaactgtaatgtcagctagagacaggtacttggccaggcagatggcgcgggttaatgcaaagacctatattgagaaagaagatgattgatggctaccccaagagaaagatttaaggaagcacagaaaactgtaattcctggaacctgctgcgtaaaaccataaaggagtgtgttaccagtagtttggagggcatttttaaatttattttcaaaattttaagttaaaagtcagtcttacagcttggatgtttggatgtggatgtttggctgaatttatatatagtgtgtactcatcaataccacattctttgttgtattcaagaaccgttaagagtgtgctaattccctgtaggtacataatgaggaaaatttgctccactacaaccattaaaaaataattttgggccaggatacggtagctcgtgcctgttaatacccaacattttggggaggccaaggcaggaagggtatttgagggctaggcattcaagaccagcctaggcaggataataagaccttgtctctatttaaaaaacaaaaagccctagcatgggaagccccatgccctgtagtcccccagctgttccgagagggctgaggcaagaagatcaccttgagccctnnnnnnnnnnnnnnnnnnnnnnnnnnnnnnnnnnnnnnnnnnnnnnnnnnnnnnnnnnnnnnnnnnnnnnnnnnnnnnaaaaattttttttaaataaataatttaactcttctaataatgttttgttgcaggaaatgtatttcagataaaatatggatttgaaaaacagaaaatatactttatgttctgaaatttgtatttaagtataaaatgtgaatcatcttgtctaaatagcttacagcatagttggcttaaatgaaaataaaatgatatgcttataaaaaaaa

SEQ ID NO: 13461 - DNA, 6513 bp, Homo sapiens
cgcacaaggtggcagcccctgatgtcgtcgtgccaacgctggacacagtccgccacgaagccctcttgtacacttggctggccgaacacaagcccctggtcttgtgtggccctcctgggtctggcaagaccatgacactcttcagcgccctccgggccttgcctgacatggaggtggtgggtctcaacttctccagtgctactactccagagctgcttctgaagacttttgatcactactgcgagtacaggcgcacacctaatggggtggttttggctcctgttcaacttggaaagtggctggtgttgttctgtgatgaaatcaacttgccagatatggataaatatgggacccagagggtcatatccttcatcagacagatggtggagcacggaggcttttaccgtacctcagatcaaacatgggtgaagctggagagaatccagtttgttggggcttgtaatccccccacagaccctggaagaaagcccctctcacacaggttcctgcgccacgtgcctgtcgtgtatgtggattacccgggccccgcctccctcacacagatctacggcaccttcaaccgcgccatgctgaggctcattccatccctgcggacgtatgcagagccgctcactgctgccatggtggagttctacaccatgtctcaggagagattcacccaggatacacaacctcactatatctattcaccccgtgaaatgactaggtgggtgagaggcatctttgaagcgctgagacctctggagaccctgcctgttgaaggcctcattcggatttgggcacatgaagctctgcgtctcttccaagatagactcgtagaggatgaggagaggcgttggactgatgagaacatcgacacggttgctctgaagcacttccctaacatcgacagagagaaggcaatgagccgacccatcttgtacagcaactggctgtcaaaggattacatcccagtagaccaagaagagttaagagattatgtcaaagctaggctgaaggtcttttatgaagaagaacttgatgttccgctggtgctgtttaatgaagtcctagaccacgtgctgaggattgacagaatattccgtcaacctcaaggccacttgcttctgattggtgttagtggagcaggaaaaactaccctgtctcgtttcgtcgcctggatgaacggtttgagtgtgtaccagattaaggtccataggaagtacacaggggaagactttgatgaagatctacggacagtgttgagacgttctggctgtaaaaatgaaaagatagcatttataatggatgaatctaatgtgttagattctggattcctggagcgaatgaatacccttctggccaatggagaggtgcctggtctctttgaaggagacgagtatgccaccttgatgacgcagtgcaaagagggggcacagaaggaaggcctgatgctggactcgcacgaggagctctacaagtggttcactagccaggttatccgcaacctccacgtcgtgttcaccatgaacccgtcctcggagggactcaaggaccgggcagctacatcaccagcacttttcaacaggtgtgtgttgaattggtttggagactggtccaccgaagcactgtatcaggttggcaaagaattcacaagtaagatggatctggagaagccaaattacatcgtgcctgattacatgccagttgtgtatgataagctgccgcagccaccatcccatcgggaagccattgtgaacagctgtgtgtttgttcatcagactcttcaccaggcgaatgctcggctagcaaagcgaggcggcagaacgatggccatcacccctcgccactacctggacttcatcaatcactatgccaacctgttccacgagaagcggagcgagctggaggagcagcagatgcacttgaacgtggggctcaggaagatcaaagagacagtcgaccaggtagaagaactgcgtcgtgacttgaggataaagagccaagagctggaggtgaagaatgcagcagccaatgacaagctgaaaaagatggtgaaagaccagcaggaggctgaaaagaagaaggttatgagccaagaaatccaggaacagctgcataagcagcaggaggtaattgcagacaaacagatgagtgtcaaagaagatcttgataaggtggaacctgccgtcattgaggcccagaatgctgtgaagtcgatcaagaagcagcacctggtggaggtgaggtccatggccaaccctcctgctgctgtgaagctggcgctggagtccatctgcctgctgctgggggaaagcaccacagactggaagcagatccgctccatcatcatgcgggagaacttcatccccaccatcgtcaacttctctgcagaggagatcagtgacgccataagggagaagatgaagaaaaattacatgtccaatccaagttacaattatgaaattgtgaatcgggcttccctggcttgcggccctatggtgaaatgggcaattgcacagcttaactatgcagacatgttaaagagagtggagcccctacgcaatgagctgcagaagctggaagatgacgccaaggacaaccagcagaaggccaacgaggtggagcagatgatccgagacctggaagccagcatcgcccgctacaaggaggaatacgccgtcctgatctcagaggcccaggccatcaaggcagacctggcagctgtcgaggcaaaagtaaaccggagcactgctcttctgaagagcttgtctgctgaacgtgaacgatgggaaaaaacaagtgaaactttcaaaaaccagatgtccaccattgctggggactgtctcttgtcagctgcgttcattgcctacgcgggttactttgaccagcagatgcgtcagaacttgttcactacctggtcccatcacctacagcaagccaacatccagttccgtacagatattgccaggacggaatacctttccaatgctgatgagcgtcttcgctggcaggccagctccttgcctgctgatgacctttgcacagaaaatgccatcatgctgaaacgattcaataggtatccgctgatcattgacccctctggacaggccacagaattcattatgaatgaatataaggatcgtaagatcacacggaccagcttcctggatgacgccttcagaaagaacttagagagtgcactgagattcggtaacccccttctggtccaggatgtggaaagctacgatccagttttgaacccggtgctgaaccgtgaagtgcggcgaacaggggggagagtgctgatcactctcggggaccaggacatagacctgtcgccatccgtttgtcatcttcctgtccaccccgggatccaactgtcgagttcccaccagatctctgttcccgggttacttttgtaaacttcacagttacccgtagcagtttacaaagccagtgtctaaatgaagtacttaaagcagaaagacctgatgtggacgagaaacgatctgatcttcttaacttcaaggggaatttcagctccgtttgcgtcagctggaaaaatctctactacaagctctgaacgaggtgaaagggcgcattttggatgacgacacgatcataaccactctggagaacctgaagagagaggctgcagaggtcaccaggaaagttgaggagacggacattgtcatgcaggaggtggagaccgtgtcccagcagtacctcccgctctccaccgcctgcagcagcatctacttcaccatggagtccctcaagcagatacacttcttgtaccagtactccctccagtttttcctggacatttatcacaacgtcctatacgagaacccgaacctgaagggtgtcaccgaccacacacagcgcctgtccattataacaaaggacctcttccaggtggcgtttaaccgagtggctcgaggcatgctgcatcaggaccacattacctttgccatgctgctggcaagaatcaaactgaagggcaccgtgggggagcccacctacgatgcagaattccagcacttcttgagaggaaatgagattgtcctgagtgctggctccacccccaggatccagggcctgactgtggagcaggcgggaggcgggtggtgaggcttgagctgccttcccgcgtttaaggacttgattgcaaaggttcaggcagacgagcaatttggcatctggctggacagcagctccccggagcagactgtgccctacctctggagtgaagaaacaccctgcaacacccattggccaggccatccaccgcctgctcctgatccaggctttccggcccgatcgcctgttggccatggcccacatgtttgtttcaacaaaccttggggagtctttcatgtccatcatggagcagccgctcgacctgacccaaattgtgggcacagaggtgaagcccaacactcctgtcttaatgtgctctgtgcctggttatgatgccagtggacatgtcgaggaccttgcagccgagcagaacacgcagatcacttcaattgcaatcggctctgcagaaggctttaaccaagcagataaggcaataaacaccgctgtaaagtcgggcaggtgggtgatgctgaagaatgtgcatctggccccagggtggctgatgcagctggagaagaagttgcattccctgcagccgcatgcctgcttccgactcttcctcaccatggagatcaaccccaaggtgcctgtgaatctgctccgtgcgggccgcatctttgtgttcgagccaccgccaggggtgaaggccaacatgctgaggacgttcagcagcattcccgtctcacggatatgcaagtctcccaacgagcgtgcccgcttgtacttcctgctgggcctggtttcatgcgatcatccaagaacgcttacgatacgcaccactggggtggtcaaagaagtatgaatttggagagtctgacctgcggtcagcttgcgatacggtggacacgtggctggatgacacggccaagggcagggcagaacatctcaccggataagatcccgtggtctgcactaaagaccttaatggcccagtccatttatggcgggcgcgtggacaacgagtttgaccagcgtctgctcaacaccttcctggagcgcctgttcacaaccaggagtttcgacagtgagtttaagctggcatgcaaggtcgacggacataaagacattcaaatgccagatggcatcaggcgagaggagtttgtgcagtgggtggagttgctccccgacacccagacgccctcctggctgggcctgcccaacaacgccgagagagtcctccttaccacacagggtgtggacatgatcagtaaaatgctgaagatgcagatgttggaggatgaggacgacctggcctacgcagagactgagaagaagacgaggacagactccacgtccgacgggcgccctgcctggatgcggacactgcacaccaccgcgtccaactggctgcacctcatcccccagacgctgagccacctcaagcgcaccgttgagaatatcaaggatcctttgttcaggttctttgagagagaagtgaagatgggcgcaaagctgcttcaggacgttcgccaggaccttgcagatgttcgtccaggtgtgcgaaggaaagaagaagcagaccaactacttgcgcacgttgattcaacgagctagtgaaagggatcttgcctcggagctggtcccactacacggtgcctgccggcatgaccgtcatccagtgggtgtccgacttcagcgagaggatcaaacagctgcagaacatctcactggcagctgcatctggtggcgccaaggagctaaagaacatccacgtgtgcctgggtggcctgttcgtgcctgaggcgtacatcactgccaccaggcagtatgtggcccaggccaacagctggtccctggaggagctctgcctggaagtcaacgtcaccacctcacagggcgccacccttgacgcttgcagcttcggagtcacgggtttgaaacttcaaggggccacgtgcaacaacaacaagctgtcactgtccaatgccatctcaaccgcccttcccctgacgccagctgcgctggggtcaagcagacaaacaccgagaagaaggccagtgtggtaaccttacctgtctacctgaacttcacccgtgcagacctcatcttcaccgtggacttcgaaattgctacaaaggaggatcctcgcagcttctacgagcggggtgtcgcagtcttgtgcacagagtaaacttttctagctgcccctttctgtaatagtgaaagttggtatttaacatttattcatttttaaaatatttggaaggtctgagcttgtgaaaagaaagtggttggtctgaggttggaggaagctgaatggaatctgacggttgggagtggtggaaattggaaggataccaggaggtatttgggaaggccaatggcgtggctcctttgaggaaataaaacactaagcatgagccggaa

SEQ ID NO: 13462 - DNA, 452 bp, Homo sapiens
gagcgccacaaatcacaattattttaatccccttgaagggaaagtaactcgaagctggttctgtggggatttgggtctttggagaagggagagacttctgcattggcctgagccagccaggcgcctacaatgctccgcagttcacagccagctgagaaccctcagccgagcacagggctgcttctgcaggcaaaacaaagcttctcccttcgttcctcggaagcttccttcccgggaaggaaggacaagccaaggaacagagcttctcttagggaaatggtttcctcggctctacacagaatcccagtacttcctgaattgcacttttaacttttatgctgagcagcacctggggacaaagaggcaaaatttagtgactcagcagaaacagaaagcaaaacaacccccaaagtcattaaccgttgcgtaagaagggaaggttaatggaaaag

SEQ ID NO: 13463 - DNA, 835 bp, Homo sapiens
ttttttttttttccagtcatctctatggtttattgtcactgaaataagaacactgattggggggagtggtgggtgttgcaaattgcaaacctcaggtaacctgacctccaactttagagcccagagtacagagaggtgggccttgaagccaataaatacaaagcttcctctgccttgtaacaaaggcaggttggcatagggccctggagcctgactgcccaggcccactttgggatggggagcagctatcactcctctgctggcttcacttgcgtggcggcctctagctggcaaagtagctcatcccactgcacgaattgcttggagagaagcattgtagtcttgttgtattcctccaggagagccttggactcctcagtgatttcccacacactggtcctgctgctgaatgtggatctgggccaagcgctgcaggcgggcagcatgctcaggaacggctttgatgtgagcactgtccagcatgggcaccaaggcattcacctgctccaggagtgcaaacctgggaaaggataaactgctcctctgctaggatgaattgcagcttagaggcatcaggtatggcaatgcggtcgatgtactcaggatccaggtacttgatcagatcttcaatctttttgtagagaatcttcaccctctccctcttgctggaaatgttccccaaagccacctgcaccttgaccaggccgtcagccaccttccgtgagccgcgcgccccgcccggcccgtacacccagcgctccagctcttccactcgggcctgtagccgctgcaagtcagtcagacccgccatcgctactaccgacccacctcggcc

SEQ ID NO: 13464 - DNA, 7153 bp, Homo sapiens
ccagcatgtatcagccgaggtggagctgcggggccctggcatgaaagggtcctcactgagcagcgagtcgtcccccgtgtcctctccggccaccaaccacagctcccccgccagcacacccaagcgcgtgcccatgggccctatcatcgtcccccctgggggccacagcgtgcccagcaccccccccgtggtgaccatcgctccaaccaaaaccgtgaatggtgtctggaggagtgagagccggcaggatgccggtcccaggagcagcagtggaggtcgggaacgcctcattgtggagcccccgctccctcaggagaaggcagggggaccagccatcccctcgcacctgctcagcaccccctaccccttcggcctctcccccagctcagttgtgcaggattcccgcttcccgccactcaacctccagcggcccgtgcaccacgtggtgccccccagtaccgtgaccgaggactacctgagaagcttccggccctaccacaccaccgacgacctccgcatgtcctcactgcctcccctcggcctggacccggccactgctgcagcctactaccaccccagctacctggccccacaccccttcccccacccggccttcaggatggacgactcctactgcctgtctgccctgaggtccccgttctaccccatccccacccccggctccctgcccccactgcacccatcagcgatgcacctgcacctctctggggtccgctaccctcccgagctctcccactcatccctggcagcgctgcactcggagcgcatgtctggcctcagcgcggagaggctgcagatggacgaggagctaaggcgggagagggagcgcgagcgcgagcgcgagcgtgagcgtgaggctgaccgcgagcgggagaaggaacgtgagcgcgaacgcgagaaggagcgcgagcaagagaaggagcgtgagcgtgagaaggagcgcgagcgcgagctggagcgccagcgggagcagcgggcccgggagaaggagctgctggccgccaaggccctggagcccagcttcctgcccgtggccgagctgcatgggctgcgtggccatgccactgaggagcggggcaagccctcggagcagctgaccccaacccgagcagagaagctgaaggatgccagcctgcaggcgcccaagcccgtccaacaccccttgcatccggtgcccaccccacaccacacggtgcccagcctcatctccaaccatggcatcttctctctgcctagcagcagtgctgccacagccctgctgatccagcgcaccaatgaggaggagaagtggctggcgcggcagcggcggctgcggcaggagaaggaggaccggcagtctcaggtgtccgagttccggcagcaggtgctggagcagcacctggatatgggccggcccccggtgccggcggaggcagagcacaggccggagagcaccaccaggccaggaccaaaccgtcacgagccaggtggccgtgaccctccgcagcactttggggggccaccacctctgatttcgcccaagccccagctccatgctgcacccacggccctctggaaccccgtgtccctgatggacaacaccttggagacgcggcgggccgaaagccactctctgcacagccacccggctgcatttgagcccagccgccaggcagccgtgccgctggtgaaggtggagcgggtcttctgcccggagaaagcagaggaggggccacggaagcgtgagcctgcccctctggacaagtaccagccacctccgccgccaccacgagagggagggagcctggagcaccagcccttcctgcccgggcccgggcccttcctggctgagctcgagaagtccacccagaccatcctgggccagcagcgggcctccctcccacaggcggccaccttcggggagctcagcggacccctgaagcctggctcgccctaccggcccccagtgccacgggcccccgaccctgcctacatctatgatgagtttctgcagcagcgccggaggctggtcagcaagctggacctggaggagcgcaggcggcgggaggcccaggagaaagggtactactacgacctcgatgactcttacgacgagagcgatgaggaggaggtcagggcccacctccgttgcgtggccgagcagccgcccctcaaactggacacgtcctctgagaagctagagtttttgcaactttttggcttgaccacccaacagcagaaggaggaattggtggcccagaagcggaggaagcggcggaggatgctgcgagagagaagcccgtcgcccccaacaattcagagcaagcggcagacgccttcaccgagactggcgctgtctacccgctacagccctgatgagatgaacaacagtcccaacttcgaagaaaagaagaagttcctgaccatcttcaacctgacccacatcagcgctgagaagaggaaagacaaagagagacttgttgaaatgctccgtgccatgaagcagaaggcactgtcagcagcagtggccgactccttgacaaactctccgagggacagtcctgccgtctccctgagtgaaccagccacgcagcaagcctctctggatgtggagaagccggttggtgttgctgcttccttgtctgacatcccaaaggccgcggagcctgggaagctggaacaggtccggccccagggagctgtcgagagtccagggagctagctcctgccagcggggagaaggccagggttgagcgaggcccctggaggcaaaaagagtctgagcatgcttcactatatccggggcgctgcacccaaggacattcctgtgccgctgtcccacagcaccaatgggaagagcaagccgtgggagccctttgtggcagaagagtttgcacatcagttccacgagtcagtgctgcagtccacccagaaggccctgcagaagcataaagggagcgtggctgtgctgtctgcagagcagaaccacaaggttgacacgtccgtccactacaacattcctgagctgcagtcctccagccgcgcccctccaccccagcacaatgggcagcaggagccccccactgcaaggaagggccccccaacccaggagttggaccgggactcggaggaggaggaagaggaggatgatgaagatggagaagatgaggaggaagtccccaagcgcaagtggcaagggatcgaggccgtttttgaagcttaccaggaacacatagaagagcaaaatctggagcggcaggtgttacagacacaatgtagacgactggaggcccggcactacagcctcagcctgacggcagagcagctctcccacagcgtggcggagttgaggagccagaaacagaagatggtctcagaacgggagcggctccaggcagaactggaccacttacgaaagtgccttgccttgcctgcaatgcactggcctaggggctacctgaagggatatcccaggtgacggtttcccttgcactaggccgaacctatagtatagaaatattatctattttattaccttgaatatttaatatttttcactgggaggtttgaagcttacaaaatgagaatgtgccatgcatgaagcaaaggattccaggctccagaaaaaatgaatgaactcaccttgacgtcaatgcaattgaatcaccgttgtcattcagcgaggcaaccaatgtaggattgcccacagtttttctttttaaaggtggttttcgcccttcctctcccacattatttcttaatctgaacatgaaggctccattagcaacactaaaacttgatcattaacagccccctgtgcatatgagtggatcaaaccggttctgttctttcttgtgttgccatgttactatgcctcaagcccagtttgcttttgccgcagcaatggggccagtctcattcctccccaggagtgaaacttgcttcagctgaaaaggttgggtgcattgtcagtaaaaagggcttatttgtttcattttactttcctgcaaaattttcttcaaagcaacaagtcctaggagcacacaaagcaacccaaaggcttttccctggaaaagctctttcttacctaaagataaaaccaattcacaaactgaaggtagctttttattactccgtggggagcatgtacagagctctgtgtatacacagcttcacacccaccagattgttactacagtgggttgggttttcatacagacgtaaattttgagagaaaagtcaaaggtgcttcagccttgtactgtgtatatatattaaaaaaaaaacaaagttttgtatgtttttattactttaactattgttataaaaagcctgccatttttaatatgtggtttgggggatttttgtttgtttttcctgtttgggggttttgtttgttgttttggttttttttgggcaaaaaaaaaaaaaaaccttgcttttagtgtttgtactgctgctggtcaggacattaaaatattgaagtgtttttaaaaattaaagaagaagaaaagtaaaagagcttaccactggcgcctatgcgatcacttcatttttagtttgagttgcaccagaagctgccgtagaaagccatgcgctactgcttacctcctccactccccctgcctgcccccagcatctggacaagctaatagcaaatattacccattgctatcaagggaggagggggtagtctgtacaacccatgtgtgacagtcatgtgcacacatgggcgggggcttttaaaaacctttcaggaagtcaatgatttctgtgaatgatataattcttaaggtgtctgagagcaggtacagaataggaacttcagaggctttgtttaaaacgcaaagctttgtaaaagccacaaggtctgagctgaacccctcctttttgaacttactgtgacaagcacaggaacggtcagaaactgggctcatcacaccaaggcaaagcaacgggcgagtcttcctccttgtccgtagttactgcctatggaggcagtgtttagatcaagaaggcctctcttgctcccaagggccctcaccagaggccagggctgccagtcactggtctggggggtggaggcctgagctgagggcagggtgcctgacctgtgtgccggctgctcactgctgtgaccagcagccgagcccttggccctagcccttgctgcgcagaacagcttgctggcagctggcatcgtgtcgctttatctgcccccgcacagtttgctttgtacgtctgccaagaatcttccagttattagcaaactcagacgaatgtaccgccagtattatcagcagtcaacaagcaccttcctctccacagaagcagctggaagagaactcgaggggctgtgctgcaggcctcccctcgaaagacactgggaggtcagcatgttccacaggtgttcagagggagtctgctacaaactatcagggcaaaatctcactggatttctccactgaaaacctacttgaggtttctggtctgaaggcttaagagtcacatcttagcacttccgctctcaggcctcctcctccatcacagatgtctggatgcttttggaaatggccttggctaaagtaaaagggaaaagtagatccgataacttaaaaacgtagctcatcccttaccatccaaggggcactcccttggttggattttctatgacagcacaggggacaggtggcacaccatgagaggtctgcccagggtgggagcagtgtcactgtgctagcaatagttggcttctcccctgtcagtggaaaccccacttctgcccggcccttgagcttcttgcccactgtctccccatccttccacctacttgtggcgatctgagtactctactcttgctcaagaagtaatacgacaatcagaatacaaaccagtaaggcaacacgaataaactaagaaaaaggtaagaactgtctcaaaaacgaaagcacaccacccaagacacagtacccagtcatggtttccccatccaactattagtttcatactttgaaaacttactttcagattattctcaaagaacacagtagcacctaaatctgttttcaattgggcttaaaaattgacatgcaatctcttaagttttttgttcagctacttcacactgagtacctcaaatctgctctggagtcgattatgccacctgtgtgtcaggatgcacctgaaagccctcggctcggtccttagaccatcttcctacattacctggaagggagctgccatctgtccctctgcagagggataccttccaatagtaaattatctggttcctcactgaaacaagttatttttgcttcatatagtcagagtcagactgacatgataaaatatcatgttcctaatctgttgtctcagataagtgaccaagacgggactttccacattttagtctacattctaatcttaaaggaataaagcactgaattgggactaacattctgatagggttgcacccttaagagtattcagagagcatcaaaaggagcccacaccttcagcagtgaaggattctaacacagggaatctgcagtttgtagcagaatgggtattttcctcaagtagctcataatacttgcccaaatcttcaaaagttaagctgaatttcacaccagatcctacccctttccctgagccacatgttttcacacaagtgtagaaaatgccagggatccaccacaagatggagatggtcagcacaaaccgattctgttcctctttaaagtgtatattagccacttaggcaatctctatattctttcaagtaaccaagctgttgactttcttactacttgcagtagcctgtccccaacttttccatccagtgcttaacctaaaaaactccttaactctgccttgacctgaggaagaccatgctaactggtgttattttgtatgtaccctgtgcttaattctataacagtaaaccccatacacaggtgggagggaggaacaccggtgcctcggtcactctgggggcagtttagatgctgtgaaattaaacctgttctaagtgtacttgtttgaattaattgtattgtaatattatttgttgaatgtagtaattaggtatttatgaatatattgctgtaatttctgacaacatccaaaaaataaaatcttcctaaattatgtt

SEQ ID NO: 13465 - DNA, 846 bp, Homo sapiens
tgcagcgccgcgactcgtgcgggtaggcgtctgcgctcggtttgagggctcggcgcggggtttcctgttcctccttctgcgcggctgcagctcgggacttcggcctgacccagcccccatggcttcagaagagctacagaaagatctagaagaggtaaaggtgttgctggaaaaggctactaggaaaagagtacgtgatgcccttacagctgaaaaatccaagattgagacagaaatcaagaacaagatgcaacagaaatcacagaagaaagcagaacttctttgataatgaaaaaccagctgctgtggttgctcccattacaacgggctatacggtgaaaatcagtaattatggatggggatcagtcagataagtttgtgaaaatctacattaccttaactggagttcatcaagttcccactgagaatgtgcaggtgcatttcacagagaggtcatttgatcttttggtaaagaatctaaatgggaagagttactccatgattgtgaacaatctcttgaaacccatctctgtggaaggcagttcaaaaaaagtcaagactgatacagttcttatattgtgtagaaagaaagtggaaaacacaaggtgggattacctgacccaggttgaaaaggagtgcaaagaaaaagagaagccctcctatgacactgaaacagatcctagtgagggattgatgaatgttctaaagaaaatttatgaagatggagacgatgatatgaagcgaaccattaataaagcctgggtggaatcaagagagaagcaagccaaaggagacacggaattttgagactttaaagtcgttttaggaactgtgatgtgatgtgga

SEQ ID NO: 13466 - DNA, 2477 bp, Homo sapiens
ggtcttagttttgaggagctctatagaaatgcatatacaatggttttgcataaacatggagaaaagctctacactggactaagagaagttgttaccgaacatctcataaataaggtgcgagaagatgtactaaattcattgaataacaactttcttcaaacgctaaatcaagcttggaatgatcatcaaacagctatggtgatgattagagacatactaatgtacatggaccgtgtgtatgtacaacaaaataatgtggagaacgtctacaatttgggattaattatttttcgagatcaagttgtacgttatgggtgtattagggatcatctacggcaaactctattggatatgattgcaagagagcggaaaggagaagtcgtagcagaggcgcaataagaaatgcttgccagatgttaatgattttaggtctcgaaggaagatcagtctatgaagaagattttgaggctccttttttggaaatgtctgcagaattttttcagatggaaagccagaaatttttagcagaaaatagtgcttcagtatatataaagaaagtagaagctagaattaatgaagaaatagaacgagtgatgcactgccttgacaaatcaacggaagaaccaattgtaaaggtggttgaaagggaactcatttccaagcacatgaagactatagtagaaatggagaattctgggctagtacatatgttgaaaaatggaaagacagaagaccttggttgcatgtacaagttatttagtcgtgtgccaaatggtttgaaaacaatgtgtgagtgtatgagttcctatttgagggagcaaggtaaagctcttgtttctgaagaaggagaaggaaagaatcctgttgactatatccagggcttattggatctgaagagtaggttcgatcgcttcctcctggaatcattcaacaatgaccgtctctttaaacaaactattgcgggtgactttgagtattttctcaacctcaactccagggtctcctggaatacctctcattatttattgatgataagctgaaaaagggagtcaaagggctaacagaacaagaagtagaaacaatattggataaagcaatggtcctttttaggtttatgcaagaaaaagatgtatttgaacgttattataaacaacacttggcaaggagacttctcacaaataaaagtgtttctgatgactctgaaaaaaacatgatatctaagttaaagactgaatgtggatgtcagttcacgtcaaaactggaaggaatgtttagggatatgagcatctcaaacacaacgatggatgaattcaggcaacatctacaggcaactgggtgtatctttagggtgggtgttgatcttacagtccgggtgctcacggacagggatattggcccactcagtcagccacaccaaagtgcaacatcccaccagcaccaagacatgcttttgagatattcagaaggttctactttaggcccaaacacagtgggtcgacagcttcacactccagcatcatatgggttctgcagatctcaatgccacattttatggaccagttaaaaaggaagatggatctgaagttggtgttggaggtgcacaagtaactggctctaatacacggaagcacatattgcaagtttccactttccagatgaccatattaatgctctttaataatagagaaaaatacacatttgaggaaattcagcaagagacagatatccctgaaagagagcttgttagagccctacagtccctcgcctgtggtaaaccaacacagcgggttcttacaaaagaacccaaatcaaaggaaatagaaaatggtcatatatttacagttaatgatcaattcacatccaaactacacagagtcaagattcaaacagttgctgccaaacaaggtgaatccgacccagagaggaaagaaacaaggcagaaagtagacgacgacagaaaacatgagatagaagctgctatagtgcggataatgaaatctagaaagaagatgcagcacaatgttctagtagcggaggtaactcagcagttgaaggcgcgattcttaccaagtccagttgttattaagaaacgtattgaaggacttattgagagagaatatttggcacgaacacctgaggatcgcaaagtatacacatatgtagcataaaatgcgttcagaaatttgatttattcttggactgtactcttcgcatggactgggaagttcttttaaatcattaaatattaagacgaccatctcttctattaaattacagtacatgttctagaccattgagatcaagcctttactccctttgagagtttccaacatcagttgattgagcttcaggctttacaacgtttatccctgtagagatcatctttacagttcctcgggaaaatgtgaatgtgctgcgttttgttttctttactgtatgaaaacaggaaaataaaagagaaatttagaaaatacaaa

SEQ ID NO: 13467 - DNA, 1257 bp, Homo sapiens
agaaacttcgtgaatactttcattcaatttaagaagcccattattgtagcagtcaatggcccagccattggtctaggagcatctatattgcctctttgcgatgtggtttgggctaatgaaaaggcttggtttcaaacaccctataccaccttcggacagagtccagatggctgttctaccgttatgtttcccaagataatgggaggagcatctgcaaacgagatgctgctcagtggacggaagctgacagcgcaggaggcgtgtggcaagggcctggtctcccaggtgttttggcccgggacgttcactcaggaagtgatggttcgcattaaggagcttgcctcgtgcaatccagttgtgcttgaggaatccaaagccctcgtgcgctgcaacatgaagatggagctggagcaggccaacgagagggagtgtgaggtgctgaagaaaatctggggttctgcccaaggggatgggactccatgttaaagtacttgcagaggaagatcgatgagttctgagtgtcgggctgcccactggtgacaccgggatcgggctgagcaggagaacatcaccggctccagttcccctgatccattctcacagcctgaaacaagctcacccgtagcttacgcttggaagcaggactgggaacatccacgctatttattatcgaggagttttaaagtactgtaactttaaaataaataactacaaagcttctttgtccaaacgtcattattttatacttatatacacgcaggtgtaaaagtataaaggtgagcactagactgctcttagaagctctaatttttgttttctttggctagtactgtataaaaaacagaattgtgttttattggttttggatgacagaaaagtctggaataatgtttgttttcctcatttcttccttctagaacacagaatctaaaggggtattagccagcctcgcctccctgccccacgtagagacacagagtgatgtgagggcgttggctttttctccaagaaggtacagatacctcagattcgggaaactcaaaatcaaaagacttagcttctaggataaatacttctgatgaaaaatccgctgaggagcataccccaaaccagacatatgcttaggattcatgctgagatatcaattggtttccccttctttttaaaatacgtccagttcttacccagttaacatgaagaaaccactgtctctagaagaaagcttgttttgcagtattagtgaatcactgaatagct

SEQ ID NO: 13468 - DNA, 1238 bp, Homo sapiens
ttttttttttaacagtgttatagtttataaggttttaaaaggaggaaataaaataggatatatggttttattttcatttaaaaaaaatatatatctgtttaaaggcacagaaaaaagttcagaggtatacttacaccaaggcattaaaagtggttatttggggcatcagaattttggttgatttaaatttcttttctgcttattttgtattttcatatgacatgaggaatgttaatatgcataacatgtactcctcacaaaagagtagtaaagctaaaaagagaaagcagtgccaggtagacaaaatgtctctttcaacactggctgaccctggatattatactggtaacaagatgatagactctgtgttctaccatgttcctgctgtgacagctgcatggcataaagagacagagatgctctacttccaggattccttgaatgtacttagagtcttcttcctagtgggtctgaccaccttcttagtctgggctaagagctggccgacattcagcagcagcaggaaccccaggcagacaatggctgggatacaggtgcttagtgactctttcagagctgccaaggtgaagatagcccccatcatgagcagaatcaagaacaagttactgatctcttgcagcatcggtgggcccatgaccagcagcaacccagccagcagttccagaaagcccacagctatttggtagttcaggggatctggctggtagcccaaataccttcagcgggaacacctcagcaaactgcacgaacagggcattctgtctgacattctttgtgctgtgtatgtggtttgcaagaagtggccttggtctgtgtgacgggtttgcatgatatgcctttgttctttaaaagcctggaaggctgggaagattgggaagatggaaatttcatagcatcttcctgtgtactttcatcttgaatgatctttgctgcctctttagtaactgcaccttttaaaacactgttagtgttccctgtagataaggtagcaggtatttttgccaatgacatcacactggttataactggtgttgtatctgtccttgcagaagggagctccgtcacagcagtttttgctttagaaatatttactttattttgtggaagacagtcattcataatttgctgatgacaaaactccaagacacaaaataggttacagaaatgtttaatgttgcctcgccactttatggactcgcttagtttaccctgtcgtt

SEQ ID NO: 13469 - DNA, 347 bp, Homo sapiens
gagtaagggcagagaagtgcggtcccgacataacaccgtccaataccaaagcctgcacggctgggagaagtcgaagctcacagaggatctttaggagccgagggcggagagaaggaccagtagggtcctacttatatcaacgtctggagcctagattttgtttggggtgggatggaagcaggtgatgttgcctcagaggtggctaaggctcagagggagaaacacagtgggggtttggagggcaagaccagattgggtaagtggacaggcaagtccccaggctgtagcctaagttaacagcagagagagcccgttaggtctcacacacccatcaccgcagctggagg

SEQ ID NO: 13470 - DNA, 961 bp, Homo sapiens
gaggcatcgaaggccttgggggcaaaggggagctgtgagaccaccccctcaaggggcagcacccccaccctcacaccaaggaagaagaacaaatacagacccatcagccacaccccgtcttactgtgatgagtcgctgtttggctcccgatctgaaggcgccagcttcggggccccgcggatggcgaagggggatgccgcaaagctccgtgctctcttgtggacgccaccacctacccccaggggtagccactcgccccgccccagggaggcaccactgcgagccattcacccagctggtccctccaagacagagccggggccagcggcagactcccagaagttatctatgggtgggttacactcttcacgccccctgaagcggggactttcccattccctcacccacctgaatgtccccagcactggtcatccagccaccagtgccccccacacaaatgggcctcaggatctcaggccttccacgtcaggggtgaccttccggagccccctggtgacttccagggctcgctcagttagcatttcagtgccatctaccccacgacgaggtgggccacccagaaaccaaagcccccttggaaatgatactctttcatcagggttgcctatggggccacggcgacaggtatggccccttgccagggtaggaggacattcatcacccagggaaccccaggtattaaagaagcccctgtgggggcagacagacatagcaggggtgggcagtgcctccctttatcctgacaatctctagtcgattcttgcctttttctcccgattgcggatttgggggccacctctaagatgcctctctccagccctgtctcaaccatactccaaattagtgccaacccaggggcctggcacctcccacatcatccattgtcttgctgccaagtgcgaataaacggtgtgattgccaaaaaaaaaaaaaaaaaaaa

SEQ ID NO: 13471 - DNA, 2662 bp, Homo sapiens
actacctacacggtctgctgtaaagaggtatggaagaaaggagaggctttctgcctagaaattctttgagaacacctgaaaagacagtttaatcatgtcacaacactcttaaggctcaagtcagtgttctggtttccggtagctttaggattggattctaaacgagggctggtggtgagtttggtgtttgtctcgtgtcaccctcacccctcacctcctcagtttaggataagagacataatgatttctaccagaatccaaagtaaatccaaagggggaaaaaagacataactgttttttcttctacctttttttcgttaaagagttacatctctcacaggaggaaagaattcaagagtctatatgattagttacagagaatattttcatcccctctccctgaatagaaaagcaggggtcaccatttgtatccttacccttgaggtgtttttgaagatgctgtaactcttgaagttgagctgaggcagaaaggttggaaaaatgcagccctctgggtattgtggggagggatgtgatgtagtaagagggtgttttgtggtgctaggattcccacgccaccaacttgcagctttataaaagagcgctaccaagaaccaccgctggggaaaaggttcttattcattgtttctgttggaatgtgatcttgctttctggattttaggaattcaggttactcagtataaaactctgagaaatcagtgtgacttagtccttcacctcctaagataaagtgaatatttctttacaaaataattcatgtccttaatgttaaagatgtaattttattttcaaaacatctataacatgactttcagaagcagttcatttttccaagattcctcacattatactagataaataataggccctcagttaatacccttcagttattgaattaatctagtttgtggaatgaggtgtatcctgccaacttccctctgctcccaagtacactctgagaggtaaaatgctctgggaaatggaacaagaatcgagtggatgctgactctgtgtgcccacctcctcaactgattgataatggttgaccttgggcaagtcacttctttcaatgcctcagttccccatctgtcaaatggggttaataatactgacctacctcacaggggtgttgttgtgaggcattgtaaatcaaagttaatagaatacttcagggtcctctgtggaggatgtcttgagccagagtttaagcctgacacacaggctttggtcctcactgagctgtctccaagactggaactacttagtgactcggcaaattttctgccccccacccctcatcaaagctgctagttcagatgttgacagtgttttcatgaatgttggaatcttactagtccagacttacttaggatgttgttggggaaggcacttgggattttctgtgtcttgcattcacagagggaggccatttcagattcaagagcattggattagggaatcgtgaggcagggatgctactgcgtatttctctctgcaggttggggattaaagttcctttccccatgggttttgaagcagactcagactgtctcaggatcaaagcaaccctcaatggttttgatttatgtcattgcttaccactccccaaccaatcccaggacagctgggtcactgtacccctttgtggtatctgtacctgggcctctccttcctcatagggaccagctgattgaataaatgtgaccaccttatttccaccccccacccccaaaagctacattggaattatttttcctagaaatgtgtataacactcagaattgggcattgatccttaaagcttcatcccattcaccgtattcaacatctgtcatctcttagtgtctgcagtctgaacctaaccttgaccttttttccctctggtttgagaaaactttggacactatttctacttggccaggtgtggggctcaagagccttactctttccatctcagtttaggggcgcagccagctcctcttcccaatagggctctttctgctttccctctccttggccctagatttgtaatccatgaaaaagcacaaggtcctggctccttgcggtcacattctggttctctgtgttttgtggactctgctctcactgttcacccagcactagcagtaccagatggttctgtggagtcctggggaatggagagagcacagtctgactccctgccaagtagccaggagttgacttgcccatggtccgctggctttcccaccacttcctacaggatgggatctaagagactcaagagctgggtttctttcagcactctgtactgtcccaaatagcaaacaaatcactttgtagccagatttctgaatggaaatgagaaattgaattctccatggacttttaggtttatgggggagttttagctgtgtttcttggttttatttcagccaaacatgtctgcttttgattttttttttaaagtataagtggtctatatatatgttcaccttttaaatgtaaatgtttaaaaagtaagcatttatgtgtttccataactgacatctgatgcagacctcattctctccccctcttctaccctcctcttttcccccttttcatactcttgtattggttctaataaatggttgcttttcaaaaaaaaaaaaaaaaaactc

SEQ ID NO: 13472 - DNA, 1404 bp, Homo sapiens
  misc_feature (1)...(1404): n = a,t,c or g
atttttcaatgacatttcaaccacaggcagaaaagactgtttactccttgacccaaagattaaaaaggattttttattattttaaatattacaccttcagaaccataacatgcttaagaaaactttcccaaaatgttgacctagttaaatgaggctatataaatttctaatattttacattattctattcaaggcatagggccaaagcattaagtataatttaatcccatacattcgagttaagtttagtgttgatgttccatcattctggacctcccaggagttgtttaagaatgaatctcttacacctctacttttgcccctctactgtatattaagcccataggcttgtgggaggaaggagaatttccattaggcaagctgtatgcagtggaattttccnttttaggagacacacaattaagactctctggttctgtccttgctttggagactttaagacatttcctaaagcacaaataaaagcctcgtatttccccattgagagttttgttccaaggaatatgaagtgagacatatgggtgagtcataataatcaaaataatttatgaagagctgggtctgcaatagctagtctaaaaactacttgtgtgtcagtcctctggttatagtatataagagcctgaggaggtctggcaagatagatggtgtattatttatggatcaggctgctgcatacaaaccttgcatactattatgcagcttacctaactctcagactattctgagtaatgcttgcttgctaatgaatgtataggagaccacattgtaattgttcttagatgatggagtccatgcagtttcttagaaatcggtctcagtgcatgctgtgctttttcacatttgctctgggttatctgggaagtatcaggttctgggaggcaacagcattaagtgataagaaaaggagacattctggcaaagcaattctgcttaaaggcaaagtccagaacctgggaacctagaggcctttctctctgcacgaaaaacaggtagtttgcagtctgagatatgggagagcttttaggctacacagcaacccaagggacctctcaccttttgctgagcttcaatcaggaagctatttgcctggctccagcagatgatgagataatgaggtagtgggttttttattactgttccattttgcaacatcctgcaacaccatcctgggagacaagagcattacccagcttggctttcacgggggagggttgtattcagtaaaaaagaatagtaaatattaaggtcactgagattctaagtaagatagtaaaatctaaggtcactggagccaaatccctttttcantagggcatatattaacaggctggcttantttgggcggaggttacntatgggtggaaanggaatccttagtcc

SEQ ID NO: 13473 - DNA, 459 bp, Homo sapiens
  misc_feature (1)...(459): n = a,t,c or g
tttgnanaccgctttgacagcagnttaacatgnnnnnnnnnnnnnnnnnnnnnnnnnnnnnnnnnnnnnnnnnnnnggcacgagatttaagtcaacagggaatgttcctgaaacaagaccatgggtgactaaattttgcatgtgaagcatgtgcaacttaggcatgaaagcctgcaccctggtcactgctggggtagacctctaggtgctggggactcagtaacgttctctaagagcagaatagaagaccttctaaacaggaagaaaatttaggcattgattttggtccctgaaaagtaggtagactgtgatgtgcggaagtgagagaagcttccttgatgacggtgagaactaggaccaggacattcagagcctcaagtgtacgacagtggttctcaaacttcagggagcttcagaatccccnaaagggcttgnnatgaccacagagggctggccccc

SEQ ID NO: 13474 - DNA, 1692 bp, Homo sapiens
tttttttttttgttcagacatttattgagcacttcttaagggccaggcatggtgtgaggcactgggatgtaacagtgattatgacaaagtccctcaaggagctcacagtctaatggtaaactacagagtaaactgaggcacagagtggtaaatgacttacccaatgaggtagaaacagctaggtatgtgaaaatgtgggagcagagctggagagagggcaaggtacaacttgtcctaagtaaaaccccttggactgactcaacagcaaggctgcatacacaaacattacaaaatctacttgcaaaaacctgaaagggagtttccaattatcaccatgactgaattcatggtttcacaatgaattcagctatttcctgatggcatttctatccttgcccccaaagccactgggcatggcccaccagtctgctggggagacagcaattaggtagacagcttaaaaccaagaagtatctgactccaattttagcactgaaaaccatattaaaatactttaattaaatccacaaacataaatgtgtagcacatttatgatacttctacatgtagaagtttggaaaaagtctcttctaaccctcatccagaggattctaataagttataggtaccaaagagattagagaatttgtctgtcactttccatatatacattattttggctgtacaagggtgaaaagtgtcactcagacatatttcgtaagtaatctcaacattatacagatatatacaaagacatcacatttaaattcgtgtgtacatctatgcaatgtacaacaggtaactggcaaacatgaaccagtgtaaggcaatttcttttgtgatatatgacatactccttgaagggaagggtagagtccacaaagaactgtccatttcagcctgactgtctgtcttcatgacactctgtgatgaagctacttcaggaggcaagatgtctatttcactgacaaaaagcagtgaataattataaaaggagttgttttcaaatgtggaaacccacaattactcagtaatctaagtggtgaaactcctcaaagacactactggccatgatgccgctactgagaacgagagcacttcatggataatttattgctctgagaatcaaatttgatgcgtaattctccacgaagatattcccaaaaaactcagtgatacataaattctcaaatgccatcagttgcttacttcaagcaattcttcactttgctgaggattttcttcttcctcagggccttctggatgagtgctctcagatgaagaggtcccgacaccttcagaccttttgttactggtctgaccctgctccacttcacacaaatagacatcgataggtccgttggtgctccttatgtgcactgtgatagagtcttctctgggagctggaacatccaatctggtttctgctggagctttaactgcaatgacgatctgttcatggaaggcctgaatgctatgaatgtcttgataggtcacatatgctagtctttcattttctttgtcatctgttaactcaaacagctgctgagcacaatccttaattaactcatccaaagcatcttccattgctgataagtcagaaagttcctcctgtagcttcttttgttggggaactgctccaaaattgctaagatcagatcctatccatctaatatggttcttggatttctt

SEQ ID NO: 13475 - DNA, 434 bp, Homo sapiens
  misc_feature (1)...(434): n = a,t,c or g
gatttttcccaaccactctggtctgtcttcctaggtctgagagtcactggagctaccagaagcatcatggggccctggggagagccagagctcctggtgtggcagccccgaggcggtagcttcagagcctccagtgcctgtggggctggaggtgaagttgggggccctggtgctgctgctggagctcaccctcctctgcagcctggtgcccatctgtgtgctgcgccggccaggagctaaccatgaaggctcagcttcccgccagaaagccctgagcctactaagctgtttcgcggngggcgtctttttggccacttgnctcctggacctgctgcctgactacctggctgccatagatgaggccctggcagccttgcacgtgacgctccagtncccactgcagtgatggagcagatcacactggcttacaaggg

SEQ ID NO: 13476 - DNA, 2041 bp, Homo sapiens
ggtagtgacgaccctcgcgaggtctgagagtcactggagctaccagaagcatcatggggccctggggagagccagagctcctggtgtggcgccccgaggcggtagcttcagagcctccagtgcctgtggggctggaggtgaagttgggggccctggtgctgctgctggtgctcaccctcctctgcagcctggtgcccatctgtgtgctgcgccggccaggagctaaccatgaaggctcagcttcccgccagaaagccctgagcctagtaagctgtttcgcggggggcgtctttttggccacttgtctcctggacctgctgcctgactacctggctgccatagatgaggccctggcagccttgcacgtgacgctccagttcccactgcaagagttcatcctggccatgggcgtcttcctggtcctggtgatggagcagatcacactggcttacaaggagcagtcagggccgtcacctctggaggaaacaagggctctgctgggaacagtgaatggtgggccgcagcattggcatgatgggccaggggtcccacaggcgagtggagccccagcaaccccctcagccttgcgtgcctgtgtactggtgttctccctggccctccactccgtgttcgaggggctggcggtagggctgcagcgagaccgggctcgggccatggagctgtgcctggctttgctgctccacaagggcatcctggctgtcagcttgtccctgcggctgttgcagagccaccttagggcacaggtggtggctggctgtgggatcctcttctcatgcatgacacctctaggcatcgggctgggtgcagctctggcagagtcggcaggacctctgcaccagctggcccagtctgtgctagagggcatggcagctggcacctttctctatatcacctttctggaaatcctgccccaggagctggccagttctgagcaaaggatcctcaaggtcattctgctcctagcaggctttgccctgctcactggcctgctcttcatccaaatctagggggcttcaagagaggggcaggggagattgatgatcaggtgcccctgttctcccttccctcccccagttgtggggaataggaaggaaaggggaagggaaatactgaggaccaaaaagttctctgggagctaaagatagagcctttggggctatctgactaatgagagggaagtgggcagacaagaggctggccccagtcccaaggaacaagagatggtcaagtcgctagagacatatcaggggacattaggattggggaagacacttgactgctagaatcagaggttggacactatacataaggacaggctcacatgggaggctggaggtgggtacccagctgctgtggaacgggtatggacaggtcataaacctagagtcagtgtcctgttggtcctagcccatttcagcaccctgccacttggagtggacccctcctactcttcttagcgcctaccctcatacctatctccctcctcccatctcctaggggactggcgccaaatggtctctccctgccaattttggtatcttctctggcctctccagtcctgcttactcctctatttttaaagtgccaaacaaatccccttcctctttctcaaagcacagtaatgtggcactgagccctacccagcacctcagtgaagggggcctgcttgctctttattttggtcccggatcctggggtggggcagaaatattttctgggctggggtaggaggaaggttgttgcagccatctactgctgctgtaccctaggaatatggggacatggacatggtgtcccatgcccagatgataaacactgagctgccaaaacatttttttaaatacacccgaggagcccaagggggaagggcaatgcctacccccagcgttatttttggggagggagggctgtgcatagggacatattctttagaatctattttattaactgacctgttttgggacctgttacccaaataaaagatgtttctagacatctgtaaaaaaaaaaaaaaaaaaaa

SEQ ID NO: 13477 - DNA, 1745 bp, Homo sapiens
  misc_feature (1)...(1745): n = a,t,c or g
cagaagcaggttgcctttgagntatttagtcacaccaanacaactagagctgtcatagacagtgtaggtttgcagagatccacctccttgcttactggcaattagggagttaatgctctaaaattaggcaaggagcctggactgttgccattttatggaagccacataagttgggcaggactccacaggagctgcccgtgacctgatgatagcaagagatttctatctctgagtcgtgaaatctgtctaccatgaaagagtctatgcttcacctgaggaataatcgattctggtgtgagttctggtctctcaggacattataaaggagggaaaatgatgtaaagggaagaaagaataccagagtgggaatccagttttgcctcaaactagctgggagactaggcaagtcatggaagacctcagtttctctgtctgcaagtgttatattggactggatggtcatgaagtccctttcatagccagagatgtaagcattttagcagccacacaaaatctctggctatgaaagggacttcatgaccatccagtccaatataacacttgcagacagagaaactgaggtcttccatgacttgcctagtctcccagctagtttgaggcaaaactggattcccactctggtattctttcttccctttacatcattttccctcctttataatgtcctgagagaccagaactcacaccagaatcgattattcctcaggtgaagcatagactctttcatggtagacagatttcacgactcagagatagaaatctcttgctatcatcaggtcacgggcagctcctgtggagtcctgcccaacttatgtggcttccataaaatggcaacagtccaggctccttgcctaattttagagcattaactccctaattgccagtaagcaaggaggtggatctctgcaaacctacactgtctatgacagctctagttgtacttggtgtgactaaatacctcaaaggcaacctgcttctgcaggttttgaagtgttcagcttcataagacactgaggtttagaattgtttgattctagaccataactgaagggcataaatggaaacaggatatgaagggaaacaagtagcatcatggagctgaaaagtggtgcatcacccaatggctaggcacagacaaggatcacactgtccattctcttgtctgctaaattaagcattttcttgcctcctttgcttcatcttttcacaacagctggatagagggatcagaaatgactgtgtcatggtgctcattcactgcaaactcccagttgcaagctccttggctcccccggagggagcaagaatctcatagttcagagacacagagggccttttagccctaatgaccttttggatgggactgcaactcatgactatcctgatattggaagaaaggactttgttaatcttctcccccatagctctgctgcgtaggtctacatcttactcagaatcactacacattcctttagtcttcctccaagctccagagccattggtacaaatgctttattgaaactaaatacataatacacacaatgagatgaagacaatatagaagtccgcatagtcatcataatcccgttccttggccggttgaggcagctcagtggctgagcccagtcaagccaacccgcagcttcactcacgacttcaagatttgatgctaattcttttggatttctacagttattaaataagtgtctgagtggaaaaaaaaa

SEQ ID NO: 13478 - DNA, 4616 bp, Homo sapiens
gaattccgggctgtttagctgtaattagggtgcaaggataaggtgtaagaactggctggaggttgaatgttttcctggaggagtgttagcatcaactagatccctggaatttctgcctttctgtctcaagatgcatgtctttgtccagagtacctgtggagaagaaacaatggattccttagaccatatgctgacagatcctctggaacttggtccgtgtggagatggccatggcacgcgcatcatggaggattgcctcctgggaggcaccagagttagtctgcccgaggaccttctggaggatcctgagatcttctttgatgttgtcagcctctcaacatggcaggaagtgttaagtgattctcaacgtgaacacctccagcagtttctgccccagtttcctgaagacagtgctgagcagcagaatgaactcatcttagccttgttcagtggggagaacttccgctttggaaaccctctgcacattgcccagaagcttttccgagacggacactttaaccccgaggtggtcaagtaccggcagttatgcttcaagtcacagtacaagcgctacctcaactcccagcagcagtatttccatcggctgctgaagcaaattcttgcttcccggagtgatctgctggagatggcccggcggagtggccccgcccttcccttccggcagaaacgcccttcaccatcccgcacacctgaggagcgggagtggcggacccagcagcgctacttgaaggtcttaagggaagtgaaagaggagtgtggtgacacagccctgtcatctgatgaagaggccacgttggatttacaagaacaattttcttttgaagatctcagctcatggcttccgagctctccagcacgttctcctagtcctgcggtgcccctgcgggtggtgcccacactttcaaccacggatatgaaaaccgcagataaagtagaactgggggacagtgacctgaagataatgttaaagaagcaccacgagaagcggaaacatcagccagatcacccggaccttttgacaggggacctgactctcaatgacatcatgactcgagtaaatgctggcaggaagggctctctggcagccttatatgacttggctgtccttaaaaaaaaggttaaggaaaaagaggaaaagaagaagaagaaaataaaaacgatcaaatcagaggcagaggacctggccgagccgctaagcagtactgaaggggtcgcacctctctcacaggccccctctccgctggcaattcctgctatcaaggaagagccccttgaagacctcaagccttgccttggaatcaatgaaatatcttccagcttcttctctcttctattagagatcttgctgctggagagtcaggctagccttcctatgctagaggagcgagttttggattggcagtcatcgccagccagctccctcaacagctggttctctgcggcccccaactgggctgagttggtactaccagccctgcagtatcttgctggagaaagtcgagctgttccttccagtttctctccatttgttgaattcaaagagaaaacccagcagtggaagttgcttggccaatcccaagataatgaaaaggaattagctgctctcttccagctatggctagagaccaaagatcaggccttctgtaagcaagaaaatgaagacagctcagatgccacaacacctgtccctcgggtaagaactgactatgtggtgcgtcccagcacgggggaggagaaacgggtttttcaggagcaggagcgttacaggtatagccaaccccataaggcgttcacctttcgcatgcacggctttgagtctgtggtggggccagtgaagggcgtgtttgacaaggagacctcgctcaacaaggctcgggagcactccctgctgcgctccgaccggcctgcctacgtcaccattctgtctcttgttcgggacgctgcggctcgactgcctaatggagaaggcacacgggcagagatctgtgaactgcttaaggactcccagtttcttgcaccagatgtcaccagcactcaggtaaatacagtagtgagtggtgcactggatcggctacattacgaaaaagatccctgtgtgaaatacgacattggacgaaagctgtggatctacctgcatcgtgaccggagtgaagaagagtttgagcggattcaccaagcacaagcagctgcagctaaagccagaaaagctcttcagcaaaaacccaagcccccatccaaggtgaagtccagtagcaaggagagctccataaaggtccttagcagtggcccttctgagcagagccagatgagcctcagtgactccagtatgccacccaccccagtcacacctgtaacccccaccacaccagcattgcccgccattcccatctcccctccacctgtatcggcagtgaacaaaagcggcccttccacagtctcagaaccagctaagtctagctcgggtgttcttctggtgtcttcaccaacaatgccacatctgggaacaatgctttccccagcttccagccagactgcacccagttctcaggctgccgcccgggtcgtgagccactctggctctgctggactgtctcaggtgcgagtggtggcccagcctagccttcctgctgttccccagcagtcgggagggccggcacagacattgccacagatgccagcaggaccgcagatccgggttccagccactgccacacagaccaaagtagtgccccagacagtaatggccactgtgcccgtcaaagcgcagactacggcagccactgtgcagcggcctggacccgggcagacagggctcacggtgacaagtctccctgccacagccagccctgtgagtaagccagccacgagttctcctgggacctctgctcccagtgcctccacggctgccgtcattcaaaatgtcacaggacagaacatcatcaagcaggtggcaatcactgggcagcttggtgtgaagccccaaacaggcaacagcattccactcacagccactaacttccgcatccagggtaaggatgtattgcgtctgccgccctcttccatcaccacagatgccaagggccagacggttctgcgaatcactccggacatgatggccacattggccaagtcccaggttaccacagtcaaattgacccaggacctcttcgggacaggaggcaacactacaggcaaaggcatctctgccaccttacacgtcacttccaatccagtacatgcagctgatagccctgccaaggccagttcagccagtgccccttcatccactccaacaggtaccactgtggtcaaagtgactcctgacctcaagccaacagaagcctcaagttcggcttttcgcttgatgccagctcttggcgtgagtgtggctgaccagaagggaaaaagcacagtggcctcttcagaagcaaaaccagctgccacgatccgcatcgtgcagggactgggagtgatgcctcccaaagcaggccagaccatcaccgttgcaacccacgccaagcaaggggcctcggtggccagtgggtctggaactgtccatacttcagcggtgtccttacccagtatgaatgctgctgtgtccaagactgtagctgtggcttctggggctgcaagcacccccatcagcatcagcacaggagcccccaccgtgcggcaggtccctgtcagcaccacggttgtgtccacgtcccaggctgggaagttgcctacacggatcacagttcccctctctgtgatcagccagccaatgaagggcaagagcgtggtcacagcccccatcatcaaaggcaaccttggagccaacctcagtgggttggggccgcaacatcatcctcacaactatgccagcaggcactaagctcattgctggcaataagcctgtaagtttcctcactgctcagcagttgcagcagcttcagcagcaaggtcaggccacacaggtgcgcatccagactgtccctgcatcccatctccaacagggaacagcttctggctcctccaaagcagtctccactgttgttgtgactacagctccgtctcctaaacaggcacctgagcaacaatgattatgagagaggatggcttccgtgaaagaccatgcctggtctgtcctggctgagaagggaccagggaggttgcatcattgttttaagcttgcctgttcaaggcagccaggcgaggggtgatggcaacggtggcctggattcgtggcctggattctgctgccacgtgccatagtggagcaccctgagaaaggttcactccagggttccaaggtctgctctctaccaatctaggagaatattctgttgaaattgcaggaattacccagttacgtccaacaagccagagttctgagagtaagacccccagggaaggcttaccagttgcagagtgcacacagcgaataggctggttctccatgaggattgtattttttggcttctggtcttctccatgactagtggtctggataggagttttgtgtccagaaaattttatgtaatttatttttttaaagaacctgttgtacatctttctcaaatacaaacttgggctttagctgccccctccac

SEQ ID NO: 13479 - DNA, 1694 bp, Homo sapiens
tagaacttagtccagaggagttgcctgaggaggatgatgacttcccagaatctacaggagtaaagcgaattgtccaagccctgaatgccaatgtgtggtccaatgtagtgatgaagaatgataggaaccaaggctttagcttctcaactcattgactggaacaaaccatagcattgggtcagcagatccctgtcacccagagcaaccccatttgccagcagcagatagtactgaatccctctctgatcatcggggtggtgcatctaacacaacagatgcccaggttgatagcattgtgggatcccatgttagatctggatattcaagaattagccagtcttaccactggaggaggagatgtggagaattttgaaagactcttttcaaagttaaaggaaatgaaagacaaggctgcgacgcttcctcatgagcaaagaaaagtgcatgcagaaaaggtggccaaagcattctggatggcaatcgggggagacagagatgaaattgaaggcctttcatctgatgaagagcactgaattattcatactagggtttgaccaacaaagatgctagctgtctctgagatacctctctactcagcccagtcatattttgccaaaattgcccttatcatgttggctgcctgacttgtttatagggtccccttaattttagtttttagtaggaggttaaggagaaatcttttttttcctcagtatattgtaagagagtgaggaatacagtgatagtaatgagtgaggatttcttaaatatactttttttttgttctaggaatgagggtaggataaatctcagaggtctgtgtgatttactcaagttgaagacaacctccaggccattcctggtcaaccttttaagtagcatttccagcattcacacttgatactgcacatcaggagttgtgtcacctttcctgggtgatttgggttttctccattcaaggagcttgtagctctgagctatgatgcttttattgggaggaaaggaggcagctgcagaattgatgtgagctatgtggggccgaagtctcagcccgcagctaagtctctacctaagaaaatgcctctgggcatttcttttgaagtatagtgtctgagctcatgctagaaagaatcaaaaagccagtgtggatttttagactgtaataaatgagggcaaaggatttctattccagtgggaaggaaaacctctctactgagttgtgggggatatgttgtatgttagagagaaccttaaggagtccttgtatgggccatggagacagtatgtgataacataccgtgattttcatgaagaaattcttctgtcttagagttctcccctgctgcttgagatgccagagctgtgttgttgcacacctgcaaaacaaggcacatttcccccctttcctctttaaagcccaaagagagatcacctgcccaaagtgggagcactaaggggtgggtggggaagtgaaatgttaggcgatgaattccctgagcaccttgtttttccttcccaaggttcgtagctcctctctgcccttccaagcctgtaacctcggaggactatcttttgttctttatcctttgtcttgtttgagtgggtcagccccagaggaactgataagcaaatggcaagtttttaaaggaagagtggaaagtactgcaaataaaaatccttatttgtttttgtag

SEQ ID NO: 13480 - DNA, 642 bp, Homo sapiens
aattcggcactaggggcagcccccatacctcaagggttctcttgtttatcgaggtttttgggctggtggtctcggcagccagttctggtgactcagtccgcagctatagttccagtaagaactaaaaaacgtttcacacctcctatttatcaacctaaatttaaaacagaaaaggagtttatgcaacatgcccggaaagcaggattggttattcctccagaaaaatcggaccgttccatacatctggcctgtacagctggtatatttgatgcctatgttcctcctgagggtgatgcacgcatatcatctctttcaaaggagggactgatagagagaactgatagagagaactgaacgaatgaagaagactatggcatcacaagtgtcaatccggaggataaaagactatgatgccaactttaaaataaaggacttcccctgaaaaagctaaggatatctttattgaagctcacctctgtctaaataacttcaggaccatggaccgactttcattaccttgggtaactggaacactgttttccagacatgacttgggacatcaaatataagaccgtccgctggagctttgtggatctttagagcctctcatgttgttcaagtcgctgttcaagtatgatgacc

SEQ ID NO: 13481 - DNA, 1625 bp, Homo sapiens
ttttttttttttttttttcgagcaagaatctgttaacagttttatttttttttatgttaaataccatgggacaggattgtaaggatgaaaaactcagtcaacaactgcctcacaagggataagaaaaattctgccatgatattagcaaaggtaaaggaggaaaaatttacactgtaagaggcaccatttccccaaggaatacctcttggcatttcctgaatgagtgggattagcaatctaaataaatcatatttcaagaggtaacagcaacagataaaatttaaagggattattaaaataacatttacaagactctgaacaattcttgaactcttattaaaaccacaaagaaagaacaattctttatttatgaatttcataaaggactcaatgtgcaactgacatctgctagtgatgatctggtaatatacaacctgtccagtagccgaacagtttgtttttattgtgttttctaaccgtaagagatcattaaaggcaaagcctatatgacgctgtacacacaaaaaaatggtcaccgtgggccatactaccaatgaaatggtaggtaaacaaatctttttctggtcaagagaaaaaaaaaaaaaagaaacagcactctgcatgcttcactctacaagatgaatttccctagaaagaatccaatgaaaatggctgcaattacaacaagaagtgaaggaagaggactggtgacattatctctgaaggatgcagttgaggttgatccaggtttatccgaatgtgctacctttctgagccttaaaccttcatctctcaggtgccgattttcttctgatagcttcatcatttctccctgaagtcttttacactcttccattagtttccttgtttcggtatcattaagtgaaacactgtgtggttttggcataggtccatcttgcttagatgcattcagtggaacagctttgctaggttccatatcattcaatttatcattttcattgggcatttcaaatacgcatctcaatttggaatccattaattcatcaggttttgcctctttccacacagcttccatatctgaagtgtttggtggagcaaaaattgtctgtaccataaacttgtgtttactcttttcattcggatcatagtcaaagggctgtagcattactgaaacagtcacagttgaccctgggtcaataattccactgttgggcctcacacagtaccggcgaggtgctgtagtcttcactttgaaacacacttttctatccgatggatttcgcaatttaagatttgtagtgactacatctgtgaaggggcctttgaatttgaggtctgtgggcggatcgaggaccaggatctgctcgtcgttcgccatggcccctgaggcggacgccatcggagagacagcgcagagcgggggcgcgccgcggcggcggtttgctgactgggggcgggggacgacggcggcgacggctcggccgagctctaggacgaggccaggctcgcggctcccgagccctaacgcctgccgctgtgtcaccggttcggtgggcgcacccgctgggtcagcagctccgggtcccacaactgactcaatcccacaccagccgcacggccacgcgcacttgcgagcctcggcg

SEQ ID NO: 13482 - DNA, 578 bp, Homo sapiens
ttttttttttttttatattttattcaactttattaaaaattaaaactacagaaaccaaaccgaatgcacaaataagagagtggggaaacagacagggagcaatggcagctgataactgtggcgagtggataatccgcatgactcacatcccacccctgcgactgaggagcccagaacgctgcgctggcactgtcgtgccctcttccaccacaggggcacagaaacctgcaggagactgaaaacgattacaaacatcttcaaccagctctctggccaaaggcagcaaaagcagcctgaatacgcaactcacgccaagagggcagcagctctcctgacatccatgtaagaaggctaacacctaaaccacacgcaggcatcctgaactcagcagctctgatccaaggtactgagtggagacaaagcactcggaggtggcaagatgttcagcaaccaagtaagacacactggcaaggcatcccacccaaaggtgagaagcacaaagcaggctttggagaaacaaacagtcatgccaggtgcagccagacatccgtgctataagccctgaccctagtaccccg

SEQ ID NO: 13483 - DNA, 1119 bp, Homo sapiens
tttttttttttttttttggtgccaatataagaatcttatttactgctttagtcaagaaggagatgttatttcacttgtgacttcctcccaagtgaatgagtatacaatttaacaaactaacacagttcagtttattaagttacaatctgtaaccacctaatgtagctcagtgtatggtggatactagatataaacaagagtagggaagtctttggcacctgcatgatgcgtgccggcttttaaattcagaaagatgagaagctacaatgcaactttttttttaatctacagataccgccaaaagaagaaatgtttatcagattttgaatgacatagctgtaagttggcggttggcagctttccacataaaatttcatcagcaagtgaaacttgattacagcccaaactagacaaggcaattcaggtgcccggaccctgaagtccacgtgagactacaggagaacgtgcattatggtgcttgccagccagtctcttgaggaactgcctgtaacagtcacggttgtggggagaaacaactccattttttttaagttttttttttttatggtattaaatataagtcttagcacctttggcatttttgtccaaacagacttcgacatatgaagtggggacataaccctcttcatcttcatttctccgaatgcgggtccagccatcgcctttgtcttcctctatgacatacaatgtttctccttcaactacggaaatcgttccttcattctgaccttcaaatgtgtagagagctttgcacgtccctatggcagggaggggctcctcatcatcaaactcgtcgtcaaaatccgtggccagcaccttcatctcactctcctgactctgctcctctgtgtaactgccatctgggctgctctcacggtcctgggcgcagttgttgactgtgggtgggttctggctgtcgtacagtccgctctgccggcgcgcctgctcgttgcgtgctgggagccggccttcaacctcagccagccaggcctcaaatttctgggtctctactcgcagtttctctatattttggctgacttctgctaatttgtgatccaaactggctgggtctcccatctgaggattctttaggtagac

SEQ ID NO: 13484 - DNA, 1690 bp, Homo sapiens
gggtaaagaagccagaaaggttaggcaagaagtgagataaaatcagatcacctttgatcaaaatggttggtgaacctccacatgtccagttctgttgccaaactttccattcagagtatttggtggagtttgaatttgaacaaactaaatgccttcatcttaggtagaaagggcctgaatcttccattttatattcaaacctcattgttatttggcctaagtaaaaagtcagatttcatttccatttacctgagttcgctttaaagagcttttcaaagagagctttatagacacccacaattgtccccaatctcttcatgatgttgcattaatagttgtttttgtccctttcttggaaatgttaatgccaaagttgcctgaacattgggcggttttcttaatttgaagtataaaaattataaagagtaattccaaaggtattaaaagattgtttaacagtatgtgtggtgatgtcattatctccagagaggcttcaagaaatcctttggaaataaaaagttaaatgtttacatttcatgtggtatttcaggtcttcaggttctgattagcttacttttttcctttgtctttggctgatttctgctttgtagataaataataatagccctgagatgtttctaacatttaaataagaaaaaaatcaaatcgaagtcagcctgctgggaaaagtgatcacatgggcagttgcagtaacttgtatggaaagagaaaatgcaatgagcccagttactggcacttgccactaccatgctgtccatggaaggaataatcagcagttcagttgtcacaagccgcccttgaagaaaacgcagcaaaatattttaaaatgaagatattgcagtccccagagccagtgaaggtttcttttggtaaaatgaaattgtgccattgtcaaagtaccccgtagtgatgagcactgactggttcactggccacattttagttcttcataataataggccacaaaagggctctgtggtttgcctccatgtgcactggcccctccccacccctagggggcactcagtagctgctgagaaggcctgtccacgaggctgttgggaacccctccaataaatacttagaggtagtgtatctgatgcttgttttcgtggagaaaattgtattggagaacttaaaacatcacgaatatttttaataggatccgcagacacccaaaggagaagcttggtcttttccaggtatttccaacttgagttcaacccaaagcctttgaaaggaatgcattaccacatgaccacatgctgagacccatgggtctaacacgggacctaagaagtctctgcagccagatagtacatggtgtctcacaaactaggcattctggagattgcccagaaagggatgtgaggggaccgtctaagatctgtcttgcgtactcagcaataacatcttcagctcctgaatcctgaatagagatctaggtggtgaatattagcatcgttcgataggtgtgttggtgcaccaattgtctgcgaatgttgtttgaagaacccctcgttggtttgcttagaagagattgaaggattatgtttcgtgcaagaaaatggtgtgaagatggaatgtttcagttgtcatcccggagtagaaaaattccgccttgtctggggaagactcacccttgggccaagagtgagacctattctaa

SEQ ID NO: 13485 - DNA, 259 bp, Homo sapiens
cattagtcctctttcagctgaatgcatgctacagtataagaaaaaagctgctgcctatatgaagtctttgagaaagcccctcttggagtctgtgccttatgaagaagcactggcaaaccgccgcatccttctcagctctactgaaagtcgagaaggccttgcacagcaagttcaacagagtttggaaaagatttctaaactggagcaggaaaaagaacattggatgttggaagcacaattagccaaaatcaagctagag

SEQ ID NO: 13486 - DNA, 459 bp, Homo sapiens
  misc_feature (1)...(459): n = a,t,c or g
ggatcgtnacnnnnnnnnnnnnnnnnnnnnnnnnnnnnnnnnnnnnnnnnnnnnnnnnnnnnnnnnnnggcacgaggaacacttaacctcctacatatgttttcttaggaagattcttccctatcagttaaaaagtttagaagaagaatgtgaatcctctctttgcacatctgcgttaagagccaggaatctagagctgtcccaggacatgaaaaaaaatgacagctgtgtttgagaagctgcagacttacatagctcttcttgccttgccaattttgcagagggcaagcaggtccacagagctcctcacgctgacatggcagaagcagaactctgtgatatttgggtacagagccagatggactccttcggacaaactacagttctgtgttaacaaatgttggtgctgctctgcatggatttcatgacgttatgaaagatatttctaaacattatagc

SEQ ID NO: 13487 - DNA, 641 bp, Homo sapiens
gacaagatgaagaaactccaagggtttgagtaaatacaaagactgaagaaatttcacagcagtttattaatgtgtgtgtgtgcaggccacagcagcatgcccttggtgtagtcagtgccgaaaggggtctgttccttcttgagcctgcctgcagggatggtctccttttaaagcaggttgtgtgcagcattcagtacactgaaggcataaaccttccactcttgaacaaagcagctgctttttaaaagcgagaaaaaggaaaacggggcacaggccattcgacgccttctccaaggggtctgatttgctgagacaccagcttcaccttcttaacaaggcacctaattacaacaagcatgcacattttggtgcattcaagaatggaaaatcagaatagcagcattgattcttctggtgcagctcagtggaagatgatgacaaccagaagacatgagctaagggtaagggactgttctgaagaacctttccatttagtgatcaagatatggaagctgatttctgaaaatgctcagtgtgtactctaattatttatggtaccatttgaattgtaacttgcattttagcagtgcatgtttctaattgacttactgggaaactgaataaaatatgcctcttattat

SEQ ID NO: 13488 - DNA, 273 bp, Homo sapiens
cgttatgtagcaagaccccatctccaaaataagtgcctgtaagatttgagatccagggagggagttgtgaaatgctgttaaagcttaagattgagaagtgttctattcagaaggcaggccctcattcaggtgggaaactacaagacccctggttcttggctacagaccaggatagggttcacccaacttggtcccactgagaattctgaacttactctgtaaccatcccaaattcctcccaggtacagtctggcagaggtcttgccattccag

SEQ ID NO: 13489 - DNA, 1018 bp, Homo sapiens
  misc_feature (1)...(1018): n = a,t,c or g
gctttctaggagttagaaataggtaaaattgtagctcgtgtggctgggaaatgtgtataattcatggaatagctcatcaatgccacagtcaggggtgcaccatacatatgactgtcatcctcatggatgtgggggaaaacaagatgaaagtttaggcactaatgtttgttttcacttctactcaatacaatttagtgttggtttatattaaatgcaaagataagctagagtttgtggagcatcaggctaacaatcggttcccttttcttccagtgctgaaaggtggtcctttctctgacagctacaggctctttcagttccattttcactggggcagtacaaatgagcatggttcagaacatacagtggatggagtcaaatattctgccgagcttcacgtagctcactggaattctgcaaagtactccagccttgctgaagctgcctcaaaggctgatggtttggcagttattggtgttttgatgaaggttggtgaggccaacccaaagctgcagaaagtacttgatgccctccaagcaattaaaaccaagggcaaacgagccccattcacaaattttgacccctctactctccttccttcatccctggatttctggacctaccctggctctctgacttcatcctcctctttatgagagtgtaacttggatcatctgtaaggagagcatcagtgtcagctcagagcagctggcacaattccgcagccttctatcaaatgttgaaggtgataacgctgtccccatgcagcacaacaaccgcccaacccaacctctgaagggcagaacagtgagagcttcattttgatgattctgagaagaaacttgtccttcctcaagaacacagccctgcttctgacataatccagtaaaataataatttttaagaaataaatttatttcaatattagcaagacagcatgccttccaaatcaatctgttaaaacttaagaaacttaaattttagttgctnactgcttgaattcaaattaataattagt

SEQ ID NO: 13490 - DNA, 779 bp, Homo sapiens
gtagattcggcacaggcttcctgtgagcccggcggtgacaacggcaacatggccctgaacggagctggtgaggacctgggcggcaggggtttgtggctgtgaggtacgggaggcagcccactccggcaagacccccagtccctatgcctctcttccccagaagtcgacgacttctcctggggagcccccgactgaggcggagacgaaggtgctgcaggcgcgacgggagcggcaagatcgcatctcccggctcatgggcgactatctgctgcgcggttaccgcatgctgggcgagacgtgtgcggactgcgggacgatcctcctccaagacaaacagcggaaaatctactgcgtggcttgtcaggaactcgactcagacgtggataaagataatcccgctctgaatgcccaggctgccctctcccaagctcgggagcaccagctggcctcagcctcagagctccccctgggctctcgacctgcgccccagcccccagtacctcgtccggagcactgtgagggagctgcagcaggactcaaggcagcccaggggccacctgctcctgctgtgcctccaaatacagatgtcatggcctgcacacagacagccctcttgcagaagctgacctgggcctctgctgaactgggctctagcacctccctggagactagcatccagctgtgtggccttatccgcgcatgtgcggaggccctgcgcagcctgcagcagctacagcactaagagaagcccctgagaaaaaccctctagaaaaacaaaa

SEQ ID NO: 13491 - DNA, 1139 bp, Homo sapiens
ttttttttttataaacattattaaattttattaacaaaacattttgtacattttaatacatgtggaattttacatctaggtaaaataacaacacattcaaaatttaccatttatacaaactgttacagaataacaaccagtgggttaaataagtaaaataaaccacactgattttttaaattatctacaaaaggatttgactttaaaattcccctggaacatataaaaataaattaattttacttttcaattaaatctaccaattagaaatattacaaatcaaaatatcaatgttatcttatgaatttgtcacaatacaaaacagattcacaaaactttatttacagaaatgaggctaagaactgtgcaatgtttaaccaaggaaacatattgcagaattaacatgttcttccagctaagtacacagtggaggtctaattacagctgggtcttttccactaataattcacacaccaaagaagagtttgatgatgacatcctcagtgggggaatcactctgcggtactgtcacatcaaaagcgtggctccccaaagtggaagggctgtcatacaggtttcacctgtttcaggaactctagtggtgagcttttaatggtcagtaatgggaagtggtttaaataaaacaaatctctattcttaccaaatccactccttttcttgtgactcattagtggataaatacccaggtaatagttttgcctgagcctatctacagtggcacagaaagttctgaataaaggcggaagccatgggaaggctgcaggtgacgggatgattccctgctgctcggaggactgactgtcccaccctgctgtctacagcccttgcagcacaatggaggcacttgatcaagggcaaaccccaccagcactttccacagtggcccctttctgaaagaagtatttagctttgaattgatctggttcccccagcagcctcagaactcacttaactcaagatttcttcaaaatatgagtaggtcttaacactaaagaaagcaattctcaaaagaaaattacctttagcagatgcagacattaccatcctaacttcattaccaaaattggccaaatcccattagaaaggaaatttttttttaacaaagattgccaagtccc

SEQ ID NO: 13492 - DNA, 823 bp, Homo sapiens
gaaaattcaattatgaacacctttctctttctacgaatttatattctattgatacagccccctccatgagaagtccagaagaggtacctattttgcaattttcagagaataggggtcagtccttatcttaaaaaaccatgttttagccttagaatcatcatggcaggtttctcaaatactgatgaccccacccattactgggaaagaatctctcagtgcgggggctggccatctgtactatgatgaagctaccttggtgattctgatgtgtacctctggttaagaatctcgatgttccaaacaggctccttgagggaggggagggagggagagacctcaactttgctcatgctgtgttctcagtgccagcacagtgcccggcataaaaaagacgcctaatgcccctctgaggctttatttccttagcttccaggacatgtctgctacagagtgggtgctcaaaaaatattgaattatttgtgacttttaaaaaacttggatattaaaaaatttacaactggctgggcatggtggctcacagccaaaaaagtttatctttcatgtttcagataaagccattgctctaataataataaaatatgatatgcaaacaaagtgacattgtgaatctgtacccaccaaaaaatagcacttagaatatgttttgcataggtttttcagtgatctgatttcaagtatgatgaaagtaaatggaataggaaatttatgaagctataacatctcatataatatttaaaatgctatgctagatttttaaagttgcataaggagttattttagtgattcctacagtgatctgccc

SEQ ID NO: 13493 - DNA, 971 bp, Homo sapiens
  misc_feature (1)...(971): n = a,t,c or g
gctctggatagctggctgtggagaggaagcctccatgggctgctttggtctgtgggctccttcattcccttggtgataatttccctttattctgtgggatttttggtggggttttcccccctttttttatggagttggccaataggattgagttggggctccagtagagaaggcagggttggtggtgggtgggggcagcctgtatcagacaaaggtaaatcagccagccaggcacccacagcctcagctcctgtgcagttcctgggcagcacagtggaagtgggagcctggtccttcccctgcccatggagagctctttaagggatcccagcctgcccctccacttctctcccaagccaggtcccggcatgggtgggttatgctcatgctggcaatacttgaaacgggtttattaatgctgggtattttgcacaattttatagacctcttttctacatagtcttttttaaatggaaggagaaaatgtcagccacattactgtctgtgtagtgccaggtgaagggttatcagaaggctggttggttttaataagtttattccaagagaccttctggctggaatgagtgagagtgtgtgtgcatgtgtgtgtgtgttcatgtgtgccctgtatgaatgtggctggctcccatatcccctgggctgccccctgccccatcccctttgagtgtcagaagcactctgagccaaggggacagggggcacgtgcactggtcacgagaaaaccctgggctcccactggggctcagccagcctcctatctttccttcttctatggacttcagacagccagtgtctgggggactctgccactctacccccagccctacccaccagcccccagggtgaggcttccagctggggacctgcccagacaggctgagntggggcgttggttggtngggtgatggctctngggagcgttttgccattcctaacaaagccacaaccct

SEQ ID NO: 13494 - DNA, 446 bp, Homo sapiens
ggagaagttccaggccttgtgtaacctctacggggccatcaccattgctcaagccatgatcttctgccatactcgcaaaacagctagttggctggcagcagagctctcaaaagaaggccaccaggtggctctgcctgagtggggagatgatggtggagcagagggctgcggtgattgagcgcttccgagagggcaaagagaaggttttggtgaccaccaacgtgtgtgccccgcggtgagcagaggacgtgtcccacctggtctgccaggctcggggtcccaggcccaattagagccagaaatccttgtatacagggaagtcggatggtctcagggagatgggtggggttggtgacactattcctttctaggagagactgtttggatttccctgaggtggtaagaactcacacatgccaggtgcggtgctcatgcctgcaatccca

SEQ ID NO: 13495 - DNA, 676 bp, Homo sapiens
ccaactataatcattcggcagacagctgggcagctctccttctccatcaaggtagcagaggatgtggccatggccttctcagctgaacaggacctgcagctctgtgttggggggtgccctccaagtcagcgactctctcgatcagagcgcaatcgtcggggagctataaccattgatactgccagacggctgtgcaaggaagggcttccagtggaagatgcttacttccattcctgtgtctttgatgttttaatttctggtgatcccaactttaccgtggcagctcaggcagcactggaggatgcccgagccttcctgccagacttagagaagctgcatctcttcccctcagatgctggggttcctctttcctcagcaaccctcttagctccactcctttctgggctctttgttctgtgggctttgcattcagtaaggggaccatcagtcccattactagtttggaaatgatttggagatacagattggcatagaagaatgtaaagaatcattaaaggaaggcaggggcctaggagacacgtgaaacaatgacattatccagagtcagatgaggctgcagtccagggttgaaattatcacagaataaggattctgggcaaggttactgcattccggatctctgtggggctcttcaccaatttttccagcctcattt

SEQ ID NO: 13496 - DNA, 765 bp, Homo sapiens
gggcgatcttgagggcatgttcatcttcatcaaacatggagataatcagcagtttctggtcaataccaactgtgctgtcgtcgtgttgctgtattacatccgcagtaaagtaaagttgcctaaaacaagtgaggagcttagggaggggactaatggccaaaggtcagaaggagttgggtcatctctaacccccaagccctcctcctggcaagaagggagttcctcatatccttagagcttcctccaacccattttgtataggatcactggccccttttgctcccactctctttccttagctgccccaattaccctgtgatctccctccagacaccatccgatttgtgtgaacaaatggggaaaatgaagatgcttttcctgatgaagcccaatcatgcagagtatgccagcaaataccttacagctcgaagcacctactacgtttgtaaggtggaacgtgggccacccaggaaccaggctggagaatgcttacagagcttttgtgcctctcctcaagaatccggagccttggctgcttgttgcactgcgcatacaatgtgatgccctggagaggagacgaattcagatgcttaaaatgaaagaagccaagaaggtcgttataattgaaccccctgcgagtgtcccgtccaagcaatcaggacgatcagacaaaaagaagtccactcgcaagctccgacctttaggaacagaccagacttcaggaagaataaaggtcgccaactcaataaaaccaccaagcaaaag

SEQ ID NO: 13497 - DNA, 1661 bp, Homo sapiens
cgggtccggcgggcggttggcttgagcgggaccggagctgaggcaggaagagccggcgccatggtggagaaggaggaggctggcggcggcattagcgaggaggaggcggcacagtatgaccggcagatccgcctgtggggactggaggcccagaaacggctgcgggcctctcgggtgcttcttgtcggcttgaaaggacttggggctgaaattgccaagaatctcatcttggcaggagtgaaaggactgaccatgctggatcacgaacaggtaactccagaagatcccggagctcagttcttgattcgtactgggtctgttggccgaaatagggctgaagcctctttggagcgagctcagaatctcaaccccatggtggatgtgaaggtggacactgaggatatagagaagaaaccagagtcatttttcactcaattcgatgctgtgtgtctgacttgctgctccagggatgtcatagttaaagttgaccagatctgtcacaaaaatagcatcaagttctttacaggagatgtttttggctaccatggatacacatttgccaatctaggagagcatgagtttgtagaggagaaaactaaagttgccaaagttagccaaggagtagaagatgggcccgacaccaagagagcaaaacttgattcttctgagacaacgatggtcaaaaagaaggtggtcttctgccctgttaaagaagccctggaggtggactggagcagtgagaaagcaaaggctgctctgaagcgcacgacctccgactactttctccttcaagtgctcttaaagttccgtacagataaaggaagagatcccagttctgatacatatgaggaagattctgagttgttgctccagatacgaaatgatgtgcttgactcactgggtattagtcctgacctgcttcctgaggactttgtcaggtactgcttctccgagatggccccagtgtgtgcggtggttggagggattttggcacaggaaattgtgaaggccctgtctcagcgggaccctcctcacaacaacttcttcttcttcgatggcatgaaggggaatgggattgtggagtgccttggcccccaagtgaactcaagatttggcagccccagagatgccaactgcagcatgcccacctgtattccctgtccccttccttcatgaaggcatctccaggcaaggaaaactgaagtcattggcccgatacaaaacatttcctgcaacgaaggaggtggtgccgacgtgctgcttcccatcaccagcagctgctcgacaaggggcgcagggtggctgtctttgttccagcactgttcaggctgcctgtcatcccgggcctgccagctcccctgagtgatgagcacttccaagcacccctctgccctttctctgtccttatgctgtcccgggcctcgccaggccctctggggcattgtgggagatgcctgccaggaatgagcaagctctgttgctcgggagcctctttgtcaccttcttggacttattccccacctgataccttatagagaaaagtgtgaattcaggtggagagtaggcccaggcccccatgaggcaccagtggaagcacagctccaagttcagacaggtgcccttagagaggaaaaccatgacaggcaaatgccatttcctct

SEQ ID NO: 13498 - DNA, 730 bp, Homo sapiens
ttttttttgaggtttgcaattttattaagaaaacaaaaattcaacctatacaaaaaggaaaatgcttccgttccaggaggcggtactgcggtgggagcagcagccaagtccgcgggaaaccgagctgctcgggcctgccctgcaccccccgcgcccccggccaggctaggcgtcctgctgctggatgaaggggttggggatggcctccatgccgtcctgcgggcagattagcaccacggacgtgccccggcacaccacgaggcccagctgccgggtgtcctccgtgagcttgtactggtcgtcagggtctcgcatgtactcaatggtgccgtccagcacaaggttgaggagtgggtcgaagcccttcaggattccactggcttggagaaatcaccgggggagagaaaagagaaggcatgagatccgtcctgggcgcagggcccgccccaggcatggcccaggtatggggctaactgctccagggatggaggactgagggtaggagagggctcccgggagtggccgatgacagccgcctccagagtgatctccaccacaggcagcagaacgcgttctgcggggggccagatggcaaacacttctggccgtgtgggccacagggtgccggtcacagctgctggctcaggctgcctgggtggaggcagcttcggtaatgagtccatgtgtggctgaactgcggccggtcagctctactcacaggcactgaact

SEQ ID NO: 13499 - DNA, 1048 bp, Homo sapiens
gaacataggacattctaaagttccttgatttgatcattataagaagtgtgggactcaagcacaggaaactgaactcttttggtgtcattggatgtttcatttttgacactaattttttctggacaaactctttatgtgtttttcccaagaatagttatctacttcctggaggcaaaatccttggatttactaacatgatgatttaccttttcttcaccgttgtcgttacattgttagaaaagcaacaggaaaaaatccaattcatttgacctaaaaacaagcctcaagtttaaaaccaagctcacgtttttcttaagggaaaaattttctttcttaaacttacatctagcaacttggaaagcactttctctggggatcttcttttgtaactttgcagacaaataagtatgagtcactggggagagagtttggttattgaaatagatgttgcccatggaagaattctccttcctgggattgactcttaatcatcaggcatcattcctgggtttgcttctctacgaatctcaattccaacttctctgcagagtctgtacagtgattaagccatgcccagatggtctttggtgcacacagttatttaagaatccacttccacaggtggctgcccttgtaaggaagaatgcatccctaaatgtggccaccagagagttccagtgggcagatgtctgtggctgcccttctcatttaaggacatgagttcactggagtattactccaaaaagtctgtggttcatttccagtattgtgaatatttagtttatgtggccgtttctttgtttctttgaacagtgggattttcagtgaaaaagtaccctctttttcatttcctattgcagtggtcacagctaatagtgtctgaacatggttcaagaataagagattccatgtagcattttctttattattttcatttcccttatattatccatcattccttaaggacaattattcttaataatgcttatagaaaatgttctctaattaaacatgccaaaaggaaaaagtaagagaaagagggagcaag

SEQ ID NO: 13500 - DNA, 630 bp, Homo sapiens
ggaaggcgctccgggggtacccagagctcttagcgggccggcagcatgtgcggggcccaagtaaatggaaatgttttctaacatataaaaacctacagaagaagaaaataattttctggatcaaattagaagtctgtattatattgatgtctccagattcaaatatattagaaagcagccgtggagacaaccatcttcattttgggagaaataactaaagcccgcctcaagcattagaactacagacaaaccctgatgcgacctctccagattgtcccaagtcgattgatttcccagctatattgtggcctgaagcctccagcgtccacacgaaaccagatttgcctgaaaatggctcggccaagttcaagtatggcagattttcgaaagttttttgcaaaagcaaagcacatagtcatcatctcaggagctggtgttagtgcagaaagtggtgttccgaccttcagaggagctggaggttattggagaaaatggcaagcccaggacctggcgactcccctggcctttgcccacaaccccgtcccgggtggtgggaagttctaccactacccggcgggaggtcatggggagcaaggagccaacgccgggcaccgggccatagccgagtgt

SEQ ID NO: 13501 - DNA, 571 bp, Homo sapiens
gctgtgataagacagatgactcacccaggtggatggaggaggatgaccgagggcagttctcctcagagagggagttctggctcttcagcttttgtgtcccgccccaccctcagggttcaagcctggccattccaaagcagttaagtttccccaagcatgctttcaagttttgacaattgctgttacctttgcctgagataccccttcttggttacttgaacttttacttgtccttcaagccctccagtacctcctcctccaggaagccttcccaacccaccctctgagctttttattggagcactgatgatcctgggtcaataatgcctgatacacatttgtcttccccatgagactgagccccatgggaacaaaggctatgtctgattcattctgtgttcccagttcccagcacccagcacagggcttggcacaaagaaagggaggccccagggaggccagcggattaggcctgaacagggatcatccagcccatcctcccattcctcttccctggctgattctgtaactttccctaaagggaaaattggcttctgagataacctggctg

SEQ ID NO: 13502 - DNA, 1114 bp, Homo sapiens
  misc_feature (1)...(1114): n = a,t,c or g
gagtctgcccttgcgagctcagagtgtgcccgctgcgccgccgccgtcgtacctgccgccgccgccaccgccaccatgcccaacttcgccggcacctggaagatgcgcagcagcgagaatttcgacgagctgctgaaggcactgggtgtgaacgccatgctgaggaaagtggccgtagcggctgcgtccaagccgcacgtggagatccgccaggacggggatcagttctacatcaagacatccaccaccgtgcgcaccactgagatcaacttcaaggtcggagaaggctttgaggaggagaccgtggacggacgcaagtgcaggagtttagccacttgggagaatgagaacaagatccactgcacccaaactcttcttgaaggggacggccccaaaacctactggacccgtgagctggccaacgatgaacttatcctgacgtttggcgccgatgacgtggtctgcaccagaatttatgtccgagagtgaaggcagctggcttgctcctactttcaggaagggatgcaggctcccctgaggaatatgtcatagttctgagctgccagtggaccgcccttttcccctaccaatattaggtgatcccgttttccccatgacaatgttgtagtgtcccccacccccaccccccaggncaagcactggaaactgctgcctctgttgaggtcggtgctgcgttccgcctcgggggcctagcctgtcagactgccttggtcttccacctggacaccctgggggccagcatggacgctggcacaatcttgagagggtcagccttgctgagcctatgtctgcagcacttcttgggaggcctggtcaccacagtcaccttcactgggatgatgcgctgcagccagctggcccccagggccctgcaggccacacactacagccttctggccacgctggagctgctggggaagctgctgctgggcacttctgccggaggcctggctgatgggttggggccacatccctgcttcttgctcctgctcatcctctctgcctttcccgttctgtacctggacctagcacccagcacctttctctgagctgagtggctggagtggtcaataaagccacatgtgcctgtgaa

SEQ ID NO: 13503 - DNA, 435 bp, Homo sapiens
gcacagcagacacggacctatggactatggatggatgcggacgatggaaccgttcagtaaagaacccaaggttgagtgcaactggggttgcacttcagcttcatctccttggcagggacactaaagggctgtcttcagtgctttaatggttttgttttctaatgcaataaatcgccaggatttccaaattattgcttcaaccatcagtcataactctagagaaaaacttcatcttcatctcggaattccagcagccatccaggtataatggtgagagagcaagagagaggcatgaacacacagtcacctccactccccattctttcaacccaagggtcaacaggagactctctgctgaggtcaaaccctcagttccaagaggctgacttcagggttgccacagaagagggggctttccatcccaccctggcttcc

SEQ ID NO: 13504 - DNA, 1757 bp, Homo sapiens
aggagacagaggcctgggccaagcctctgagccaactgtggcagaaccgacctccaaactttgaggctgagaaggaattcaatgagaccatggcccaacaggcccctcactgcgctgtctgtatgatcttccagacttatcatcaggttgaatttggaggctttaatcagaactgtggaaatgcttcagatttagccccccagaagcagaggaccaagccattgattccagaaatgtgcttcacttcgactggctgcagcacggacatcaacctttctactccttatcttgaggaggatggcaccagcatactcgtttcctgcaagaagtgcagcgtccgggtccatgccagttgctatggggtcccccctgcaaaggcttctgaagactggatgtgttctcggtgttcagccaatgccctagaggaggactgctgtttatgctcattacgaggaggggccctgcagagagcaaatgatgacaggtgggtccacgtttcatgtgctgtggcaattctggaagcaaggtttgtcaacattgcagaaagaagtccggtggatgtgagcaaaatccccctgccccgcttcaaactgaaatgtatcttctgtaagaagcggaggaaaagaactgctggctgctgtgtgcagtgttctcacggccgctgcccaactgccttccatgtgagctgcgcccaggctgccggtgtgatgatgcagcctgacgactggccttttgtggtcttcattacctgctttcggcacaagattcctaatttggagcgtgccaagggggccttgcaaagcatcactgcaggccagaaagtcattagcaagcataagaacgggcgcttctaccagtgtgaagtggtcaggctcaccaccgagaccttctatgaagtcaactttgatgatggctccttcagcgacaatctttatcctgaggacatagtgagccaggactgtctccagtttggtcctcctgctgaaggggaagtggtccaagtgagatggacagacggccaagtctatggagccaagtttgtggcctcccaccctatccaaatgtaccaggtggagtttgaggatggctcacaacttgtggttaagagagatgatgtatacacactggatgaagagcttcccaagagagtcaaatctagactgtcagtagcctcagacatgcgcttcaatgagattttcacagagaaagaggttaagcaagaaaagaaacggcaacgagttatcaactcaagataccgggaagattatattgagcctgcactataccgggccatcatggagtaggtgcttccagggtccaagggattctcagccatccaggcaagagcactctgggttccacagcacagcagacatggaacgctgaagtctctgaaagtgaagttgtaaaaagaaaaggaatgaaataaccgacccatcatcttctcacccaccctcattgcattccgctgtagtgaaaggacgagccatttctgggcacgtggcagcagtcgctgatctcccagctgaggggctgagcactggaatgctgtggctgcactggccccagtccatagaggggtcaactatgctggctggactggctgccttgttcctggcctaggacttagcttcataactatcacctgcaccgacttaggctgaggtgctggtactttgccccaaccccttacttttgtatttatatgtgtgtgtgtgtgtgcgtgcgtgcgtgcgtgcgtgcgtgtatgtttggtc

SEQ ID NO: 13505 - DNA, 1244 bp, Homo sapiens
ggggcccgtcgtggctgcaacccacggtggtatgttagtgtttccaggcagttgtcagcagctgccgggtagtgtgtgtgtgcgacaaggatgagttcctggaggaaagggactggggacactttctcagaggttctcctgcctggaatcaagtgatgcgtgtccagaaggcaagagagggcggctccgcctggttaaagtttgggaacgggacggagccaactcctccttccaggactgtgggccccactcttttgcgctaacacttcccctccctcgggtcactgaggaaagagctgctctgtcccctccagtgccctgaaggtccctggcctccactggctgccatggcagggggcccttctgacaggggctgccccaagctgctgttcctcctctgaaccttcaccccaacacccagcccgtggcccctgcaagggggaccctgccagctgggaaacccaaaggcctgtccaaacgtgcgcaccaggaccgaggggagctccctcccaacacctgctaggaattgccaacttttaaatggatggggttttttatgggttgaacctctgttaatacttttgtacactctcactacagtttatatttttataggctattttctcaaggtgtttctagattccacatatctattttatataacaagttattatgttatgtgtgtgactcccttgtgtgtatctgtgccagcctcagcctccgagttgcttttccctctggccctgactctcactgactcaccgatgtgatgtgcaggcccacttcttaccccagatagcctcgggcgctgcctgtagtcatgctgacagctgtacagtagccgccaagactgctgacagctggagacggttctggtttcaactacggtatattgatatcggaagtattctagacagatcctcggttgggttttctagctacatgtttgtattgcacagatccccacctgccatcctatagtgttgtcttcctgtgtgttccggggcttctggcagctgggcctgccccggggaagcccttgcaggtgggaggccatacagagacccactgtgtgccactgagcgtcccactgctgctgggcaactggaggactgcagggggcgccaggtgactctctccttttatatcacagcagctcctgtgctgaccttcaagttacgttttggaactgtaatactaaaggaagaaataaactactaatttgtataataaaaaaaaaaaaa

SEQ ID NO: 13506 - DNA, 386 bp, Homo sapiens
  misc_feature (1)...(386): n = a,t,c or g
gtcgcggtgcagcggtgggcggcatgtctgtggccggtggggagattcgtggggacacggggggagaggacactgctgctcccggccggttcagcttcagcccggagcccacgctcgaggacatccgccgcctccatgctgagtttgctgcggaacgagactgggaacagttccatcagcctcggaatctcctcctggccttggttggggaagtgggggagctggcagaactctttcagtggaaaaccgatggggaacctggcccccaaggctggtcccagcccttcaanaggantttagggacgccttntacctggggggttntaancccgctttccgtgtggatctgccgctancaagtgctttccaaaatggacatcaaccgc

SEQ ID NO: 13507 - DNA, 1108 bp, Homo sapiens
tttttttttttttttttgggcaggtactattctttttatttgatagacaaggaagctgaagtgcagaacgattaatttgagtaatgtcatttagcttgcaagtgtcaaagatggcatttgaacccagacagcctggctccaccatctggactcttacagccttcaatctctaagagggggaaggaacttacatgacatcctactgggaatttgctagaaaccagatctctctgccctgcaggcaaaaggtacaacagggaaacacgagaatgggtctcagaggcacccctggtacccccgtcatcacctgctgagacagagagcctccctggccatccaggaataatctagaagttatcgcccaaaaccattttactgggagaacaaacaccaggaggctaccttctagaggctgctgggcctcagacctcaagaagtggaggcctcaggcccatgatctattctgaaaagactagaaaaaggctccagggccaggccactctctgctcttcagacaccaccctgagttgcaagtcctgtggccatctttctaggttgaggtctggcctgtggagtcacagggaatgtccgcaggccccacagcctggtcttcagagatggccccatggggccaattctgtatacttgcgggaagagctgcgggccagatgggctgggtagcgtcgccggttgatgtccattttggagagcactgctagcggcagatccacacggcagcgggctgctaatgccaccaggtagatgaggacgtcactaagctcctcttgaagggctgcccgttccctgggggaccagccttgggggccaggttccccatcggttttccactgaaagagttctgccagctcccccacttccccaaccaaggccaggaggagattccgaggctgatggaactgttcccagtctcgttccgcagcaaactcagcatggaggcggcggatgtcctcgagcgtgggctccgggctgaagctgaacccggccgggagcagcagtgtcctctccccccgtgtccccacgaatctccccaccggccacagacatgccgcccaccgctgcaccgcgacttcacggaaaacccacgagc

SEQ ID NO: 13508 - DNA, 877 bp, Homo sapiens
tctctccactgactgtgctgtcccccaggaggaccccagcctctgtccagagtctcagccacacccaagccaggctcccaccccttgcagtggtccgcctggcagcccagcagacaggctcccacccccatcggcagacctgtcccctccacctgcgccctgcaaaaagccagcccggagctgggcccaggcctgcccccctagcctgctcctgatggtgcctggggcggggtgggcaggtgggtggggctggaacctcctttcctgttttcctgagtgatcccgtccccactggggaagagaagagaaaggaggaagaagaggaggaggaggaggaggaagagaaaaacaagaaactgagttggaagagggccctggagcaatcaggacgtcaaaagtttgcattccgactagctataggaaatagtttttttctctttttattatttcaagttttcataaaaatccataattattgaaacccaagttacagagaaagttcgtaacttttttattgaattattgactctgccgcgtgtcggttcgtcggctttcaactccagtctgtcaatgcccctgtgtaggtggggtccccaggtctgggcttctgaggtcctggtagaaggagggcaggtggtgagggctggcggggggcagcaggggagcggaggcgggagggagaaagagaacgtgtgtagaagggtagggaggaggtgggaaggactggagagtgagcaggtggcggccaggccccttcccctgcccggccgcccgggggttccctgccccccgccccggcctcatatcatcttcatgttgaacttgcggggcgcgtcggcggactgattgcctgcgttccgacttttcggggcacata

SEQ ID NO: 13509 - DNA, 728 bp, Homo sapiens
gcgtcgacttttttttttttttaacagaaacatgttgcccttttatttgcgtttctcagaatactgtacaaagggagtaaaaatcctattcacactttgcttagaaagattttaaggtgaaagttccctatgatacacggggtgggagatgcagggtcaggagggagaaaacaggcccagtgacctctcctgttcccttggacccctggaagaggacacagggacccacaccttttcaaaattaacactgcccctagtccaactggggaggggagaaggctccagcccaggctcaggctcccggcctcactttcttctctgcaggctgagacagtgcctacaggccacgtcttgccccttcctctgtgctgcttgagcagggatcctacaggactctcaccacagaccccacatggggtggcctcacaacgccacatgtggctgccacatgagaggccctgcccagtgccagtctgtatgaggaagttaaggggtgagggcctgcagaggaccacagcacccatcgtttctgtcacagcttccccatacccccgcaggagtcagggccaagttggacctgtgcttacaatgactcacgggccttttccccacctgtctacccaacagccaacccaggagttaaacccacagcagcctccctcccctattactatcacattctgtgggtaaattaaccctccaagcctgcttccctccctgctcgtgcc

SEQ ID NO: 13510 - DNA, 666 bp, Homo sapiens
ggattatggggacctgccctttgctgacatccctaatgacagtccctttcaaattgtgaagaatccaaggtctgtgggaaaagcaagcgagcagctggctggcaaggtggcagaagtcaagaagaacggaagaatcagcctggtgctgggcggagaccacaggtcttgttgaataactgtgtctatgggaatctggcacaaaggaagtaaccaaggccataagaagagagaaaatttagaaatatagacagaaaagcattgacctatattttatatcaaattttctgcctttaaaaaaattttattaggttacttttattatagaaacagacttcgctcaatttggaagtcttacaatatctgtatttttgacctagttacagccggaaaatgtatgaaatatgaatggatttcatcctaaatattcatcacaagcttacatttctaaataagtatgtgaggcaattcatagcttatttgttcttaattgccgataatatatacaactcatataggtcaacaatttcaaagcatgtgtttttcattataaaagtaatgatcataacatttttgaaagcatcagacacacacacacaagaaaaaaaatgtggtaattgtacttctctagcaaccatttcaaccagaattgaaaatctggcacatttc

SEQ ID NO: 13511 - DNA, 1037 bp, Homo sapiens
cgtgcgcatgcgcggcaggcccttcgggacgagctggaggcagagcgtgagtacaaagtgatcggcctcggccgcacgtagtagcccccctactccccggccaagtcagggcctccctcttcccgcggagtcgcaaccacgggtagctcgtgtaggtaacggcaggtccaggcctccgcatgagcggagggccccccgcgcgaccttgaatggcccgggcgcgcgcggtcgtgtgggagttgtagtcctccgtccccgtccgcgcggactccgtttcccgtggtgccccgggcggcccgctttccggcgcagttagttacgagtcggcgcacgcggcctcggtccggttgactttgcggagccatggacagcggcttcggctccgatttcgggggctccggcagcgggaagctggacccagggctcataatggagcaggtgaaagtgcagatcgccgtggccaacgcgcaggagctgctgcagaggatgacggacaagtgtttccggaagtgtatagggaaacctgggggctccctggacaactccgagcagaagtgcatcgccatgtgcatggaccgctacatggacgcctggaacaccgtgtctcgcgcctacaactcgcggctgcagcgggaacgagccaacatgtgaccggcgagcgcgggccaccccaccctgttcatttccataaacgtgctttgagaggcggggtccgcatgtacgtactgcctgcccggggcttaggagggtggcaccggtgctgggacagacgggactgtgtcctcgccaccccccgccctgccccctgccagccagtgcagcttggatctcgggggtgtggggccctgtgccttcctgaagtgctggcagcccagtggcacctccttcaggcctttggggtattcccctagtgtgcccaagtcagcctcatattctgggcggacagcttgtctggacttcggagttgggggtggtcagacaccacaggagctgtcacgctcctgcggatgggcaaataaattggtggaggacggaaa

SEQ ID NO: 13512 - DNA, 870 bp, Homo sapiens
  misc_feature (1)...(870): n = a,t,c or g
cttggacttgcgagccaccatgcctggctgggttttttaaaaatagaatctcactgatagcctgcaagaaacagatgcagtgcctgcttccgtatcagtccaaggagccctcgtgtttgccacctttacctttgaacctccccctgcctccctgcctgtgtccgcttttgcagctcaatgcagccatgacaaggaaagaaaagacaaaggaaggccagagagccgcgcagttctctgcaggtgcagatgcaggcagtggaggtgggcctgagcaggcagaaggacaccaagcgccctatgttgcttgtcattcatgacgtggtcttggagcttctgactagttcagactgccacgccaaccccagaaaataccccacatgccagaaaagtgaagtcctaggtgtttccatctatgtttcaatctgtccatctaccaggcctcgcgataaaaacaaaacaaaaaaacgctgccaggttttagaagcagttctggtctcaaaaccatcaggatcctgccaccagggttcttttgaaatagtaccacatgtaaaagggaatttggctttcacttcatctaatcactgaattgtcaggctttgattgataattgtagaaataagtagccttctgttgtgggaataagttataatcagtattcatctctttgttttttgtcactcttttctctctaattgtgtcatttgtactgtttgaaaaatatttcttctataaaattaaactaacctgccttaagaacagaaaaaaaaaaaaaaaaaaaactcgngggggggcccggnaccaattcgcctatagtgngtcgtattacaattactggccgtcgtttaaaacgtcgtgactgggaaaccctgg

SEQ ID NO: 13513 - DNA, 553 bp, Homo sapiens
  misc_feature (1)...(553): n = a,t,c or g
aatcnatttgnacagttaacacngtagtgnccctgagtgacannnnnnnnnnnnnnnnnnnnnnnnnnnnnnnnnnnnnnnngntaagagatgcataggaaantataaaagtattaattttgggaactgataaatgtccatattaaaatgaaatattcacaatttatgttcnnnnnnnnnnnnnnnnnnnnnnnnnnnnnnnnnnnnnnnnnnnnnnnnnnngaactgataaatgtccatatcaaannnnnnnnnnnnnnnnnnnnnnnnnnnnnnnnnnnnnnnnnnnnnnnnnnnnnnnnnnnnnnnnnnnnnnnnnnnnnnnnncctgtctaaggtctgaacacagacaaaaaatgatcctggagacagatattgttgttaccttagagttgggttttcatgaatgtatttgatcaaaaccagctatactattaaataataacagaacaccctcttctaactagttacataatctttcctaaagactttctcctttgttttttcagtccacattcctgtaaatgtggtaggaataagaaaaccccagttc

SEQ ID NO: 13514 - DNA, 942 bp, Homo sapiens
  misc_feature (1)...(942): n = a,t,c or g
cggaaggncccgcggatcggggaattctgctggcgctgcagctgcagaatggtcggcggtggcgggaagcgcaggcccggcggggaggggccgcagtgtgaaaaaacaactgatgtgaagaaaagtaaattctgtgaagctgatgtctccagtgaccttcgaaaagaagtagaaaatcattataagctttctttacctgaagatttctatcacttctggaagttctgtgaagaacttgatcctgaaaagccatctgattcactttctgcaagccttggacttcaattagttggtccttatgatatccttgctggaaaacataaaacgaagaaaaaatcaacaggcctgaattttaaccttcactggaggttttactatgatcctcctgagttccagaccattattattggagataataaaactcagtaccacatggggtatttcagggattctcctgatgaatttcctgtatatgttggtataaatgaagcaaagaaaaattgtataattgttccaaatggagataatgtatttgctgcagtcaaattatttttgacgaaaaaacttaaagaaataacggataaaaagaaaatcaatctcttgaaaaacatagatgaaaaactcacagaagcagccagagaattggggtactcgcttgaacagagaaccgtgaagatgaaacagagagataagaaagttgtgacaaagacctttcatggtgcaggcttggttgttccagtagataaaaatgatgttgggtacccgagagctccctgaaacagatgctgacctcaagagaatttgcaagacaatagttgaggctgcaagtgatgaggagagactaaaagcttttgctcccattcaggaaatgatgacttttgtgcagtttgctaatgatgaatgtgattatggcatggggcttgaattgggaatggatctctt

SEQ ID NO: 13515 - DNA, 987 bp, Homo sapiens
tttttttttttttttttcaggctccagatgtgtttattaggctatttaaatagaaccatgtgaccatttctgtaggtaaaaggacaaagaagaattacaaacactttgggtctttcccaaattctctcccctttctctggtcaactccacccaccttcactctcaaaggaaaggcacagggggaaggaagtgagtgagggggctcagaagagtctgtgtggctcctaccaccccaaacatattctggtttcccgaagataagaggcaaggcttgctctgatctttcccagttctcagagtccagcaggccgctgtgctggacacatacatggatccaccaacatacatcagtccttctgtgttctctcctgcatggtagaggctggaagcctaagagctatattcctcagaatttcctgccagccaggatttgctttaaagtccactaatgagaggcacttctagaaaccatgattccttctccagcagtggcagacagtaggcatgaggttttgtagcatcttctgagcattttccagtacatcatctgcttttgtgctgctggaagctgagaccatcagcaggagttttctgtgcctcctgcaagttgctgatttctcacagttgctactggctttctccaatgttcacttctctatccctttcagtggtttataaatacttcattcctatagtagatcccttcctgcttatattaataatacctagaggggacatggttttcctgattcatccagctatcttaggaccttactccaaaataaggaaggcttctcttggggaggtaattgcctgtagaaagatttccaaacactgttcattatttgatgccaaaaaggtaaacagaagctgatgtgggtggtaggcaattctagaaaccatgattccttctccagcagtggcagacagtaggcatgaggttttgtagcatcttctgagcattttccagtacatcatctgcttttg

SEQ ID NO: 13516 - DNA, 804 bp, Homo sapiens
atgtccccctctatctggagtgggctccagttggcgtcttctccagcgcagccccacagaagaaaaagctccaagacacaccttcagaacccatggaaaaggacccagcagagccagaaacagtgcctgatggcgaaaccccagaagatgaaaatccaacagaggaaggagcagacaactcttcagcaaagatggaagaggaggaggaggaagaggaagaagaagaagagagcctcccaggatgtactctgtttattaagaatctcaattttgacacaacagaagagaagctgaaggaagtgttttcaaaagtggggacagtgaagagctgctccatctccaagaagaagaacaaagcaggagtgctcctttccatggggtttggatttgtggaatacaggaagccagagcaagcccagaaagctctcaagcagctccagggtcacgtcgtggacggccacaagctggaagtgaggatctcggaacgagccactaagccagccgtgacattggctcggaagaaacaagttcccagaaagcagaccacctccaagatcctggtgcggaacatccccttccaggcccacagccgggagatccgagagctcttcagcacctttggggagttgaagacggtccgcctgccaaatgaagatgactgggacaggcacacacagaggcttcggctttgtggacttcctcaccaagcaggatgcgaagagagccttcaacgccctgtgtcacagcacccacttgtacgggcggaggctggtgctggagtgggccgactccgaggtgaccccc

SEQ ID NO: 13517 - DNA, 686 bp, Homo sapiens
acccataataacgatgcaagtgcctataagattatggtaaaaaataaaataagtatatgaaaagggcacgcatgaagaattgaaagaattcatccttggtaaattaggctaggtcttgtggcaaaggcacccaaagctaatgaagaagagtaaatgatatttgactgttacatatgtatataaggacgaaaaagaaaatataccaataaacatcttcatcaatatggaattaaatacatttacctattttagagatattttaagtatgctagtatcaacataatgagaatagtattttactgtctatttttaatagaaaaacatgtatatatacatatctatatatatttaaggagcaccccttcccccatttgagtatgattactcaatgggaagcagtaatacaaatggaaaaatcttccctcctatattgaggaaagaagataaaataagattaagccatgtttagcactgagtattttaacacatgggttttttgtttgtttgtttgttttgtaataccatacttcagattacaatacccaaaattctaaggtcctaatgttaatgatagtatctcaatgtccattttcggtttgtttcaacatgattttctccttttgcctctgtgtcacacgtagtctttcccgctgggaaggtgcaggtttttggatagggccttggtg

SEQ ID NO: 13518 - DNA, 1037 bp, Homo sapiens
aaaataggtaaatgtatttaattccatattgatgaagatgtttattggtatattttctttttcgtctatatatacatatgtaacagtcaaatatcatttactcttcttcattagctttgggtgcctttgccacaagacctagcctaatttaccaaggatgaattctttcaattcttcatgcgtgcccttttcatatacttattttattttttaccataatcttatagcacttgcatcgttattaagcccttatttgttttgtgtttcattggtctctatctcctgaatctaacacatttcatagcctacattttagtttctaaagccaagaagaatttattacaaatcagaactttggaggcaaatctttctgcatgaccaaagtgataaattcctgttgaccttcccacacaatccctgtactctgacccatagcactcttgtttgctttgaaaatatttgtccaattgagtagctgcatgctgttcccccaggtgttgtaacacaactttattgattgaatttttaagctacttattcatagttttatatccccctaaactacctttttgttccccattccttaattgtattgttttcccaagtgtaattatcatgcgttttatatcttcctaataaggtgtggtctgtttgtctgaacaaagtgctagactttctggagtgataatctggtgacaaatattctctctgtagctgtaagcaagtcacttaatctttctacctcttttttctatctgccaaattgagataatgatacttaaccagttagaagaggtagtgtgaatattaattagtttatattactctcattctttgaacatgaactatgcctatgtagtgtctttatttgctcagctggctgaggacactgaagaagtcactgaacaaaacctacacacgtaccttcatgtgattcactgccttcctctctctaccagtctatttccactgaacaaaacctacacacattaccttcatgtggtcaatgccttcctctcccacagtcatttcactga

SEQ ID NO: 13519 - DNA, 1208 bp, Homo sapiens
ctttatttttcaaatctatacattttcaggaatttatgtattctggctaaaagttggacttctcagtattgtgtttagttctttgaaaacataaaagcctgcaatttctcgacaaaacaacacaagattttttaaagatggaatcagaaactacgtggtgtggaggctgttgatgtttctggtgtcaagttctcagaagttgctgccaccaactctttaagaaggcgacaggatcagtccttctctcgggttctggcccccaaggtcagagcaagcatcttcctgacagcattttgtcatctaaagtccagtgacatggttccccgtgggtggcccgtggcagcccgtggcatggcgtggctcagctgtctgttgaagttgttgcaaggaaaagaggaaacatctcgggcctagttcaaacctttgcctcaaagccatcccccaccagactgcttagcgtctgagatccgcgtgaaaagtcctctgcccacgagagcagggagttggggccacgcagaaatggcctcaaggggactctgctccacgtggggccaggcgtgtgactgacgctgtccgacgaaggcggccacggacggacgccagcacacgaagtcacgtgcaagtgcctttgattcgttccttctttctaaagacgacagtctttgttgttagcactgaattattgaaaatgtcaaccagattctagaaactgcggtcatccagttcttcctgacaccggatgggtgcttgggaaccgtttgagccttatagatcatttacattcaatttttttaactcagcaagtgagaacttacaagagggtttttttttattttttttttctcttaatgaacacattttctaaatgaattttttttgtagttactgtatatgtaccaagaaagatataacgttagggtttggttgtttttgtttttgtattttttttcttttgaaagggtttgttaatttttctaattttaccaaagtttgcagcctatacctcaataaaacagggatattttaaatcacatacctgcagacaaactggagcaatgttatttttaaagggtttttttcacctccttattcttagattattaatgtattagggaagaatgagacaattttgtgtaggctttttctaaagtccagtactttgtccagattttagattctcagaataaatgtttttcacaaaaaaaaaa

SEQ ID NO: 13520 - DNA, 6000 bp, Homo sapiens
  misc_feature (1)...(6000): n = a,t,c or g
ctaagatggcgacgcctttggcggtaaattcggctgctagtctatggggtccttacaaagacatttggcataaagtgggaaatgctctttggagaagacaacctgaagctgttcaccttcttgataagattttgaagaaacacaaacctgacttcatctcattgttcaaaaatccgccaaaaaatgttcaacagcatgagaaggttcagaaagccagtacagagggagtcgccattcagggtcaacagggaactcgacttcttcctgaacagctcattaaagaagcctttattctcagtgacctttttgatattggagaattggcagctgttgagcttcttcttgctggagagcatcaacagccacattttcctggccttaccagaggattagtagctgttcttctgtactgggatggaaagcgatgcattgcgaattccttgaaagccttgatacagtctagacggggaaagacatggaccctagaactcagtccagagctggcttccatgacaacacgctttacagatgagctgatggagcaaggattgacttataaagttcttacgctggtgtcacagattgatgtgaataatgagtttgagaaactacagcgagagagaggtttgggcagtgaaaaacatcgcaaagaggtttctgatctcattaaggagtgcaggcagtctcttgcagaaagcctttttgcctgggcttgccagtcacctttaggcaaagaagacactctcctcctcattggacatttggaaagagtgacagttgaggctaatggctcactggatgcagtgaatctggctcttcttatggcgcttctatactgttttgatatcagttttatagagcaaagcacagaggaacgagatgatatgattcatcaacttccactgttgacagaaaaacagtacattgcaacaattcactctcgtcttcaggactcacagctttggaaactgcctgggctccaagccactgttagacttgcctgggcgctggcattgaggggaatatcccagctacctgatgtgacagctctggcagaattcacagaggcagatgaagcaatggcagaactcgcaattgctgacaacgttttcctgttcctcatggaatctgtagtggtatcagaatacttttatcaggaagaattttatattcgcagagtccataatctcatcacagatttccttgcacttatgccaatgaaggtgaaacagctgaggaatcgggcagatgaagatgctcgaatgattcacatgagtatgcagatgggtaatgaaccccccatttcacttagaagggacctggaacacttaatgcttttgattggcgagctatataaaaagaacccttttcatctggagcttgctctagaatattggtgtcccacagagcctcttcagactccgactatcatgggctcttatctaggggtggctcatcagcggccccctcaacgccaggttgtcttgtcaaagtttgttaggcaaatgggtgacctgttgcctccaactatttatattccttatttgaagatgctccagggattggccaatgggcctcagtgtgcccactactgtttcagcctgctcaaagtcaatggtagtagtcatgttgaaaatattcagggagcaggtggcagtcctgtttcctgggaacatttctttcactccttgatgctttaccacgaacaccttcggaaggatcttccaagtgcagatagtgtccagtaccgtcaccttccttcccgtggcatcacccagaaggagcaagatggattgattgcttttttgcagctcacgtctaccatcattacttggagtgaaaatgctcgcttggccctctgtgaacaccctcagtggacccctgttgtggtgattctgggactcctccaatgcagtattccccctgtcctaaaagctgagctactgaagacactcgcagcttttggaaaatctcctgaaattgctgcttccctctggcagtcattggaatacactcagatactgcagaccgtgaggattccaagccaaaggcaagctattggtattgaggttgaactaaatgaaatagaatcccggtgtgaagaatacccattgactcgggccttttgccagcttattagtactctggtggagagctcatttccttctaatttgggtgctggactgcggccccctggctttgacccttatttgcagttccttagagactctgtgtttctacgattccgtacaagagcttaccggagagcagctgaaaagtgggaagttgctgaggtggttttggaggtgttttataaattgctcagagattatgagcctcagcttgaagattttgtagaccagtttgtggaactacaaggagaagaaatcatagcctataagccacctggatttagtctgatgtatcatctgctgaatgagtcaccaatgttggagcttgctctcagtttactggaagaaggagttaagcagcttgacacctatgccccctttcctgggaaaaaacacctggagaaagcagtacagcattgccttgcacttctcaatcttactctgcaaaaggaaaatctttttatggaccttctaagagagagtcaactggctctaatagtctgtcctttagaacagcttttgcagggaattaatcccagaactaagaaggcagataatgtggtaaacattgccagatacctatatcatggcaatactaatccagaattggcttttgaaagtgccaagatcctctgttgtatctcttgcaactctaatattcagataaagttggttggagatttcacacatgaccagagtataagtcagaaactaatggctggatttgtggagtgtttggattgtgaagatgcagaagaatttgtacgtctggaagagggatcagaacttgaaaagaaattagttgcaattcgtcatgaaacaagaatccacatcttgaatcttctcattacctctctggaatgcaatccacccaatcttgctctctacctgttgggctttgaattgaaaaaacctgtcagtactacaaacctacaagatccaggagtgttaggttgccctcggacatgccttcacgccattctaaacatcttggagaaaggaacggaagggagaacaggcccagtggcggtgcgagaatctcctcagctggctgagctatgttaccaggtcatatatcagttatgtgcatgctctgatacatctggtcctactatgaggtacttgagaaccagccaggatttcttattttcccagttgcagtatctaccattttctaacaaagaatatgaaatatctatgctgaaccagatgtcatggcttatgaaaactgcctcaatagagctaagggtaacctctctgaatcgtcagcggtcacatacccagaggctcctacacctcttactggatgacatgccagtgaaaccatactcagatggtgaaggaggaatagaagatgaaaacaggtctgtttctgggttccttcactttgacactgctacaaaagtacgtcgaaaaattctaaatattcttgactcgattgacttcagtcaggagatccctgagcctttgcagttggatttttttgatcgggcccagattgaacaagttattgctaactgtgaacacaagaatttacggggacagacagtctgcaatgtcaagcttcttcatagggttcttgtagctgaagtaaatgcccttcagggtatggcagccataggacagagacctctactaatggaggaaatcagcactgtacttcagtatgtggtaggaagaaataaattgctgcagtgtcttcatgcaaaacgtcatgctctggagtcgtggaggcaactagtagaaattatactgacagcttgtccccaggacctcattcaggcagaggatcgacaactgattattcgtgatattttacaagatgtgcatgataagatactggatgatgaagctgcgcaagagttaatgcctgtggtcgccggggcagtgttcacactgactgctcacctaagccaggccgtcctcactgaacagaagcaaacatcagtcttgggaccagcagaggcccattacgcttttatgcttgatagttgcttcacctcacctcctcctgaagagaacccattagtgggttttgcttctattggagattcttcactttacatcatattgaagaaactgttagacttcattttgaagacaggtggtggattccaacgagtgaggactcacttgtatggctctctgctttattacttacagattgcccagagacctgatgaaccagacaccttagaagcagccaagaaaaccatgtgggaaaggctgacagcccctgaagatgtatttagcaaattacagcgagaaaacatagccattattgaaagttatggcgccgccctcatggaagtggtctgtcgagatgcttgtgatggtcatgagattggaaggatgctggccctggctctacttgatagaattgtctccgtggataaacagcagcagtggcttttgtatctttctaacagtggctacttgaaggtcctcgtagacagcttggtagaagatgaccgtactttgcagagcttactcaccccacagcctccccttttaaaagcactttatacttatgaatctaaaatggcatttctcacaagagtggcaaagatacagcagggtgcattagagctgctaagatcaggggtgattgtgagactagctcaatgccaagtctatgacatgcgcccagaaacggacccgcagagcatgtttggcatgagagaccctccaatgttcatccctaccccagtggatcgctaccgccagattctcctcccagctctccagctgtgccaggtcatcctcacatctagtatggcccagcacttgcaggcagcagggcaggtattgcagtttcttatttcacattctgataccatacaagcaattctgcgctgtcaggatgttagtgctgggtctttgcaggaattggctctgctgacaggaattataagtaaagcagcacttcctggaatattaagtgaacttgacgttgatgtaaatgaagggtctctaatggagctacagggacatattggaagattccagcgccagtgcttaggactactaagtcgctttggtggctctgacagactgcgtcagtttaaatttcaagacgataatgtggagggagataaagtaagcaagaaagatgagattgaactgggctatgcagcagatttgtgccaatgtaatggaatattgccagtcactcatgttacagaggttcccctaccttccagcatgctgtgtgtctcttcactcctagcctttcagaaacagttaatagagatggaccgcggcaagatacccaagctccagtggttccatactggcgcctgcctggtttaggcattatcatctacctgctgaaacagagtgctaatgatttcttcagctattatgacagtcatcgacagagtgtcagcaagctacaaaatgtagagcagcttcccccagatgagataaaagagttgtgtcagtctgtgatgcctgctggtgttgataaaatctccactgctcagaaatatgttctagcaagacggcgcttggtgaaggtgatcaacaatcgagctaaactgctttccctttgttcttttatcatagagacctgcctatttattctttggcgccatctggagtactacttgttacattgcatgcccacggattctcaagattccttatttgcctcgagaaccttgtttaaaagcagaagactgccaagattccttcgcctcagaaaccaatctagattttagaagtgggccnggcctatagtgagccaacatgatttagaccagcttcagggctgatgccaatcaacgcttttgggagaatcactacaaaaagaaacttctggacattgaaggattatattcaaaagttcgatctcgatataggtttc

SEQ ID NO: 13521 - DNA, 470 bp, Homo sapiens
ggctggaagaggctcgggtccggctctgggcgtggttcccttcccgtgtctgagcctggaagaggctcgggtccggctctgggcgtggttcccgtgtctgagcctggaagaggctcgggtccgggtccagctccgagcgtggttcccgtgtttgaacctggaagaggctccaaccaggcgtattgtgttttgactgcagctggatctcggcttgactgttgagatctgccaagcatccgctaagctatcatttctgagaaaggtcaaggcttagaggaaggcatgtcgggagttggcgcatcaagggttggaaaggggccccaggggtacagcatgtgggtgcctgttcctttgtgggacttgtgtgtgtgtggctggtggggcggggggtggatactggttcttttttttcccattatcctgagagccttaaggtactcagtgtgttggtgagactcagccctgtcatc

SEQ ID NO: 13522 - DNA, 1341 bp, Homo sapiens
gaaaaagaaaactgcagataaccctatacattaatactggtatctcgaggtgactcttctgaccaagggtggttaagtgacacatagaacttttctaagagaagacagacaagttgacaggcatgccttgtactcagctgtgttcatgtggtggtctgtggaaagaaaagaagactcatttggaaatgaagctgtccctttccaagcagtctctggtgcttttcttctctcaaaatggatccgataaatatttgaatagagcagattgtagaatgtcgtgctgtcaccagaaagctgctgttttgggttctgcattgagccaaatatgtagaggacctaccaagcccactgagggactaggttttcatgtctctagtcatacctagaatgttctgagccgtctgagggccttcatgccggcagcagctagccaaagccagaaagcaagtctaacaggatctaagatgaccatcaggagaaggagtttgagactgtgtatgcaacccccaatagacccccttttactctgatctggagaatgtatctggcttcatattttcaagtcacatgtctctcagacccctggattcagaacccaaggccacaaatcataggcatgaagcactttcttaagactgacctaacgctggattatttcccgtccaatgcctgcatgctgcttgaattgctccacccacacctccatgaccaagggcgccagagtggctggcaactgggggcgtgggccgctctctgcttttcctgtctgactctgacaagtcctccctcactgaatgtagaatcgttgccaagtttctgagaagtgtcgattccctgttaacatggatatcagttctgcctcacatttcccacttgaggttgaggcgtactggagacaacacctcagaccatctgaaccccatcagtggacgaaaatggggctgttaatatactctaaaagccatactaaaaatgctctgagggaactggctaagaatagtgggcctggtgattgtctatcacgcaaggctttgttttgtactgttcagaaatctgtcacctttctgcctgcccttgtttcctgaatgaaatgcttctggggttatttatgaaaggagtgatcctggggcaggcaggaggcagtgggcttcatggctccttgaagttattactgatcttgaccttctctttggctacctttagacaaagaatacgccaatcaatacttggggctctaagttttacaattgatatttatttgtatcatctctttgtctaggaatgtaaaagtgattctaaactaagatgtgtaataaaaatcaatcagatttattgtaccta

SEQ ID NO: 13523 - DNA, 1490 bp, Homo sapiens
gtgttaccaagaagtgttttatttttcttgcagtagctttgttaattgcacaaaatcatgttttgtttttgccatttaaacattatcacacaatcctattctgaaagacaaatgttcattaaaaacaaagcaaaaataaaaattcacaaccttaattacctagatttgtcatttaaaggtttaaagaaaaaagggaggggctttcttacaagctttttcacaagtgtcacattttctccttaaaagggaaggatttcaaaagaaaggtgaaatagcttaaacagaaatattcataaaaaggaactttacagaattgtcaacaatattaagacaaaattgactaaccggtttcattaccgcatcttcccccgcccccacccccagtgtgttccgccaggactagaacaggctttgtgttcagacagaaatgcttcaaaatcccagtgaaatgaactgtgctaaaaacccgacaggcatcttccctgccctccccccactcgtcttctgcaatcctctaacccagtttctaatctctgaaaggggccaaagctgtgaggggggaaggaccccgccctagtgtggccaccgctatatataattacatattgcatcgtaaatgctggccttccttctgcaaattatgattttggaaaatccaacccatgcagagggataaaaaactgacatcccttgggtaacttttttttttgcaacattccaagccccccccggtcccctatccaaggacaaatgtagggcctctaggatgtcccagacccacctcggagggccagtcagttcaggtaggtcaggcccagttctcttccctcccgacagaccccgggcccgggaagcaccgaagaccatgatgctggctggagtgaagacactcgtttccgtatcaagagctgagcctaagaaatgctcatcgttggtcaggctgggtctgggccaaagggacagacagaaagaaatactgtctccacgggaggaagagggagaggagggaggatggagagcggtgggcatgcaggggacttggcagggcagggttggagaaggtgggaccactgggaggggaccgaggtaagagtggctcttcagagcagggtgaagagtctgtggcctaacggaaacagaaaggagcgcccccaacccccactcctcttggctcatcactagtggccctgaggactccctcccaagggatggaatgcaaatccaaatactaaaacagcctagggaggagcgagcgcccgctgtggcagtggcatctggggcatggcttcgaggcggtgagggccgggcctccatgctcacctgcaggccggctgcttgctgcactccctggaaagccagggccccatcttctcgggactctgccagtctcttttcagttcacaaaggcgtctatggagcgctgggtgcacactggacgcttagacgtgaacatctttctcagctcatcacctgaggttggagggccccaa

SEQ ID NO: 13524 - DNA, 896 bp, Homo sapiens
ggcacgtcgagcgggggagcggcgctgcctgtggagatccgcggaggccgacaggattcgttggctgccgtccccgctgctgtgcattgggttaaaaacgacaaccaacatcagccatgaaagatccaagtcgcagcagtactagcccaagcatcatcaatgaagatgtgattattaacggtcattctcatgaagatgacaatccatttgcagagtacatgtggatggaaaatgaagaagaattcaacagacaaatagaagaggagttatgggaagaagaatttattgaacgctgtttccaagaaatgctggaagaggaagaagagcatgaatggtttattccagctcgagatctcccacaaactatggaccaaatccaagaccagtttaatgaccttgttatcagtgatggctcttctctggaagatcttgtggtaaaaagttatttttcatctttttaaaacctagtgcatcttttgcataagtggaaaagcccggctcccatctatttaagaattctacatctctttccccttcagaaattgtgctgcttctggccgggattacaggcgtgaaccaccgcacctggccagtactacatccattttattgaatgattttgaatgacttaaagttcaactatgaaaaagctttcttttcacatgtactttttgattaggtattatcaacttatgaaacttgaagatgtgaagtgacaggttttgcatgtgatgagtgttttctgttaaaaaataaatattgaaatattaacccattaaatacatttttatggtaacctatgttttacagtggagttttaaaaatgctaggtctttctttcattttattgataactacaaatgaataaaaagcatttattctcaaaaaaaaaaaaa

SEQ ID NO: 13525 - DNA, 692 bp, Homo sapiens
cctgatggaattaaatctgcgagctacaagtattcctgaagaagccaataatctcattgaagaatgtgaacaagctgaacgacttggagcagtggatgaatctctgagtgaggaaacacagaaggctgttcttcagtggaccaagcatgatgattcttcagataacttctgtgaagctgatgacattcagtcccctgaagctgaatatgtagatttgcttcttaatcctgagcgctacactggttacaagggaccagatgcttggaaaatatggaatgtcatctacgaagaaaactgttttaagccacagacaattaaaagacctttaaatcctttggcttctggtcaagggacaagtgaagagaacactttttacagttggctagaaggtctctgtgtagaaaaaagagcattctacagacttatatctggcctacatgcaagcattaatgtgcatttgagtgcaagatatcttttacaagagacctggttagaaaagaaatgggggacacaacattacagaatttcaacagcgatttgatggaattttgactgaaggagaaggtccaagaaggcttaagaacttgtattttcccctacttaatagaactaagggctttatccaaagtgttaccattcttcgagcgcccagattttcaactctttactggaaataaaattcaggatgagga

SEQ ID NO: 13526 - DNA, 584 bp, Homo sapiens
  misc_feature (1)...(584): n = a,t,c or g
attcctccttcccatagtaatcaaagcaaagaagctttcattgactgggcaagatatgatgattcacgggatcacttttgtgaacttgatggtaatacaataaactattataattaaattattttaactttaacccttttataagacattttaatcaatcgaaaatataaactgaattatagcttcagtactggattttgctatgtagaccttattattcgtaatggcatttattgagagcctgtgttccaggccctatgttaagtgccttaaatacattatttctggtctttgcagctaccttcataagtgtgtattatttcatatctgagaaaactgagtctgaaaaagactaaataacttggcccaagatcacacaatangcaagaggctgaggcaggatttgatcccatatccgaatccaaaacctgtattctttccattatgatataccatctgccatggaccttcaattgaagccacttagttataggtctgtgaacattttgtaaaaatatttacactggaatttgctagagggcctaacaactcatgtaaagatgcttcnaatgctgggggaggac

SEQ ID NO: 13527 - DNA, 676 bp, Homo sapiens
gaaaggtgtcatcatcactaggaataacaccctttgtaactacatatagaactgttacaatggtagcagaaaatcctattgatttcatctcacccatttcagataccttcagtgaaattaagggtagtgtgatgtcccatgtaataaaacaggcttagaacatcaattcctctgctgccatttatgtgcttttattcccccttcaaaaattttttattggatatatatatttttcagtattcagactctgaaatctgtcattacaatcaagtgcttgtcacagctgaaagatttctggtggcttaaagtttactagcagtaaatttatgatatggtacagttctttgtacagaaaggcaccattatgttagaataaatttccagaacttagtgggaagaatcaggttttaaccttgtgtgtctgttacttctgagtgcatttctataatataaatgttgatttgcgtcaacattataaaagagcacttctgtggctcatttaaaagaaaaaaaaggttaagtcttttaaattttggccttgtttccaaatcctgtcttccatgttgtttttctgcacttcctgaccactcttataaaaagctcacaaacctttgaagaaactggagtaggctgttatttcattaaggtttacaaattaaatgcttgatttttaatg

SEQ ID NO: 13528 - DNA, 1258 bp, Homo sapiens
tttgagcgtgtaaaatatgttttattgttctttaaaagggttcagggtttggttttaaatcaggctgcacacctttcaaatcaatctgacatctctctatgtcaaactggcttcagctagcaatacttcattaaatcgaaaagaaaaaaattgctttaaggaaaaaaaatccagttttaagaacaattaacattagtctttaaaataaaaggagggctaatgtttcatgttgctttatacatccttctcctcaatacagaaccaggaatgtaattttcctaactcaggcaggcactggatactgatggacactgcgcgtggcacacacacacacacacattacacacacaccacacacacacacacaccccctcccccccaaacaacaaaattcagagtatgtcaaaggaaaaaggtttgttattgtattgatcaaaacccagtggaatcaacaccatctatcttagcttagcaggtatgctgttttgatcttgagtctatattaatggaatctattgttgcattctgaaataaagaattttggatataccattatgttttaaagtcctagaaacaatttcgaaaagcattattttgttttgttttctgggatgggagaggagagaatctacagatttgcgtttagttaaaaatcaaaactccagcataggaaataggcagttcacatagccggtcaacatgtgaggtatcatcagtgtgagacaaggtcccggtctgttcctattggccctagctgacgctaacaaaatgggaggcttaatggcctctgcacagcaaattccagcaggacaagatgactttaagcccgtattcagagccctagaagcaggggcactactgagtacgtaatatttagaggtgaaaatagtgcaagagccccctgatggtgcccctctacctgctttgtccatgcagcctgatcataactgccttccacaaaggagcagaaaaacagcttttctagatcagtacactaaacccagccaagaatctgcaaaaatgctactacaccgcttcacaagcaacacagtcccttcactactcattgggttgcacgatgtctctcttctaccctgttatggcctgtggacacatactcactaggcatcattgttggttttaaaccagggattttttttttttaatctcaaaaaacctagtaataacaaggcaatcagtggttaaactgaactttacatatagggggcagtttggaaaacacataccacaagcattt

SEQ ID NO: 13529 - DNA, 1321 bp, Homo sapiens
tttgagtgtgagagttttttattcaatttgtgaaggacagttttagaacaaaatgttagtaacactcttagaacactggtttgttcatttgacattttatctgcaccaatttttattacaaaaatcaaaaaagtaaaaattcattacaatatttgcagagtataaccactagttgcctagacaaaagctaatttctacaaaatcaaaaacttaatgcagttttattaagagagtcaaaattctctccagttaactggatatacatagtggtatatatcttaaagcagaaaaccccaaaaaacaaaaaaaaggaaaaaagaaaatacatgtcaacagtcagttaaatattttgacctgacagtttctacaaatagtgattttcactacatataaaggaatctgttacatgtggtaaaacttccagagaccaagtaggaagtgtggaataaaaacaataaatccaaagcgcagccccaggctgggcctgttttccatgaagcccaaggcagtgatcttcatcattaaggagggaccactgtgtccacaactaaaaccttcaaccacatggtgatctgcaaagcttcattgaaaaagacaaacattctcttcttcacacaaatcactgcagaaatctttgtaaggctgtaccttgcatagggaaatagctgtgttccgtcaaattctacagaaaagagtggaagcaagctttttaaaatgatgcccatgtgcaaagagataaattaccaggcacctgatttaccaccccaatttatcttgatcatataatcttttaacaaaaagaaaaatggcaatatctggtgacagtattaaaaagacaatgttgagattggcatcagaaaaactccaaaagtgcaccttataaaaaggacacctcactgtagaaacatctatgcacttagtaagccctactcatgcacaaacaagcagttgctgggaacttgtcgaagtttactttttcagaaagttgaagtatataaaaaaagtacaagttgtgacattcgttcaagttgctgctacatgggtattctgagctggctaccaggaaggactcctgcgtttccgagagccaggtcagcgtctctaggagccgtggtgcaggtgcatggtgcccagcacggcactgtcgtaccgctcctgcaccttcacggacttggaatgctcgaccacactgttcagttctgggatgctttcagcagtgtccccaaacccgtggtagtgtccatagtacaggttatccccaatgtcttccacccaggaaggcctactggctatgcagctacttggactcccgttcaggtgc

SEQ ID NO: 13530 - DNA, 448 bp, Homo sapiens
  misc_feature (1)...(448): n = a,t,c or g
ttcttttanntncgcttctttcccanaaaacnactccntggcnccgaanctgganctcnacgcttcaaattcggcacntagnaantggaattntnggtnttgcctgagnatccgnncttanattgannggttgnncantngctgcntttctntctnnntttcgnncatgcngtgctaggtgtcctttcctgtnctatggttgtggataaacncccnatcttctccaccctcacagngntctgcaaaatattgtgtgtggctgtggtctcaaggtttatgtctccccagcaattcatatttggaaacctattccccaatggtnttgttattatgatggtggggacttagggaatgaatggtattatgaggtggggacttngggaagtgattangtcntganatggnnctcttatgaatggggattaacaacctcctnnctganactcca

SEQ ID NO: 13531 - DNA, 433 bp, Homo sapiens
  misc_feature (1)...(433): n = a,t,c or g
gccaaaatcacagaacagaatttcatagcccaggctgccgtgttgtttgactcagaaggcccttctacttcaagttttgaatccacaaagaattaaaaactggtaacaccacaggctttctgaccatccattcgttgggttttgcatttgacccaaccctctgcctacctgaggagctttctttggaaaccaggatggaaaccttactttnctttcntccattcattggctttntgtgtgcaagntgactgggaaagggatttgnatacctnngtgtnngcccttnttgnctgccnananaanggtcgttggangngntccttggnctannnnnnnnnnnnnnnnnnnnnnnnnnnnnnnnnnnnnnnnngtntttggtntncngnggccccagtncctggaaangccccgttnnttannananncngaaggg

SEQ ID NO: 13532 - DNA, 838 bp, Homo sapiens
gcgccgacatggagctgttcctcgcgggccgccgggtgcgtggtcaccggggcaggcaaaggtatagggcgcggcacggtccaggcgctgcacgcgacgggcgcgcgggtggtggctgtgagccggactcaggcggatcttgacagccttgtccgcgagtgcccggggatagaacccgtgtgcgtggacctgggtgactgggaggccaccgagcgggcgctggggtagcgtggggccccgtggacctgctggtgaacaacgccgctgtcgccctgctgcagcccttcctggaggtcaccaaggaggcctttgacagatcctttgaggtgaacctgcgtgcggtcatccaggtgtcacagattgtggccaggggcttaatagcccggggagtcccaggggccatcgtgaatgtctccagccagtgctcccagcgggcagtaactaaccatagcgtctactgctccaccaagggtgccctggacatgcttgaccaaggtgatggccctagagctcgggccccacaagatccgagtgaatgcagtaaaccccacagtggtgatgacgtccatgggccaggccacctggagtgacccccacaaggccaagactatgctgaaccgaatcccacttggcaagtttgctgaggtagagcacgtggtgaacgccatcctctttctgctgagtgaccgaagtggcatgaccacgggttccactttgccggtggaagggggcttctgggcctgctgagctccctccacacacctcaagccccatgccgtgctcatcctacccccaatccctccaataaacctgattctgctgcccaaaaaaaaaaaaa

SEQ ID NO: 13533 - DNA, 1661 bp, Homo sapiens
gagattatcccagttcaccccctcttgtgaatctagagacaactggtggtcatagcgtgcgattcaatccaaacctttataatgatggcaaggtttgtttaagcatcttaaacacgtggcatggaagaccagaagagaagtggaatcctcagacctcaagctttttgcaagtgttggtgtctgtccagtcccttatattagtagctgagccttattttaatgaaccgggatatgaacggtctagaggcactcccagtggcacacagagttctcgagaatatgatggaaacattcgacaagcaacagttaagtggggcaatgctagaacaaatcagaaacccttcaccatgttttaaagaggtaatacacaaacatttttacttgaaaagagttgagataatggcccaatgtgaggagtggattgcggatatccagcagtacagcagtgataagcgggtaggcaggactatgtctcaccatgcagcagctctcaagcgtcacactgctcagctccgcgaagagttgctgaaacttccctgccctgaaggcttggatcctgacactgacgatgccccagaggtgtgcagagccacaacaggtgctgaggagactctaatgcatgatcaggttaaacccagcagcagcaaagaactccccagtgacttccagttatgagctgtcattgatgttggactttcatagacacaaaggcttcgaagcacaagccaaatatgtcaatatttgtatgtaagaaactaattatgtaataggtaatgaaactgaaactatactatgcccttaaggagatccagtttaattcaaggtgatcttttatttacctgtacaggagtgtaaacttttttgtgcttttatttttcaattgtgagaaccactgattggtatgttcaacaaatttgtgtatacaaagaaatggataaatcactgctatataagggaaactaccttaggaaagaatgtttactgaatgtttattttattttattttttttttactatagagtgaggggttgttaacaaagaatatatattggtcattcttacaactactatttaaagtcagcaacttttcactgaatttgatagattttatgtttggccatatcttcatgctcacatttgatttctgaagacctcctacatacacttcaataaaagttaaatggacatactccctcttttttgatttactggtacatttttaaaataataaatctgccataaaatgcattatatctggagacttgcacttgtatggatgaatttattacattcaacatatttaattttatgccttctaattctaagatgcagaaaaaaataaatgaacatgattttattctatgccaacatttgggcctctgaatgtatctgttatttgaatttaagtatttgaaaaggaatggtcaatttgaaagtcattctaaactgattttttttttctaaagggctccttttttcctggactatgtggttttatgactaaagtcacatgtatgtattaaacattgaggctctgtagaggagagaggatgtacctctctggtgctgttacagtacattctgtacctgccatacaggctcattttcatgcaaattcttcctagagccaaataaataaagacttaggtgaaaaaaaaaaa

SEQ ID NO: 13534 - DNA, 2045 bp, Homo sapiens
tttttttttttttctgtttttgaaaaatttattttatactcttagaagctaagaactttgccacacatgaaccaaatttagaattaaggttcttccctagtgtatctacttccttttgaaattttataaacaagattttatacacaagaggtagcagaggaaaattccagtctgcttgttccaagctcagaaggtaactgcacacacctcggatgttaggcagggtaaggtggggcaggacagggtaagtctgatgatacggcactctagttcctaaaactgactgtagttgtcagtgaccgtgtgaggactccaggagaagtcgtggtgagatgcccgctgggatgcttgttttctttcccaggatgccttcaacgggcagaatcggccatcttaagatcggcctcactaagggagcttcttgagaacacacagcattattgagttaattgtgcaattcctgctctgtttgcagaccattttgaaaggtttataaaaacatcttcatccaaaaaattggcagtaaaaatgacaactcttccaaggtaagcctgtcataactgtcactgttgtactacattaaaaaaagtcatcagcaggttcattgactgtagctgtcagcaatcaagtggttaccagcaaagtgaaaacgatggtcattgcagcaacaatataagcaacatgatctgaagcgtataatatacacggtggacgatcctgatgaacctttacagtgaggacggcaggtgctaggggtgcggaaggcgttgtttccataggaaataaggggactagaagtggcaatttcactcctgattttgggctcctgagagtgcagtcgccagcgatgatatcccagtgtggatcatcgcccagcatttcaaggtcatgtcccacacaatctcttggtgaggatgtgggcggagagaaggtgagaatagggtaggggaaacagtaggacaggaagtattcacgtactcaaaaccaatggtagaacatcacatttcaaactgcaagaccattggaaccgtctgaagtttgccactcgcctctgtccgtttctctaagggtacagttctgctcttaagtgctggcccttccatcttctcagtgtgtttgacaaaaggccactgcccaacctccagcaagtcacagaataacaatgaagtctgacagcacagaaaccctcactgccagagaatgaaaagactgggccatggcgagagcacagtaatgagatgccatctgcctggccacatgcccacacaatgccacagcagccagacaggcacttcagggcctgtgcgcctctgtgacttggcaaatctgacagtgaaaacctggcacttcctaaggctcccctagttctgtgcatggtgagatgaaaataaggcaggacctgtaactaaaggcaaaacagggcccgaaaatgtgagcaattcaaaatacaaaatgtacaaaatatatatgaaatatgtgggtgtaaaccctctccccccacacccataaaagggagctggtataaatgagtgaatggtgctatactttggaaatacgacctaaatggatggttattcaattgctttatatttatttctgggaaaataaatcttaaaccttgactgacttttcagtgttaattagtcatgttgaggagaaacaaattctcaaattccttctctgcattacaataactatgaaactcacaagcagtgtgtaccaactcaaatagttaacttcatatacaaccaataccaagggtttcagtaattatgttttaagcaaaagcaaacgattgcagatcacatgatttaagactacagtttattcaatatgtctccaagcattaaaaagataattctgtgaagttaaactcagtaaaattatatcttaaagtgcttttattttgctgtttttaaaatctgtttggggaacaactcataacttctttaagtaattgatgtcaaataatgcaccctgtacttctggagaacacagcattttcaaaattgctcttttcaatctaattatatcagaaaaatatc

SEQ ID NO: 13535 - DNA, 1069 bp, Homo sapiens
tttttattttttttttttttagagtttgaaaggctctttaatagcaagcgaatggtaattacatggtcggatgaggtcctcactctcaggggagggaggagggagcagaggtggacatggtgcagtataggatttacactgtttgaagcatctaacgaagggcaacagtttttggcaacccaattcacagttttgtaatttacaagagatttctttgaaaggaaataggaaggcaaagaaagcacacataccctaccggcaacacttcttgcctaaaaaaaaaaaaaaacaacaaccaaaaaacaaaaacccaacaactattccttgcttttgcttcttgtgtagatgactaaattttgctctcatgctcaaattaagactggatcacggatagtgaagatctgccctagcattgaagatttacttcctcctcttcagagctgacatttgtactgcgcactactcttatctttatctgcctaggtgtcagaaggggcttagtaaaaaatgaaacttgagaaacaaaacaaaacagaaaaacagggaaaggcagtttacaaagaacagactgtcagctttctgtctggtatcaaacaacttgaatacagctctaagtaaattaaaacatttatttttatgtggcctggcatctacttttaatcgcttgtgcctattcagccttatagtgctttaaatggggtttctaacatgaaatgctcatgggtactatattttcgtaatccagatttaaataaaaatataaaagacaacatattatgttaaataatatgttgtcttttatatttgcccagtgagcagaagctatagatattttaccatggacacccattgccatggacaccacaggctaccagcattctggcaggtttcagaattactctctataaaatctaaaagacttcagcttcttgtgtcatacctgttatcactaaactgggagaagtgactgggtctttatgaaaaaggatcagtttttaattcaaagaaattttaggcttctccgaagactgggtgatcagcaatggcatctctttggagctaacaccca

SEQ ID NO: 13536 - DNA, 334 bp, Homo sapiens
  misc_feature (1)...(334): n = a,t,c or g
ggcaggcacaaggtgtgtaacnnnnnnnnnnnnnnnnnnnnnnnnnnnnnnnnnnnnnnnnnnnnnnnnnnnnnnnnnnnnnnnnnnnnnntattgtggtttttatagaatcttgaaatatgtttatcattatatcaaaatccactagattgagaagcacatactaagcaatatgacacattggtttttttcccctcaatataattgtcttcctttgcaatcatatgtattttatcttatgcattaaaaaatattagactgagaaggaatccacaagcttcattagattgccaaaatggtatagggcacaaaaaaagttaaatccctgggctct

SEQ ID NO: 13537 - DNA, 983 bp, Homo sapiens
tttttttttttttcaattattaaatgtttggcactttattaaattaattaaataagctccaaaattaattacatacaaatcaaaggaataagaaacaataaatagtttattcagcaaacacctctctgcagcagccggcagctctgaggccgaggctggcgtcctgtggcagagggcctgtggattgccatgctcgctcccaggggtggctcaacagggacacaggtctactccttccacatcgggtttccggaacaacaactgaactctcattcattaccatcccattcattaccatttttttttacatacacgaaacacaccgcaatatatagactaataagccaagagctttattgatgcagcaggcactttacaatgagcccaagagtgtccaccttctctgggaagacaggatgtctgtacaaactcttgggtttttttccacttcaaaaacacaagctctcccgtttaccacagcccttggatctgcacctgcccaaaccatccctcccccagtgcacacaggtgcatctgaccaacaccagccgccacgctggtagaccgtcaaaatgtcagttctgcagtactcggagacaaaggcatagactatcagatcctaaacaggatttaggaaacagacgattttcccctccaccttgaaaataaaatacatttcagcagatacatgtcctgaaatagtttacttgggagttcctaggaagatggtccattgtcaatcccttcttcaccagcctgggcatccagaattcttctcaaggtaacatgagtctttttattttttttaaacagtctttcttgctgtaagaactcttataatggagcctagtcctcctactgctaaggccttttcgtgccactggagtaacactgcgctgctattttctgtgggcttctcaaagcctttataaatgtacttcattaacaagtcaacgccgtttctgtccagtgactgcacagcc

SEQ ID NO: 13538 - DNA, 836 bp, Homo sapiens
  misc_feature (1)...(836): n = a,t,c or g
tttttttttttttttactttataagcagctagggaattctttatttagtaatgtcctaacataaaagttcacataactgcttctgtcaaaccatgatactgagctttgtgacaacccagaaataactaagagaaggcaaacataataccttagagatcaagaaacatttacacagttcaactgtttaaaaatagctcaacattcagccagtgagtagagtgtgaatgccagcatacacagtatacaggtccttcagggaggcaagagacctttcgactggtctgcaggtgcctccaaatgctggtcctgtggaacttctttctgagtctcgttttcttccaacgcagtctgtggtctgacactcaagtgttcggatttccgggaaacgtgactacctccgtgttgagtccttgcttcgcctactcgtcttaaaatgacaccttctgccaataaagccttccctgtttccacaaataacttctcttcatctgtttctccaagtttctgtagctcagtgtacttctccacaaaccgttgacaggtagacttgaagtttggattgaatagatcaaaagctctttgaccagacccatacactgaataaaacttcgctctaatccgatcctcgtggtaccagatgtcttggatgggagctttggctttgccatatcgcactcgaggcctttggaagacgggctccctcagcgggggaaaggcgtcatatacgtcaaaccacaggggcttctccttcagcaccccggcccgaaccaggtcccgagtccgagagaagatgcttcctacggtttccagccnggctgcctgccatgatctgcgcc

SEQ ID NO: 13539 - DNA, 2090 bp, Homo sapiens
agacgcaagatggcggctgtggtgctggcggcgacgcggttgctgcggggctcgggttcttggggctgttcgcggctgaggtttggacctcctgcgtacagacggtttagtagtggtggtgcctatcccaacatccccctctcttctcccttacctggagtacccaagcctgtttttgctacagttgatggacaggaaaagtttgaaaccaaagtaaccacattggataatgggcttcgcgtggcatctcagaataagtttggacagttttgtacagtaggaattcttatcaattcaggatcgagatatgaagcgaaataccttagtggaattgctcactttttggaaaaattggcattttcgtctactgctcgatttgacagcaaagatgaaattctgcttacgttggaaaagcatgggggtatctgtgactgccagacatcaagagacaccaccatgtatgctgtgtctgctgatagcaaaggcttggacacggtggttgccttactggctgatgtggttctgcagccccggctaacagatgaagaagtcgagatgacgcggatggcggtccagtttgagctggaggacctgaacctgcggcctgacccagagccacttctcaccgagatgattcatgaagcggcttacagggagaacacagttggcctccaccgtttctgccccacagaaaacgtagcaaagatcaaccgagaggtgctgcattcctacctgaggaactactacactcccgaccgcatggtgctggccggcgtgggcgtggagcacgagcatctggtggactgtgcccggaagtacctcctgggggtccagccggcctgggggagcgcagaggccgtggatattgacagatctgtggcccagtacactggggggattgccaagctagaaagagacatgtccaatgtcagcctgggcccgacccccatccccgagctcacgcacatcatggttggactggagagctgctccttcctggaggaggacttcatcccctttgcagtgttgaacatgatgatgggcggaggtggctccttctcggctggtgggcccggcaagggcatgttctccaggctctacctcaacgtgctcaacaggcaccactggatgtataacgcgacctcctaccaccacagctacgaggacactggcctcctttgcatccatgccagcgccgacccaagacaggttcgagaaatggtagaaatcatcacaaaggagtttattttaatgggcggaaccgtggacacggtggagctggaacgagccaagacgcagctgacatcaatgctcatgatgaacctggaatccagggcctgtgatcttcgaggatgtggggaggcaggtgctggccactcgctccagaaagctgccgcacgagctgtgcacggttcatccgcaacgtgaagccggaagatgtgaagagagtcgcttctaagatgctccgagggaagccggcagtggccgccctgggtgacctgactgacctgcccacgtatgagcacatccagaccgccctgtcgagtaaggacgggcgcctgcccaggacgtaccggctcttccggtagaaccgctccccggcctgacagacccagggagctgcagctggagcccgttcccgtgcgtgttagtttggacacgaatttagtctaaaaagctgtctggttgtataaacggtgcaaacaatgtcgccacagcacccacgcggtttgcattcttttggaactcaatgtgccgatcagtggagtcagtatcgagcctgaccaccgcaagccaggaagcaggtgaagtgcccagcgctggagtgcagcgtgccacgaggagggcggtcggtgcttccctcctcgggctgtgggcacatggggccccgcaggttccttggaggagccctgagctgggaggcagcaaaggctgacctatcagagcctcccggaggccaccgtgctgggtaccaggactcacctctgacaagcaggagaaggtaagggcccggtcagctccaaggagcgctgctccacgcgcgtgcacacagcttccctggtaataaagagctggcatctttcttaaaa

SEQ ID NO: 13540 - DNA, 479 bp, Homo sapiens
aattcggcacgagcaagaattaccataaggcaatgtttctgaagattactatataggcagatataccagaaaataaccaagtagtggcagtggggatcaggcagaagaactggtaaaagaagccaccataaatagatttgttcgatgaaagatgaaaactggaagaaaggagaacaaagacagtcttcaccattttgcaggaatctacactctgcctatgtgaacacatttcttttgtaaagaaagaatttgattgcatttaatggcagattttcagaatagtcaggaattcttgtcatttccattttaaaatatatattaaaaaaatcagttcgagtagacacgagctaagagtgaatgtgaagataacagaatttctgtgtggaagaggattacaagcagcaatttacctggaagtgataccttaggggcaatcttgaagatacactttcctgaaaaaatgatttgtgacggattgg

SEQ ID NO: 13541 - DNA, 438 bp, Homo sapiens
gaaaaaaggtgaagatgcagcggccggattcctatgtccgagacatggagattaagggtgcctcccaccatgtctatgctgaccagccacacatcttcaatgctgtggtggaggagatctgcgactcagttgattgagctgctctctgaagaggaagaggagaaagccagagagtcactcttacctccctgtctgcttactcacccactctgtcctttcctcaccaactaacatgtgccagccaggcagagtcttgtgctgttcccagaacaggacgacagtgaaaagaacactcttgaccctacactgaaggctgaaggcagaagccacaagaggccttgagtgccacccccagggaagaacataaagggttgcacaatgccacccatccactccttgccaaggtgttacccagatggtgggggatgttaagggatt

SEQ ID NO: 13542 - DNA, 2672 bp, Homo sapiens
  misc_feature (1)...(2672): n = a,t,c or g
cttggatccgcgggacaagaaaattcatgcgagggagacgtggtgggcggtccttcctgtgacacgacccttgagtgacagttctatttgattgcctccggtactgtgaggaaaggacacgactctatggtgaggactgatggacatacattatctgagaaaagaaactaccaggtgacaaacagcatgtttggtgcttcaagaaagaagtttgtagagggggtcgacagtgactaccatgacgaaaacatgtactacagccaagtcttctatgtttccacatcggtcagaaaaagatatgctggcatcaccatctacatcaggtcagctgtctcagtttggggcaagtttatacgggcaacaaagtgcactaggccttccaatgagggggatgagcaacaatacccctcagttaaatcgcagcttatcacaaggcactcagttaccgagccacgtcacgccaacaacaggggtaccaacaatgtcacttcacacgcctccatctccaagcaggggtattttgcctatgaatcctaggaatatgatgaaccactcccaggttggtcagggcattggaattcctagcaggacaaataggcatgagcagttcagggttaggtagccccaacagaagctcgccaagcataatatgtatgccaaagcagcagccttctcgacagccttttactgtgaacagtatgtctggatttggaatgaacaggaatcaggcatttggaatgaataactccttatcaagtaacatttttaatggaacagacggaagtgaaaatgtgacaggattggacctttcagatttcccagcattagcagaccgaaacaggagggaaggaagtggtaacccaactccattaataaaccccttggctggaagagctccttatgttggaatggtaacaaaaccagcaaatgaacaatcccaggacttctcaatacacaatgaagatttttccagcattaccaggctccagctataaagatccaacatcaagtaatgatgacagtaaatctaatttgaatacatctggccaagacaacttcaagtacagatgggacccaaattccctgggagattaaaagttcaacaacacaaaataataaccagcagaaaaaagggatcccaggtgttacctgatggtcgggttactaacattcctcaagggatggtgacggaccaattggatgattggctgttacatgtatcagggcagcagagacagacccaggaatggtacatcttgcattaggaagtgacttaacaacattggccctcaatctgaactctcctgaaaatctctaccccaaatttgcgtcaccctgggcatcttcaccttgtcgacctcaagacatagacttccatgttccatctgagtacttaacgaacattcacattagggataagttatttttctttttcagctggctgcaataaaacttggccgatatggtgaagaccttctcttctatctctattacatgaatggaggagacgtattacaacttttagctgcagtggagctttttaaccgtgattggagataccacaaagaagaacgagtatggattaccagggcaccaggcatggagccaacaatgaaaaccaatacctatgagaggggaacatattacttctttgactgtcttaactggaggaaagtagctaaggagttccatctggaatatgacaaattagaagaacggcctcacctgccatccaccttcaactacaaccctgctcagcaagccttctnnnnnnnnnnnnnnnnnnnnnnnnnnncttcccttttcttggggtatggctgtctcagcacaatactcaacataactgcagaactgatgtggctcaggcaccctggttttaattccttgaggatctggcaattggcttacgcaaaaggtcaccatttgaggtcctgccttactaattatgtgctgcccaacaactaaatttgtaatttgtttttctctagtttgagcagggtctgaattttttcatttatttccttttttgccagcagacagacttgagtctgtaaagacaagcaaatacactgacagaagtttaccatagtttctaaaatgtaaaaaagaaaacccccaaaagactcaagaaaattagaccacaaattttgcattgttcattgtagcactattggtaataaaataacaaatgtttgtgcatttttatgtgaagatccttctcgtatttcatttggaaagatgagcaagaggtctgcttccttcattttacttccccttctgtttttgaaaggcagtttcgccaagcttaatgcaagaatatctgactgtttagaagaaagatattgccacaatctctggatggttttccagggttgtgttattactgagcttcatctttccagaatgagcaaaacactgtccagtctttgttacgattttgtaataaatgtgtacattttttttaaatttttggacatcacatgaataaaggtatgtatgtacgaatgtgtatatattatatatatgacatctattttggaaaatgtttgccctgctgtacctcatttttaggaggtgtgcatggatgcaatatatgaaaatgggacattctggaactgctggtcaggggactttgtcgccctgtgcactaaaagggccagattttcagcagc

SEQ ID NO: 13543 - DNA, 921 bp, Homo sapiens
tattcggcacaggcgactgcctcagcaatcatgcaaagaccttgcctggcccggtggaagcgctgaaaaaccgaccgcctgtaggtcctggaactatacagataggtaaagagttccaagttcgtccagcccatgtgcaaagtcaacagtatttgccttaagatttcatatatatatatttttttgcattgactgctgagagctcctgtttactaagcaagcttttgtgtttattatcctcatttttactgaacattgttagttttggggtaatggaaacccactttttcattgtaatgactttgggggcttttgttagtaagggtgggtggggtgatgggttgcagacggaggtcaggtcttcctctttcctgagactggatctgttcaaacagcaaacgcccacagatggcccagaggtggtggtagtcagggtgtgtgggtgtttttagggttctttagtgttgtttctttcacccaggggtggtggtcccagccagtttggtgctgacggtgagaggaaattagaatctgtttgcaaattgtccaacccaccccctcaacatgaggggcttccattttctgtgttttgtaagggaactgtttccttcatgccgccatgttcctgatattagttctgatttctttttaacaaatgttatcatgattaagaaaatttccagcactttaatggccaattaactgagaatgtaagaaaattgatgctgtacaaggcaaataaagctgtttattaaccttgtacagcatcaattttcttacattttctgtgttttgtaagggaactgtttccttcatgccgccatgttcctgatattagttctgatttcttttttaacaaatgttatcatgattaagaaaatttccagcacttttaatggccaattaacctgagaatggtta

SEQ ID NO: 13544 - DNA, 429 bp, Homo sapiens
  misc_feature (1)...(429): n = a,t,c or g
ctggggtgtaagacttcaagccaagcgtatgtatcaattctagtctgccagcatgtggaaagcttgtcttagagggcttttctttgtatgtgtagcttgctagtttgttttctacatttgaaaatgtttagtttagaataagcgcattatccaattatagaggtacaattttccaaacttccagaaactcatcaaatgaacagacaatgtcaaaactactgtgtctgataccaaaatgcttcagtatttgtaatttttcaagtcagaagctgatgttcctggtaaaagtttttacagttattctataatatcttctttgaatgctaagcatgagcgatatttttaaaaattgtgagtaagctttgcaggtactgtgaactattgactnttggaggaagnnatttgtttaagaatnagatatgattaaac

SEQ ID NO: 13545 - DNA, 906 bp, Homo sapiens
tttttttttgcatatattaattcagtttaatcatatcaattcttaaacaaaaaacttcctccaagagacaatagttcacagtaactgcaaagcttactcacaatttttaaaaatatcgctcatgcttagcattcaaagaagatattatagaataactgtaaaaacttttaccaggaacatcagcttctgacttgaaaaattacaaatactgaagcattttggtatcagacacagtagttttgacattgtctgttcatttgatgagtttctggaagtttggaaaattgtacctctataattggataatgcgcttattctaaactaaacattttcaaatgtagaaaacaaactagcaagctacacatacaaagaaaagccctctaagacaagctttccacatgttgaatgccagcatgtgcaccgtgaatcctggaagactagaattgatacatacgcttggcttgaagtcttacaccccaggctcaacgatggagtttgcattcacctacacattaatgacaaactctgggttagtataagagaagccagcaaattcattttggtccaagttcatgatgaagagtttatcagtgggggtcagttccacaggctgtctggtgaactctttgtcgaagttggaggtgtctctcttgtctctctgccaaatggaaagtaaacacattaacacagcgtaagaagaaagacacaggaccaagatacgccagtcattgggtggctgataccatctcatgagcagagtcagaaagagccctgtgctgaaaatttttagcagctgcactccacgcactggctttcatttcacattgtatgttggcttggggatagaaatgtggtggaaattttctaagaaaagaagtaagtcattgaatgtcagttaagaattgc

SEQ ID NO: 13546 - DNA, 2831 bp, Homo sapiens
cttttgcttcagtcagattaaaaagagcagggcctaacattgagtgatagcacctgctttgataaataggttttctcactcttctttttttccttcttttatccctcactccctcccctaaaccctgcttcagcacaatggactaattctagcattctgatcataaggccctccattttcctaatgtgtttcaaggaatctttttaggaaaaatatccagattattcatccactttttttagtatctactaacaactcctttttttctctagagagttatgaaggaacaggttgtccttgtctggagtcaagctaaacacatgatttgttttatcagcagctggagcagaagttgaaaatgtctttctgtgagacagtaatttgctactgaagctttatggcttgtttgcactgattactccaggatccaaaaacttggtgaaagtcactgaaacactcaaggcaaattactttacagccctgagtgtctgtcaccatagtttgcataatgaatatgaatcccattggtgtgtgatgtaggaaatcctgtagttgtattttcttgaactgaaatatttgactcaaaataattaagactcattgtcatttttcatcttggcattattgtggacaagttgacatattaaatctctttgctttctggtaagcttagcttttaaaatgcattttcccttgtcctgtctttaactagatatacatgcttatatttatagtgggtttcacagactataaaattgaatgtatgaaatttttatttatatcagtgcttttaataatgaagatatttttggagtaatggtgctgtcttgtagcgagttattaatcatagtaagatttttttctcttcatttgctttttttgtttcatattaacaattttttttttacacggacacaaccctctgacagtctttccaaatattaaaatcatttgaatatgtatgctgtgatctgaacactggctcaagccatgcaagcagtcttcatacagtttgcattataaaatcccattaaattctccaagaaaaaataagttgaagaattttatttcctgaccatgcatcccctggatttctgagtttcagttcagattgtagatgacaatataagctgccttccgaaattgtcaacatctgaatgttaagtccattttccccatggaagaagcccgtagttccatgaagtatggattaccatttgtatttttcactaacagtaaatgtatttttcttattaattgtttgccttagggaatgatgaattacattttttgttccttcttaccataaacatctgcattcctcaggctcaggccttccttgtatgttgtttctttataaatggttgagctgctgatgcaggtattgccaagctaacagtacaaatcattttaaagaggaagctggcgcgtatggcagccgaggagcacactctgcaggacactggacaagacagtaaatattcaacttttaatgctgattaaaggagtataggtaaagaatacgtaggtatacataattggtgagacaaatattcactttatttatattttatatattatttttttaatttggtaaatactatccagttttgtagttgtccttgttgatttgtgtgatattaaagtattagtaataattgccaggaaactatcattagggagggtttagttggttgctgtttggactgggagggatgatttaaatttagtgctagaaaccaattttagtgactgcacagtttatcatttgtcagacagaaggtagctataaagctaccctgtaagtcatatcaaaaaagttcagaggaagattagtaaatatttatcaataaaaataaacattttgtttttctaatatcttaacatatcctcccctttaggaggaagaacgtgcaaaacgtgaggagctagagcgaatactggaagagaataaccgaaaaattgcagaagcacaagccaaactggccgaagaacagttgagaattgttgaagaacaaagaaagattcatgaggaaaggatgaaactagaacaagaacgacaacgtcaacaaaaagaagaacaaaaaattatcctgggcaaggggaagtccaggccaaaactgtccttctcattaaaaacccaggattaaattgcaaactctgaactttttacaaagaaaaatggaaaaactttgtatggtagcttcatgttgaagtggttttttgtttttgtttttgtttttttaatttgtaaaatctggaaagttagcttgttctaataggggctatgctctgcaattcccttttttttttttttttccttccactaagtcaaatccttatcagatcattgttgtattctaaggagtgacgtatttttcacctgtttggattctatattagtggtctgaggaagagcagatcacattgtaaaactatggatggtctgataaggcttttactgaccccactgacttcagagttatactctgtttgctacatcataatgctggttttgctgactttttgtttttttatatatttataaaaaaagaaaaagttggtgattgcattgggaaattcccagggtattactggacctatgtggtgtattgttaaaccagtgtccttgtgatactgttgctcttgatgttcctgatacaggtaaggaaacagttggtcaactctgatacaaagtatatatacagttcagtattgtctctgttcattttgtttttatttcattgacaaaatcaaaccagcattccccattgtgtaaataaatgattttgctgaataaagtaaagtcttaaattcaaaaaaaaaaaaaa

SEQ ID NO: 13547 - DNA, 3481 bp, Homo sapiens
ggcggacaaaacgccaggcggatctcagaaggccagttcaaagacgagatcatcagatgttcattcatctggatcttcagatgcacatatggatgcatctggaccctcagatagtgatatgccaagtcggacacgacctaagagcccaagaaaacataattataggaatgaaagtgcccgtgaaagcctttgtgattctcctcatcagaatctctcaagacctcttctggaaaacaaacttaaagcattcagtattggaaaaatgagtacagctaagcgaactttaagtaaaaaggaacaggaagaattaaagaaaaaggaggatgaaaaggcagctgctgagatttatgaggagtttcttgctgcttttgaaggaagtgatggtaataaagtgaaaacatttgtgcgagggggtgttgttaatgcagctaaagaagaacatgaaacagatgaaaaaagaggtaaaatctataagccatcttcaagatttgcagatcaaaaaaatcctccaaatcagtcttccaatgaaagaccaccatctcttcttgtgatagaaaccaaaaaacctccacttaaaaaaggagagaaagaaaagaaaaaaagcaatttggaactcttcaaagaagaattaaagcaaattcaagaggaacgtgatgagagacataaaacaaaaggcagattaagtcgatttgaacctcctcagtcagattctgatggtcagcgtcgttctatggacgcgccttcaagaagaaatagatcatctggtgttcttgatgattacgcacctggctcacatgatgtaggagatccaagcactactaatttataccttggaaacattaatccacagatgaatgaagaaatgctgtgccaagaatttggaagatttggaccgttagccagtgtgaaaatcatgtggcctagaactgatgaagaaagagccagagagagaaattgcggctttgtggcctttatgaatagaagagatgctgaaagagctttaaaaaatttgaatggaaaaatgattatgtcttttgaaatgaagttaggttggggtaaagctgtacctattcctccacatccaatatacattccgccttctatgatggaacatacgcttcccccacctccatccggactgccttttaatgcgcagcctagagagcggttaaaaaaccctaatgctcctatgttaccgccacctaaaaacaaagaggattttgagaagactctgtcgcaagccatagtcaaagtggttatcccaacagaaaggaatttgctcgccctgatacatcgaatgatagagtttgttgtacgtgaagggccaatgtttgaagctatgattatgaacagagaaatcaacaatcctatgttcaggttcttatttgaaaaccagacaccagcccatgtttactataggtggaagctttattctattctgcagggagattctccaactaaatggcggacggaagattttcgtatgttcaaaaatggatctttttggaggccaccaccattaaatccgtacttgcatggaatgtcagaagagcaagaaacagaagcttttgtagaggaacctagtaaaaagggagcacttaaggaagaacagagggataaattggaagaaatcttgcggggattaactccaaggaaaaatgatattggagatgcaatggttttctgtcttaataatgctgaagctgctgaagaaatagtggattgcattactgagtcgttgtccatcttaaagacaccccttcctaaaaagattgccagattatatttggtttctgatgttttgtacaactccttcagccaaagttgctaatgcttcatattatagaaaattttttgaaacaaagttatgtcagatattttcagacctcaatgccacctatcgtacaattcaaggccatttacaatctgaaaactttaagcaacgggtaatgacttgcttcagagcatgggaagattgggcaatttatccagaaccatttttgatcaaactacaaaatattttcttaggacttgtaaatattattgaagaaaaggaaacagaggatgttccagatgaccttgatggtgcccccatcgaggaagagcttgatggtgcacctctggaagatgtagatggaattcctattgatgctactcccatcgatgatcttgatggagtccctataaaaagtcttgatgatgatcttgatggagtgcctttggatgcaactgaagactcaaaaaagaatgagcctatatttaaagttgccccatcaaaatgggaagctgtggatgaatctgaattggaagcacaggctgttacaacttctaaatgggaattatttgaccagcatgaagaatcagaagaagaagaaaatcaaaatcaagaagaagaaagtgaagatgaagaagatactcaaagttccaaatctgaagaacatcatttgtactctaatccaatcaaagaagaaatgactgagtctaagttctctaagtactctgaaatgagtgaggaaaaacgagccaaacttcgtgaaattgagctcaaagttatgaagtttcaggatgaattggaatctgggaaaagacctaaaaaaccaggccagagttttcaggagcaagtagaacactacagagataaacttcttcaacgagagaaagagaaagagttagaaagagaacgagaaagagacaagaaagataaagaaaaattggaatctcgctccaaagacaagaaggaaaaagatgagtgtactccgacaaggaaggaaaggaagaggcgacacagtacatcccccagcccatctcgcagtagcagtggtagacgagtgaaatccccatcaccaaaatcggagcgatcagagcgttcagaaagatctcataaagagagctcacggtccaggtcatctcacaaagattctcctagagatgttagcaaaaaagccaaaagatcaccatctggttcaaggacacctaaaaggtctaggcgatcacggtctagatctcctaaaaaatcaggaaagaagtccagatcccagtccagatctccacacaggtctcattaaaagtcaaagaaaaacaaaccactgacgtaaatttttaagatgctgtcacttattggaaatgcgatttgttttgtgcctgaacggtctgttttttaaaaaaacaaaaaatcaaatgaaagagcattcctggggttttttgtttgtttgtgtatgcatgtgtaaactcatgagcaactgcatctgtagatctgtcattgttttatattgtgtaaattactttcattgtggctatttctcaagatgaaatttttattgttctaatggatttcatcagaaatgtgtataatggatctgctgacagtagtagtattttgttttaggatgttgtgacttagcaaaaataatacagatgtcttccccccttttgtagctttgacaatttgaattagatttcaaataaaatctgaacagaaaac

SEQ ID NO: 13548 - DNA, 1529 bp, Homo sapiens
gtggggacaggagctgggtgtgctggggactggccgcggacccctaacctgtgtctccggtctccctccgggagcggctcaacccagcccatcgctctggccccgttctggccctgcagggtggtggttgggacgttgaaatgagcgcgcgagtggtacgtcctctctccgcgctcacgcccccctcctcaccgtgtttcccgccaggaccatcagcacgtgcccatcgacatccagaccagcaagctgctcgattggctggtggacagaaggcactgcagcctgaaatggcagagtctggtgctgacgatccgcgagaagatcaatgctgccatccaggacatgccagagagcgaagagatcgcccagctgctgtctgggtcctacattcactactttcactgcctaagaatcctggaccttctcaaaggcacagaggcctccacgaagaatatttttggccgatactcttcacagcggatgaaggattggcaggagattatagctctgtatgagaaggacaacacctacttagtggaactctctagcctcctggttcggaatgtcaacttatgagatcccctcactgaagaagcagattgccaagtgccagcagctgcagcaagaatacagccgcaaggaggaggagtgccaggcaggggctgccgagatgcgggagcagttctaccactcctgcaagcagtatggcatcacgagcaggtgttgccaatgctgcggttcgtgcagaagcggggaaactcaacggtgtacgagtggaggacagggacagagccctctgtggtggaacgaccccacctcgaggagcttcctgagcaggtggcagaagatgcgattgactggggcgactttggggtagaggcagtgtctgaggggactgactctggcatctctgccgaggctgctggaatcgactggggcatcttcccggaatcagattcaaaggatcctggaggtgatgggatagactggggagacgatgctgttgctttgcagatcacagtgctggaagcagggaacccaggctccagaaggtgttgccaggggcccagatgccctgacactgcttgaatacactgagacccggaatcagttccttgatgagctcatggagcttgagatcttcttagcccagagagcagtggagttgagtgaggaggcagatgtcctgtctgtgagccagttccagctggctccagccatcctgcagggccagaccaaagagaagatggttaccatggtgtcagtgctggaggatctgattggcaagcttaccagtcttcagctgcaacacctgtttatgatcctggcctcaccaaggtatgtggaccgagtgactgaattcctccagcaaaagctgaagcagtcccagctgctggctttgaagaaagagctgatggtgcagaagcagcaggaggcacttgaggagcaggcggctctggagcctaagctggacctgctactggagaagaccaaggagctgcagaagctgattgaagctgacatctcca

SEQ ID NO: 13549 - DNA, 1356 bp, Homo sapiens
gggccttcaggagcacagtcggcctgaggagttgatggttactcaccgccgtgagcccaagtaactcgccctccttcggctagaaaccctccgcctgggcccgcgcgacaggagcgcggtctctgaggggagcggcgaccccgccagccccggtctctttccctggcggcggcggcttcttccgtgggacaatatgttcaagagaatggccgaatttgggcctgactccggcgggagagtaaagggtgttactatcgttaaaccaatagtttacggtaatgttgctcggtattttggaaagaaaagagaagaagatgggcacactcatcagtggacagtatatgtgaaaccatatagaaatgaggatatgtcagcatatgtgaagaaaatccagtttaaattacatgaaagctatggcaatcctttaagagttgttactaaacctccatatgaaattactgaaacaggatggggtgaattcgaaataatcatcaaaatatttttcattgaccctaatgaaagacctgtaaccctgtatcatttgctaaagctgtttcaatcagacaccaatgcaatgctggggaaaaagacagtggtttcagagttctatgatgaaatgatatttcaagacccaacagcaatgatgcaacaattattgacaacatctcgtcagctaacattaggagcctataagcatgaaacagaatttgcagagcttgaagtgaaaaccagagaaaaattagaagctgctaagaaaaaaacaagctttgagattgcagagcttaaggagagattaaaagcaagtcgtgaaactataaattgtttaaaaaatgaaatcagaaaacttgaagaagatgaccaagcaaaagacatataaacagttctcatgagaacttggtagtaagctaaactgaaaataaggtgggcttcactggagaaatggacttactgcaaatgctgtgatgtttcttagaggaacttcatatacagctgttgaccatgaatttcttagcaataggaatttgtactatttaagcaatctttaatggaaaatatgtgtgtaagaatggatgctatataggtattttaccaacccattttaagaaaattctatgatattaagcacagtttttaaaaatgtttattgtagtatatgtatagcttattacccttttgacaggcatcaaaatttcattataaagtattacttgtacaaattttgtacttctttagtggctagaattagtgaagaaacttaatgtgtatatttaatttcttcaagttcttacctgcccccatccttttttgtatatgatgtgtccagtaagtattcaataaatgtagtttacagatcct

SEQ ID NO: 13550 - DNA, 459 bp, Homo sapiens
atggccgctgcgtcctcatcggattccgacgcctgcggagctgagagcaatgaggccaattcgaagtggttggatgcgcactacgacccaatggccaatatccacaccttttctgcctgcctagcgctggcagatttacatggggatggggaatacaagctggtggtaggggaccttggccctggtgggcagcagccccgcctgaaggtgctcaaaggaccactggtgatgaccgaaagcccgctacctgctctgccagctgctgctgccaccttcctcatggagcaacatgagccccggaccccagctctggcacttgctttcaggcccttgtgtctatgtgtataagaatctcagaccctacttcaagttcagcctgccccaattgcctccaaatcctctggaacaagacctttggaaccaggccaaagaggaccgaatcgaccccttaaccctgag

SEQ ID NO: 13551 - DNA, 1130 bp, Homo sapiens
tgataatcatggcgcccctcggaacaactgtattgctgtggagcctcttgaggagttctccgggcgtggaacggggtctgtttccgggctcgaatccagccctggcacggtggcctgctccaaccgctaccttgctctttcgagatggggctgccacgccgccggttcagctccgaggccgcagaatctggtagcccagagaccaagaaacctacatttatggatgaggaagttcaaagcatactcacgaaaatgacaggcttgaacttgcagaagacttttaagccagctatacaagaactgaagccaccaacctattaagctaatgactcaggcacagttggaagaggctacaagacaggcagttgaggcagctaaagtacgattaaaaatgccaccagttctggaagagcgagtaccaataaatgatgtgttagctgaagataagattttggaaggaacagaaacaaccaaatatgtgtttactgatatatcatatagcataccacaccgggagcgttttattgtcgtcagagaaccaagtggcacactacgcaaagcctcttgggaagaacgggaccgaatgatacaagtttatttcccaaaagaaggtcgtaaaattttgacaccaataattttcaaggaagaaaatcttaggactatgtatagccaggacaggcatgttgatgtcctcaatctctgctttgcccagtttgagccagattccacagagtatatcaaggttcatcacaagacctatgaagatatagataaacgtggaaaatatgaccttttacgttcaacaagatactttggtggaatggtgtggtattttgtaaataataaaaagattgatggtttgctgattgaccagattcagagagatttaatcgatgatgcaaccaacttggtccagctgtatcacgtgctccatccagatggccagtcggctcaaggggccaaggatcaggctgctgagggaataaatttaatcaaggtctttgcaaaaacagaagcacagaagggagcctatatagaactaacactgcagacttatcaagaagcactcagtcgccattctgcagcttcctaaaaatattttaaaaatacatttattttactaaatactg

SEQ ID NO: 13552 - DNA, 794 bp, Homo sapiens
tgcagcaggggcagcgcgtgcggacccggggccggcgcgcatgcgccagcgcgacgcccttggaggggtgcgtggacctcagctacccccgcacccacgcggccctgctgaaagtggcgcaaatggtcaccctgctgattgccttcatctgtgtgcggctccctgtggaccaactacagcgcctacagctactttgaagtggtcaccatttgcgacttgataatgatcctcgccttttacctggtccacctcttccgcttctaccgcgtgctcacctgtatcagctggcccctgtcggaacttctgcactatttaatcggtaccctgctcctcctcatcgcctccattgtggcagcttccaagagttacaaccagagcggactggtaggccggagcgatctttggtttcatggccaccttcctctgcatggcaagcatatggctgtcctataagatctcgtgtgtaacccagtccacagatgcagccgtctgatgaggccacaacccctaggcccctcaggagctttgcagagaggaggacgtgtactccagggcgaggcctctggacctgtgttcctgtgccaaagtcctgtcaggctggtgggcaccaggaaaggcctgcaccctcttcctgctctcccaggaagccagctccctgagctcctgagccagccggaaactcttcctccagccttccggggagaacatccctcccattctgggaaaggaaagcagcctccagggaaatgttttctgccttcctgcttctagaaccacctcaggtactgatgaac

SEQ ID NO: 13553 - DNA, 1032 bp, Homo sapiens
  misc_feature (1)...(1032): n = a,t,c or g
cctcgaggccaagaattcggcacgagggaggtgggtgtctctgttgacttgtctgttctgttaccatgctgctacccaactgtgcaaagtagtttagggtggccagaacccagggaccattggatttcaaagcttgctttttctgttggttcttctctctccttctctctctgtctctcccattctcctgcccatgcatgaaaggatcctccaccttcttcccacccagagctccctccaggcctttctctatatatttatttatctgacatacagaacacgactttagtgagcagagtgctgacagtcatgggtccccttctttgggtctgtcttttgagagaggttgagttcagggcaagacagcctggccacacatccaagggtaccgaccagtgggaccctggcctgagtctgttctccgaggggcctccagcagcttctgttcctccctgcagctgtgtctttcttgtcctgggtttaggatgcaggtgggccaggcaggtgttgttaggggaggcacccacttcaaaaggagggccacagtggggacacagagtccagcacctgagccctccaccctccccattctggttggttccatcagccacacttagaatctcccaggatcccttggactccgtcccccaactttgttcacagcagcctgagcctacccaccccagggagacaagagctggcaggaacatctgcctatatggggggtggcgttggccccaaagaggcttcaccagcaaaggaactgtgtgtattttaatgccaggggacggaggatgtgtgagctgttcagcaaggtctgcccaaggccttaaaactcaatttccttattcttttgcttctgttcgtccttaaacaattaacagttcaacccacacctttaggacaacagtagtcgtgttttttngttaacggtgacatttttnagtttttnaaaaggaggcaaggngattttcaaatgttaggngtatctnttttcagaagggcntaggggcatttgttcccaagttttca

SEQ ID NO: 13554 - DNA, 565 bp, Homo sapiens
ctagctgtggctggagctgtgtcgtctagaaatggccatctgacataatacatgtccaaataagacccaaagtaggacccatcttctcttcctccccactctgaagattgtgtctgtctttgcttttaaatctatctcacccaccttcaaccttgggctccctgaagggtttgttgggagaatggaaaagagtttctcccggctttcctgtctttacaacatcaaacgagtacatagcccttttcctctcaagagttttgctgccagcctgaaggaggccccgtggcaaggcagggctgggaaactgacggaaacatggggaggtggaagaaccttcccaggttcttaagcctggcctcatgtctggcccgcagctcctgactgcttttctctgtggtacctaaatcccagtgggttctctctccacttcttctgtccagggcagcgttctccccgacttcaggtggccccacctgtcctcagctcaggcccttatttcctgctccaaggggcgcaggcaggtggatcagcagatgggagctagtattcatccaggtgccccacg

SEQ ID NO: 13555 - DNA, 1310 bp, Homo sapiens
ttttccttcgtgagatgtactactcatttcaaaacatgctttcagggcgtcccctatgtattcggggggcccacggcacactcaggctggagatccttcctcactgcgctcaagatggcctcagccagacaccagttacccagctgaaagtcacaatccctcccagaagtctcccaacactagtgctgaccagaggtggggctctcaggctaggagttttcacacacaatgacaggctgctgggggacattgcaggaccccttttcctctcctctccatgctagaagccagccctaggcagctgcagttactccctgtgactcagcagcaggctgattcaacacagctgcccacacaaagccagtggctaatacatctgtttacctttccctatcacccagacacaagcccctttcccaggtcaaaccacaggccgatgcatctccagtttgacagtcaaatcactacttccattgctactttagatcagccaaagtggtgactgctgcagtgtgtggctatccctacaaggcccacccaagggatgcccaaagcccaaccttctccagggctgcagcccagagcaaccccaccagcctaagtccagcagaggacctcccacccaatgtcttgttctaattagaaggggaagttagccacagaaaatcaacttatctataattacaaaattctcttgactcaccttaaagttcctattgacatctactgcttttaaacctatttgaaaactctgatactaaaacaaatgacactctaagaaagtttgggagccccatgctgagaaccatttctgtgcagtgaggatgtttccagaagctacttacctacatgtgaatgtgccattttctttccttttgtagagaaaatcccctttactttttggaacagtaatggcagcttctagtacagccattacagtttcatatgagaaaaattaagaataactataaaattgttaaaatatccaataatgggataatgatggccagaagatttaacatacaaagtaattctcaatgtaaagctattcagctcttccaggttgaatgccctgtaacccaccctgaccttccacatcatcttcaaaaagcagtttctctgttccccatgattctcctataaggtaactctttagtcctccatttaggcacattttaaatcctccaaagaataagtatcatgtgattattttagctttacaaaaaaaaagttgaatggcgttttattttcatggcctataaggcaggtaccttagtagggcagatataggaaaaacaaattagagcaaa

SEQ ID NO: 13556 - DNA, 60 bp, Homo sapiens
gacaggaccttacaggcccaagataactgggcaaatgaaagaagatgtagcaagcatgta

SEQ ID NO: 13557 - DNA, 449 bp, Homo sapiens
agagagctgttaccgttgatctctggagcctccctgaaggccaggtggggcaggtgttctcatgctcctgccagggaaattggccatcagagacacagagtatcttgcttagggtcccacagcccccagcagcagggactggaaccagagactggctgctcctgctccccagcagttccttcctgcacatcaggggcttctccacctgattcaagcgacagggaaccccctgtgcatcttcatcctcctgctgggttcagcctggccctaaacagatgtgacctgggccaggagtgcatgaaggcaggccctgttgtcctgcatgccgccagctggactggtggcccttccgtgtttgttcagcgtggttatgaggagagctccttttagcagcgtcctttagggttgcacagacgtgctcaagtctggcgccttatgtacgtgatatg

SEQ ID NO: 13558 - DNA, 661 bp, Homo sapiens
gatttatttgagattgaagaactggggagactggagaagccgcttctcctcctgtgctgcgcctccttcctactggggctggctttgctgggcataaagacggacatcacccccgttgcttatttctttctcacattgggtggcttcttcttgtttgcctatctcctggtccggttttggaatgggggcttcggtcccagctccaatcaatgcagactgaggaggaacaacctagccatccagaggggtccaggagagccaaactggaacagaggcgaatggcctcagaggggtccatggcccaggaaggaagccctggaagagctccaatcaaccttcggcttcggggaccacgggctgtgttccactgctcctgatctgcagagcttggcggcagtccccacattagagcctctgactccacccccttgcctatgatgtctgctttgggtcaccctgatgatgatagtgttttttatgaggacaactgggcacccccttaaatgactctcccaagatttctcttctctccacaccagacctcgttcatttgactaacattttccagccgcctactatgtgtcagaaacaagtgtttctgcctgggacatcataaatggggacttggaccctggaggagagtcaggccacggtaagccct

SEQ ID NO: 13559 - DNA, 1475 bp, Homo sapiens
atccaggcagggcttctcttttctttccacaagggacaagagcttggcttatttaggctacagccctgctgctgctcccttccttcttctgtcctgtttccagccttgcaagaaggctattcacaattaggcctggctgcttctctcatttttttcctcccagtttccaaacaagccctcagtgaacatcattgaagcgtgactgcctgtctgcagggagaaggattccatttttcttctcagctggtccccaggcccacgggcacagggagagggacaactgcagcagtggggaggaggcacagctagctgcacagttctctcttctccttgtcctagtcagatgaaggaggctgcactacaaacccaaattctgcaaaaaaataaaaataagccacaaaactaaaaggcctgggccccattctgggaaaagggcaaagctgcatgagacacagccttctgcctcctcgcctctcctggactggcttcctctttgagaaaatgcacaaagccctgggagatgacaagcacaaggactgactcaagctgtgtctttcagaccaaggaacatcagagaagctgtggggctgcctgccaggcaggatcatggctgccatcaagccttttctggatccagccatcaaggacatgtttgtggtgtgatgcacacttttgcaagcgtgtaagatgttacctggtttgtctcttttggaaaacaaaaatcagaaggctgcattctagagggcagagaaattcccccgaagactgagctggttgcctgcatcctctatcttctttgacccttatgactgaaagatcatcagtttggaaggtactggtccaatttatttaggaagtatctcttggagtttcagaaatgctagcttggacaactgaaaagtcacatcacagctggcattctgggggctaccaaaacaccccttctggagtagaagctgctggaaggcaggcctgagccattcaccacggacaggaagagcagctctggctatcaccactggcctctggggtcttcatatcttgccatctcatccagggttccatgaaagttacccagggtcctcatgtccttccttagagcctgagtggtgtgaggtgacaggtctctctctccactgcccctttctggtttaaaaaaatggtgcttgatgagggaaggtagactcttccctaggactgacgagttacggctgccagatgcctgcatgggaagaggtggacatctgcatcttccattggtggtcaaggatgggtgtgggagaaccacacctaggtgcaagcctggtactcagtaaatatttgttgaaatgaatgataagagcattggtccccaagccagagagccagaagccatcacccaatgaccgccccttccttccggtctacaagagctctcaaggctgggtctgcccacccactctggctttgccccaagtgtgacagcactggggagg

SEQ ID NO: 13560 - DNA, 910 bp, Homo sapiens
ggtttccaagactctgaaataccaggatttccacaaactcatcttgccctgactgggaatctttcggagattggatttcagagtattccccaacctgatcggatatcacctcctcaatggaagcttccctaataccctctgatgtttctagaagcaggacacatggcttgtgtcataagtcttgacctgattatcatagattgcctcaccaagtttagcataccctgtctgagagtgatgctgggcaaattagtgaataagaggactgtggaatttatttgattgctaatcttgtgtcaggacatggttattttttaaaaaagaagtgtcctcttttgatcttaactgtttgatatctcagcccttgagtgaggcagttatatgcaaaggagatgagaaggatgagaaaagtgagtacttttccttcataaaagccacatgaattgaacaagacttcagaattcagaagaactacatcaagttcttgggtcatttttttaacccattctccaagaattgaaaaaatgaccttgcaaatatgtgcaagactctggaatcttcctttggcagatgatgaatgagatgaatatttccaggtgccttgccttcagcaccagcacatgtacattctagtactcttggccttgatcctacactgaatctgagggtgcaaggactttagatagaggctcaggacagactggacctgtatgaacctctgaattgtagctagcctgggcagccagttacttggactcctctggggcttctggacaaacaactcttttatagcccaaggtagatggtcaggggcgaccagagagagcaatagattcgttgacttcaagcttaacatgagttagcagtatggtgaggttccagcaaaatgtaagcactcaataaatgttag

SEQ ID NO: 13561 - DNA, 398 bp, Homo sapiens
  misc_feature (1)...(398): n = a,t,c or g
gcgggacggagagcgcccgccgctgcatttccggcgacacctcgcagtcattcctgcggcttgcgcgcccttgtagacagccggggccttcgtgagaccgagtgcctttgcattggtttggctttggctacgcagcactggttgcttctggtgggatcattggctatgtaaaagcaggcagcgtgccgtccctggctgcnggctggtctttggcactctanccggcctgggtgcttaccancttgtctcangatccaagganngnnngggntttatanctctnagnggaanattnttnnncttttgggnatnaggatcnaannntngtattcnccctttntttnaggntnagnnttnttttntggnacaattnnaangngnaananatanattttttt

SEQ ID NO: 13562 - DNA, 1473 bp, Homo sapiens
ttttttttatagattattccacataacatgctttatttggacttaaacacttataatttcattctaaacacttggttgacatacattttgatgtgtgtagttaggctatacagaatatacaaaccaaagctgtatgaataatacataggtttttcaaaagttatgtttcataaagaatacagagaaaggaaaaatagccacacatccaatatctcacaacttctaaaaataaaactacagagatgtaaaatataaacaaatcaaacaacacacaaattatcatccttgaaagaaaaattacaggccagcatcagccattctttgaagaactaaaattattaaagaaaacataaatttattacaaagctaactatgagtgtactaataggtaaaataatatgaagcagtataattctacattaacaagtttttccataatatagcataatctctctaatcaaaatttctaattctatctagtattaatttaactactgactttaattcataattggtagcctaatttctggcatacaatgtgaaatgacatataatttcattaaatccatagtactataaatagtcaattttacactatctcataaaggtgtatgcaaaggcctttttaaaaaacaaggctatctgaatataataaaactagttttccaagattcaaataacaaaacagttatataaatgcatacattacacttcctaggttaaaaaccatcaaagatcacaaaaatattaccaaaaaggaaagtcatattttttcaccactcatctttgtccctgcatcttcattagagctgtctaattcagcaagaccactttctgattcagtatggctttcctgcattgtcactgggtttccagcatcactgttcgaagaagtagctgtggcagctggttcagcagggctttcttctccctctactttagctagcctgtaactagtcagcatctcctccagaagttgtcggtagtttcccctatgattaattctcatttgcctgagagcttccaccaattttccctgtgatccactttcctctgcttcatcggaggccccatcactttctctatgtggattcagtctactataaacagcttcaataacattacgcttgccagcaagacctcccccaggaggcaaatttgggatattttctgcagacaagatgcgcatgacatgggcaagatcaggcattccttcctcgccagacttctccataatctcttcaacccgtgattccaagtgcttatccaactctgaatcttttttcaccgcttcatctgagaccttgggagcatttgaaaagcaaactagtacaatactcatgttatctcgacttcccttgtgtaaacaagtgtccactacccaattgcacacattttccaggtcatcagatacctcaagcctagatttaacatattcacagagctcctcattactcataacatcccagatcc

SEQ ID NO: 13563 - DNA, 1319 bp, Homo sapiens
aatacatatggcacatattaatgatgctgatcctaatgatttgtgaacctcttagaaattcttttgtctaaaagcctagagattcttctggttcctttagaaacatgtaacaaacttgggccaggggtgctgaggcatggggaggactgcttattggcaggaacacagagggggtgggcatcaggtagggtggaactggatgaccttccagaccccctcctactcagaagtcagcatgcaagcagcgcctgctgtctcccgatgcctgcagggaggaaaatgtctgtgaaggacactttaatgaaggacgaagctctctgctgctccctcaaagctgagttcactgtggcaggcaggaagcagagaagctcctgcccgccaaacccactgcacaggtgggctgctgctggtatcagattctcctttttaagtgtcaatttctgtttcacagacagtttgttttcaatatggctgatttaccctttcacctctccaccatctcatttaatttgtaaatttttagttctgtcttttctcattttaacttttaaaaaatctccttgctttttaaaaataaatattacccacatagttttcagatcttttttgtctggagagcattaaatatctgcactcatcaaagggaatatagcaaatgttgatcatctgtcagcagttttgcatgtgacacctttatatgaattattttcccaatttttgctctatgtaatgggtcaccataaaactgtaagacttgggcaaatgctatagaaaaggttcaggtttcagtattctctctgaaggcatcattcctgggcttccggcagcatcacacgcttccagtgccctgccagggtgagggtgtgtggcacagaggcaagcagctcctctcttctgtaggagctttgggttttcagaggtgcagggaaggcagttttacaggttaccgtaaaacagaggttccgtccagtgttccttatgatgcctccccatttaaaaagaaaagagatctatggaaaactgggaatgtaatgtggattctgtcagagctcctacagagcacagttgcctttagtttcctttaaagatgtaaaaatattgtataatacagttttgtccctacacaattgtatttgccaagcttagtgcattatgatacctttatttatttgttttgggcagtattactatatatatataaacatacagttactgttttatatattcttaggtcattcaaagccatgtatgctgtaaatgtgctagtctttagaatgacacataataaataactgacaagatattaaaaaaaaaaaaaa

SEQ ID NO: 13564 - DNA, 895 bp, Homo sapiens
ggagtctcagggcagggtggcagtttcccttgagcaaagcagccagacgttgaactgtgtttcctttccctgggcgcagggtgcagggtgtcttccggatctggtgtgaccttggtccaggagttctatttgttcctggggagggaggtttttttgtttgttttttgggtttttttggtgtcttgttttctttctcctccatgtgtcttggcaggcactcatttctgtggctgtcggccagagggaatgttctggagctgccaaggagggaggagactcgggttggctaatccccggatgaacggtgctccattcgcacctcccctcctcgtgcctgcccctgcctctccacgcacagtgttaaggagccaagaggagccacttcgcccagactttgtttccccaccgcctgcggcatgggtgtgtccagtgccaccgctggcctccgctgcttccatcagccctgtcgccacctggtccttcatgaagagcagacacttagaggctggtcgggaatggggaggtcgcccctgggagggcaggcgttggttccaagccggttcccgtccctggcgcctggagtgcacacagcccagtcggcacctggtggctggaagccaccctgctttagatcactcgggtccccaccttagaagggtccccgccttagatcaatcacgtggacactaaggcacgttttagagtctcttgtcttaatgattatgtccatccgtctgtccgtccatttgtgttttctgcgtcgtgtcattggatataatcctcagaaataatgcacactagcctctgacaaccatgaagcaaaaatccgttacatgtgggtctgaacttgtagactcggtcacagtatcaaataaaatctataacagaaaaaaaa

SEQ ID NO: 13565 - DNA, 739 bp, Homo sapiens
atatctcgcgctctctcccctttccccctcccctttccccaccccgggcgctcaggttggtctggaccggaagcgaagatggcgacttctggcgcggcctcggcggagctggtgatcggctggtgcatattcggcctcttactactggctattttggcattctgctggatatatgttcgtaaataccaaagtcggcgggaaagtgaagttgtctccaccataacagcaattttttctctagcaattgcacttatcacatcagcacttctaccagtggatatatttttggtttcttacatgaaaaatcaaaatggtacatttaaggactgggctaatgctaatgtcagcagacagattgaggacactgtattatacggttactatagtaagtatctttcagtttctttccctatttggactgctaaccaaaatactgatacgactccgatgagtggagaaccccaggttcttcctcttgggtcgaattagaaaaaaatgacatggacacacatggagtagttttaaggagcagggagtttagtaggcaagaaagaagggggaagaaagaaataagctcccctgtacagagacagagggaggggagctccaaaaccaagagagggaaccccacctgccacggataccagtcaggtatatgaagaggctgaaggtgccagtgtttgatttgcatagggctcgggattggtttgaccaggcatgtcatccacatagcctgtta

SEQ ID NO: 13566 - DNA, 2285 bp, Homo sapiens
catgaggtgtaacgagaaatgggttgaatgggccaaatgcaaggagtgcatctctgggctgcaaactgacttgagtgctgcactattgctattccgtgcaaacaaaactcagcttttcctgactcagttccttgacttagtggcctttacaaaaaaagttgagtagtgtgtggcctgctgtcgcacagccccctagttagcttcatggtttctcagcttcagacccctccagcccacagaggagcccatggagggacccacttcccttggtccagacagctgggaagtgggttaggcccacttgctgttttgagcagggccacttgctccatttcactgaaggctttgctgggtgaaaacacttcagcatctcctcctcaggtcaacccataaagaccaggtccagcaccgtggtcttggcacatccctggcctcaggccctcacctaacagtgaggcagcagctgcccagccccgcaatgtgcctgctgtcaggcagctcttgcctgaaacttacttccacattctttcctgatgggcaggtggctgaaggcccagccatcagtgtcgcttgttgccaccccgtgcctcccttggcctctctgagctttgcccagaagaccaacaatcatacataccctaactgggacaccactctgcagaatgcagatgatccattctggaggaagctgtcccttgagctcagtgagctcccaggcaagcagggcatctggccgacttccctcacaacagctgctcccacatcccctcggactggagcttcagccctgactgaggtgggcagacctaagacctgagaccacaagattagctcagtgtctaccaagcatctagccactgtccagggccagagcataccacgtctgcagtgcctgtgagcagagccagcagttgccctgtgactgtaaccaccaaattgtccaaacacccgctgcagttagcaagaagggtaggcttcaccctcctttactgaggagaatgatgcggaggagtttcctctccagggctaggcaaggcaggcgagcagccagaagccgggtgcccacagggcagggacaggaaggctgtgctgctactggctgctcacttctccatcaacctcaccctctgcaccactaaccaagaccttgtcgctcttgcctgtctcgctgctttcacagctgcaacgattgtgtctgcctcatggggttttcctccagagcctttattctgtagccagacgacacgaggagtctgtgtcacttgagccagtgcttctagatgctaccctgtgtggggcggcacctcagggacagtaaatcagaaatgctggtctttgaaacctttgaaaagatcaagctgaatgtttcctttttcatctgtcgctgttgatcttcatctatttaaataggtattctaacgtttcctctctgtatttcatgaagctgatttcctctctctttccttttcagcaatactggagtaaccgcttcctaaaccattttgcagaaatgtaagggtgttcggttgccgtgcatgtgcgtttttagcaacacatctaccaaccctgtgcatgactgatgttggggaaaaagaaaagtaaaaaacttcccaactcactttgtgttatgtggaggaaatgtgtattaccaatggggttgttagcttttaaatcaaaatactgattacagatgtacaatttagcttaatcagaaagcctctccagagaagtttggtttctttgctgcaagaggaatgaggctctgtaaccttatctaagaacttggaagccgtcagccaagtcgccacatttctctgcaaaatgtcatagcttatataaatgtacagtattcaattgtaatgccatgccttcggttgtaagtagccagatccctctccagtgacattggaacatgctactttttaattggccctgtacagtttgcttatttataaattcattaaaaacactacaggtgttgaatggttaaaatgtaggcctccagttcattttcagttattttctgagtgtgcagacagctatttcgcactgtattaaatgtaacttatttaatgaaatcagaagcagtagacagatgttggtgcaatacaaatattgtgatgcatttatcttaataaaatgctaaatgtcaatttatcactgcgcatgtttgactttagactgtaaatagagatcagtttgtttctttctgtgctggtaacaatgagcgtcgcacagacatggtttcaggtaaataaatctattctatgataaaaaaaaaaaaa

SEQ ID NO: 13567 - DNA, 536 bp, Homo sapiens
aagagacactgcccacatgatggccattccctacttcatccttgctgagctaaattttatatttttgtgcatccttctcccagatgacttaggtggtaagtccagattagtcaaagctaatcatggaagttccattttaatgattctgttggggtgaacttgggagcaatgagatgtttgggaagtattgtgtagtacttctgggaaagatctccttgatacaacattgtcatgacatgagaagagactctgctgggctttttcatgtctgtaacatggtattggcttatcgtttttatctctgaagggcagtagcctgaagataacagtgcacaaggtgggaaaagccagctcagaggtgacgttgcccgagctactctgctctctatacctgttctctactgggactttttataaccctcaataactgttttttatttggtcttagggctgtctgatacttagagctgaaggcattccagctgacacagaggaatatttttctaagtgttaatgttctatatggtaattagggg

SEQ ID NO: 13568 - DNA, 436 bp, Homo sapiens
  misc_feature (1)...(436): n = a,t,c or g
atgttggctattaaattttatcctaaattttggagatgacattcagtgtacagcagtatctgtttagtagatactttaatctttttatttgtaaggtagtgataggtaagcagttactattgtacatttgtagttttctgtccattttaagtttgcttcttttttttctggttctgtctttcctgtgggtattgttcatttttgttgagacaaagttatgctttcttgctcagactgaagttcagtgggcatatcacagctcactgtaggccttaacctcctgggctcaaataatcgtcccaccttaggccacccaagtaggcttgggactacttgggacacgtaccacaacacccaaggggggcttatggattcttccaccttggggcctccgaaagtgttggggattattaaggcaggggggccancgtgtccc

SEQ ID NO: 13569 - DNA, 927 bp, Homo sapiens
cgtttccggagagacctggctgctgtgtcccgcggcttgcgctccgtagtggactccgcgggccttcggcagatgcaggcctggggtagtctcctttctggactgagaagagaagaatggagaagcccctcttcccattagtgcctttgcattggtttggctttggctacacagcactggttgtttctggtgggatcgttggctatgtaaaaacaggcagcgtgccgtccctggctgcagggctgctcttcggcagtctagccggcctgggtgcttaccagctgtatcaggatccaaggaacgtttggggtttcctagccgctacatctgttacttttgttggtgttatgggaatgagatcctactactatggaaaattcatgcctgtaggtttaattgcaggtgccggtttgctgatggccgccaaagttggagttcgtatgttgatgacatctgattagcagaagtcatgttccagcttagactcatgaaggattaaaaatctgcatcttccactattttcaatgtattaagagaaataagtgcagcatttttgcatctgacattttacctaaaaaaaaaaagacaccaaatttggcggaggggtggaaaatcagttgttaccattataaccctacagaggtggtgagcatgtaacatgagcttattgagaccatcatagagatcgattcttgtatattgattttatctctttctgtatctataggtaaatctcaagggtaaaatgttaggtgttgacattgagaaccctgaaaccccattccctgctcagaggaacagtgtgaaaaaaaatctcttgagagatttagaatatcttttcttttgctcatcttagaccacagactgactttgaaattatgttaagtgaaatatcaatgaaaataaagtttactataaataaaaaaa

SEQ ID NO: 13570 - DNA, 2662 bp, Homo sapiens
gtcgcctccgcctgatccccggcctgtcggccgaccccacctcgccaaccgaggcggaccgcggagtgtgcgaacgaccccaccgctgctttctcctcccccagatcacgcaccccagctccggaagatggggaactgcctcaaatcccccacctcggatgacatctccctgcttcacgagtctcagtccgaccgggctagctttggcgaggggacggagccggatcaggagccgccgccgccatatcaggaacaagttccagttccagtctaccacccaacacctagccagactcggctagcaactcagctgactgaagaggaacaaattaggatagctcaaagaataggtcttatacaacatctgcctaaaggagtttatgaccctggaagagatggatcagaaaaaaagatccgggagtgtgtgatctgtatgatggactttgtttatggggacccaattcgatttctgccgtgcatgcacatctatcacctggactgtatagatgactggttgatgagatccttcacgtgcccctcctgcatggagccagttgatgcagcactgctttcatcctatgagactaattgagccagggtctcttatctgacttcaagtgaaccaccattttggtggttttgatcttttgtcactgagcccaaagagccagggattaggaattaagatcgtgcacaaaagtttccttaaaattcctggatggctgcagatgttgggggaaaaagtacgtgatattttagaaacttagtgggaaaagtaggatggtatttttatgtaaagccttgacccaatgtttaaaaatataattgtatttagatcttgttattgctccagtacataggaattgtgtaaagtgttaacagcagctgtatttgtttaaattgtgtgtattgaagattaggaaaaagatagtagttatttttcctaaatgaaataactttcttctcttccccttccccaccccgaattcttttctgaagttgctggcatttgggtcaaggttttattaaaagctacattttataacactggcacacacaaaaaagtagttttaagcttgttttgcacagttctttttttccattggaaatggaattcattgccttaggtctttttaaatagtgtattattatcgttggggctggctctatgcttgaaaaccagtttatttataacctgttataagtgctatattctgtttgcagttagggaaatgcagaattcaaagtgatctcctaggcttgtaagcaaactgaggatgcactatcccttttctataaaaaataagttaatgtgtcaagaaaccaactctattaaggtggggtttaatattaccctttcctatgtgttttatctaattattttggttgttaatatggtgataatgggaaagtcaagttaaattttaaatattaagaattctgatttattgagattgaattatgccaccacgtttatgtaaaaatgaaggtggcaccgtggtgagacctaatgaggaaatagttactcagttgtaaaaattttgatttattctctttcttctgacctccttgcctcttgtcttgaaccataggcaaaaggatactgcatctctcattactgtaggtgctgaggttattgaagttatacaaaacacatctcagtctctgtttcttggaaaggtatctattacatcctgctagctgactgacaaaactaagcagggagaataaagataattgtattttatgttttgcacacaaacgcagaatttgtataaccatatgacttcatagttgtgatctcaaaaaagaaggaatttctcctttgtttcttgcagttaatgtaagaatactttaaatctctaagcttctgaagtgttagaggtagagatggtctagtaaagatgtagtagtaatgttttatccatttagcatgtgtttattttttcatatgtactcaaaggtgacttattggttcacctcagtgatattacagctaaaaaaatcattcattagcaaaaggaaaagtggtctcaacctaacatcagaagtgtttcttattattattttatattgagttgaatattgaactctaacagttttctacatacaaaacacagtgtcatgaaggttattcataattgcattatagaggaatgtagtatgtcataagtactttgtaaagatttgacattcaactgtagtatccatatgttgcttaaatttccttatgagccccatgatggaaagacttaaagatgaatttgagaaaaattgaaagaaattagattatcaggttctgttaaattgttacatgtatcttgcttaaatttctgtttattaatttatatccacccaagtacataaagcaaatttggaggaaacaactgaagttgtgcaatattttctgataattgctttttttattcttgtgttttctacttaaacataatgtctgtgtcatcaagtattatagtcagacttttctttttttctagattgttaaaattggcaaatgaacttttttaaaaatcatcttccatgttgcagttagtctttcttttcattacaagtctttcacagaagtttggtggtaatattgaaagaactagcattgggcagaatgtgtcttttttaggcactttatattctcaacatacaa

SEQ ID NO: 13571 - DNA, 933 bp, Homo sapiens
attaaagccatgcccgaggatgctaaggggcaggtgaaatcccagcatccactaagctggtgttgtcctatcgacccagctggatcgtgtaaccagtctatgggaagtgaggattggatagctttagtcaaagcagctgctgcagctgcagccaagaacaaaacagggagtaaacctcgaaccagcgctaacagcaataaagataaggataaagatgagagaaagtggtttaaagtaccttcaaagaaggaggaaacttcaacttgtatagccacaccagacgtagagaagaaggaagatctgcctacatctagtgaaacatttgtaggacttcatgtagagaacgttccaaagatggtctttccacagccagagagcacattatcaaacaagaggaaaaataatcaaggcaactcgtttcaggcaaagagagctcgacttaacaagattactggtttgttggcatccaaagctgttggggttgatggtgctgaaaaaaaggaagactacaatgaaacagctccaatgctggagcaggcgatttcacctaaacctcaaagtcagaaaaaaaatgaagctgacattagcagttctgccaacactcagaaacctgcactgttatcctcaactttgtcttcagggaaggctcgcagcaagaaatgcaaacatgaatctggagattcttctgggtgtataaaaccccctaaatcaccactttccccagaattaatacaaagtcgaggatttgacgcttgtatctcagctttcttcttcagtgataaataaaactagtcctccacagcctgtgaatccccctaagacctttcaagcatagtgagcggagaagaagatctcagcgtttagccaccttacccatgcctgatgattctgtagaaaaggtttcttctccctctccagccactggatgggaaa

SEQ ID NO: 13572 - DNA, 2575 bp, Homo sapiens
cctgaggcgagtctgggctcagcctagagctctccggcggcggcgcagcttcagggcagcgcgggctgcagcggcggcggcggttagggctgtgtagggcgaggcctcccccttcctcctcgccatcctactcctccctcctcgtcatcctcccccttcgtcctcctcgccttcctcctcctcgtcaggctcgacccagctgtgagcggcaagatggcggcgcccaggccgccgcctgccaggctgtcgggcgtcatggtgccggcgcccatccaagacctggaggcccctgcgcgcgctcacggcgtcattcaaagagcagcggaaccgagaaacagcacccaggactatcttccaaagagttctggatatcctaaagaaatcttctcatgctgttgagcttgcctgcagagatccatcccaagtggaaaacctggcttccagtctgcagttaataacagaatgcttcaggtgtcttcgcaatgcttgcatagagtgttctgtgaaccagaattcaatcaggaacttggatacgattggtgttgctgttgatttgattcttctgtttcgtgaactgcgagtggaacaggaatctctgttgacagcttttcgctgtggcctgcagtttttagggcaacattgcctcacggaatgaagattcccagtctattgtttgggtgcatgctttcccagaactgtttttgtcttgcttaaatcatccggacaaaaaaattgttgcctactcttcaatgattttgtttacatcccttaatcatgaaagaatgaaagaactgggaggagaacctcaatattgcaattgatgtcatagatgcttaccaaaaacatcctgaatcagaatggccgttcttgattattacagacctctttctgaaaagcccggaattggtacaagccatgtttcccaaactgaacaatcaagaaagagttacactgttagaccttatgatagccaagataacgagtgatgagccactcaccaaggatgacatccctgtgtttttgcggcatgctgagttgattgcaagcacctttgtggatcagtgcaagactgtgctcaagctggcctctgaggagcctcctgatgatgaggaggcactggctacaattaggcttctcgacgtcctgtgcgaaatgactgtgaatactgagctgctcggctatctgcaggttttccctggcttgctggaaagagtgattgatcttttgcgggtgattcatgtagctggaaaagaaaccacaaacatcttcagtaattgtggttgcgtgagagcagaaggtgacatctccaatgtggccaatgggtttaagtctcatctcattcgtctgattggaaatctgtgttacaagaataaagataaccaagacaaggtaaatgagctggatggtatcccgttgatcctggacaactgcaacatcagtgacagtaacccctttctgacccagtgggtgatatatgccatccgaaaccttaccgaagacaacagccaaaaccaagatttgattgcaaagatggaggaacaggggctggcagatgcatccctacttaaaaaagtgggttttgaagttgaaaagaaaggcgaaaagctgatcctgaaatctactagagacacccctaagccatgaatgaactacatccaaatacctgaatttttggaatctgtttcatggatttttcatcttctaccgtatgtgaaattgcaagtgtttgaagatttataagtacaaatttgggaacatacaaatcttttaggtagtagagtttaacgtgtataagctaaaagtgaaagtaactgagtgttctcttgtttctttgcattaatgtaactgtgtggtttgcctttgtccccctggatagaacgtgcatttaaagaatatattgtacttactgtgacagcagataataaaccagtctcttggagggcacaacccttatttgacaaaacttgggatgttgggcttgactgtgtttgtcccttcagatgggcaagtcagcatcattctttatattcctcttcttcattggggttttctggaactctgggcagggcggttgaagtagtttctcactgtgattaattctagcaatctcttttcacccctctgcctttccaaaacattgacaagactcatttccagttaattaattcgagaaccctccctcttcattttgggtactgggctgtcttgtcactgagccctatccctttggaatgtggcagggagtgaggttggtgagagaacatgtgggcacttaactcttcatgttccagttcatcccagaagtagacatcccaggacccattctgtgtcaaggtgaatgcctgtgtcctccccagcttcatgcctctgtcatgggggaaggaatagcttatgttctgcttctggtgcagtgccgtagatttaaaggtacatttctatcttctttgatttaaaaagcaccagtcttcataaaaggtgccactcagttttagccatgtctttcaatgaaattgcaaaagtacttttagggagcaggagtttattttgacatcttagttatctgtctgtctgttca

SEQ ID NO: 13573 - DNA, 885 bp, Homo sapiens
tttttttttttttttgactcataaagtgctctttattggcatctgaaaaagaagtgcctcagccttcaaggctgggacagaagttggggaggagctgctctgccccaggctcaataccaatagaccttcttgtatttccgggtctccttgatccccatggcctccatcacctcctcctgcagtgtctttagacagggcacataggttctttctaaagcatcttccactgatgtgtctttggggccatcaatccacgtttcagggacgatgccatcagctctgggaaattcgggtttagggataattctccctgatcgtgtggagactcgtacccgctctcctgcttcagtaaatctccactcgatctcagtgggtttcctgtccataggatccacaagtttgacctggcggtggagcaagggggcttcactagggatcatggttccccggtaatccatggtcttgccaatgtagcggtaatgtgtgttcagccctcccacgaccacccagtttcgctgccggataacttgaaccactttgccctgcttcccggcatccttgccttctaggatctccaccgtgtccccacagaacagataccagtcttcatcagagatgggttccacaaccactgggcgccgcctgatccatggggggttcttcctcttgtctgcaacagagcctggggggctcatcccatagcggtaatgggggggcagagtgaccttggatgccaaggccagcagggcagaaagacgcatgcctggaggttgtaagaaatccctttgccagcaaaacgctcgaaaccttccttgtcagctctgcctctcggacgggcacctctagggcgggcggccctcacctccactttccgcggcacttcgg

SEQ ID NO: 13574 - DNA, 380 bp, Homo sapiens
ccccaccagatcttcaaaggccatgaggtggcagcgatgctcaagagtgagctgcggaagcagaaggcagactttttgatattcagagccttggaagtcaacactgtcacatgtcagctgaactgttccgaccatggccactgtgactcgttcaccaaacgctgtatctgtgaccctttttggatggagaatttcatcaaggtgcagctgagggatggagacagcaactgtggcaaaaaggaaaacccaagaggaaaagcaagtacaagatcctggatgccacggatcaggaaagcctggagctgaagccaacctcccgagcaggcatcaaacagaaaggccttttgctaagtagcagcctgatgcactccgagtcagag

SEQ ID NO: 13575 - DNA, 724 bp, Homo sapiens
gtggtagccccacgtccttagtaaactgaggtattgaagtatcttctttttctttcagaaaatatttgtcaagcaccttctgtgttctaagaactgttctagagctttgcatgctatggaggtctagaaattcacattatggtggcaggtgacagacaatacaaagagataaagcaatttcatatagtgataagctagggaggagtgctaaaaggagccaaggtgtagtggtgactggaaggtgaccagggaaaccactgtagggtttctaagtgatgagatctgtgacaaatccctgtggtcagcagcaggcattggatatgtaactttattctgtcccattgatcttgtagtcaaccctggtctgttctgtattgttttaattacataatctttgtaataatctttaatacctggtggagtgctctgtttacttatttctgcgtaattaaccacccctaagcttaacttactcatggttctgcagggtgactgctctccatggttctaggtggttctgcatggggcctctcacatgtgctacagtcaaacattagccggggccacagtcatctgaaactcacttacatggctgacaattgatgtgtgctgttgcctggagaagacatatgtggcgtggtggaatggaatggtgactagattcaagaaagagcttcccaggaggaaggctaccaagagaccgaagtagaggcttcagtttctt

SEQ ID NO: 13576 - DNA, 1569 bp, Homo sapiens
cggaacccgtaggaggggtacttaaccggacggcctaccaggcctgtggccgtgcgcgggaagagcactgcagatctcaggatgatggggcgcagccctgggtttgccatgcagcacatcgtgggtgtgccccacgtactggttcggaggggcctccttggaagggacctcttcatgaccaggactctctgcagcccaggcccaagccagcccggagagaaaagacctgaggaggtggccctggggctgcaccaccgcctcccagcactgggaagagccctggggcacagcattcagcaacgagcgacctccacagccaagacttggtgggacagatatgaagagtttgttggactcaacgaggttcgagaggcccagggaaaggtgacagaggctgagaaagtgttcatggtggctcgagggcttgtccgagaggctcgggaggacttggaagttcaccaggccaagctgaaggaggtgagggaccgcttggaccgtgtctccagggaggacagtcagtacttggaactggctactctcgagcacaggatgctgcaggaggagaagaggcttcgcacagcctatctgcgtgcagaagactctgagcgagagaagttctccctcttctctgcagctgtgcgagaaagtcatgagaaggagcgcacaagggctgagaggaccaagaactggtccctcattggctcagtcctgggggccctgattggtgtggctggctccacctatgtgaaccgtgtgcgactacaggagctgaaggctttactcctggaggcgcagaaggggcctgtgagtctccaagaggccattcgagaacaggcgtctagctactcccgccagcagagggacctccacaatctcatggtggacttgaggggcctggtacatgctgctgggccagggcaggactctgggtcacaggcaggtagtcccccgaccagagacagagatgtagatgtcctttcagctgccttgaaagagcagcttagtcattccaggcaagtccattcatgtctagaaggcttacgagagcagcttgatggcctagaaaagacttgtagccaaatggctggggtggttcagcttgtaaagtctgcagcacacccaggcctggtggaaccagcagacggggctatgcccagcttcttgctggagcaggggagcatgatcttggcactgtcagacacggagcagagactagaagcccaagtcaacaggaacaccatctatagcaccctggtcacctgtgtgacatttgtggccacactgcctgtgctctacatgctattcaaagccagctaacccctggcccctcctccagagggtctgaggcaatagctgtgaatgtggatttaagtagagaatcgtagcaatgaagcgagcctttgggggcatgtacaacctcaatctgaaggagcagtatctgtgtggctcaccagcaggccatgcttcgctttgtagacaaggttcatttacattaattatcaaaactttgtgctaatgtccaattaaaatatcctgagttttattatttaaaacaaaaaaaaaaaaaaa

SEQ ID NO: 13577 - DNA, 517 bp, Homo sapiens
gagcaccatgatcaatccctgactgatattattgattattgttagtattaccaggcaaatgccccacaatctgaaaaagacaaatgaattcaaaaggacagcaaataattaccagacagatgatacattggaccaaatagacttcccgtggcttcctttcttttgaccttttggcttgcacttatcaaatgggacatatggagatggaggatagcaaaggaactaaaatataattagttctaccctggcatccacaaaacttctggccacactgtttcccagtgcacaacttataaatctcatggaatctctggaggaacccaacattcctcggggagtcctccaaggcccacactgccccttgcaggactccagatggattttgttgatttacttctggctttagggcattcccactgtttggttactgtctgaatgtttagtggatggattgaatgccaccggactggatgtgctgataccacaacactggtgaagaaattaataactcggctgg

SEQ ID NO: 13578 - DNA, 421 bp, Homo sapiens
gaggccttacaccagcccccacttgctgaaatccaccccacctccccactgcccaccatcctcctgatttcatgttcaaaggtcatgtcctctggggaggcttcccttgatgctcaaatgaggtcagtgtctaggggggtaagctcttgtggcctgtatggcaccctcactagagtcttaagtcccacagcaataagggctttgtctttgcttacagtatatgctcagtgcctagggcagacccctcaccaggtgagcatttgacagatatttgtctagtgaaggaatgagcggatgaatgaatgagtgaatgaatgtcaggcactgtgccaaggcaatttgtacacatctcatttaatccaggaaaccgtcgaaactgcaaatctcaactggggagtcaacccagactgacccacaccca

SEQ ID NO: 13579 - DNA, 1475 bp, Homo sapiens
caattcacaatagatttattttacataaaagaaaaagcttgctgttaatgaaaaatccagtagaaaacagttctgctttaagttgaggctcaaaagtagaagctgcttattagtgaaacctcaataaaaagagaattttgtaagaaaacattcttggcatgaaagctctaacataaattctgtaatgaaatatttaccatgcaactttattggcagaaaggccagtttctgatggctggtattttcagtctcttaacacattaacatggaagatacttaacctgctttatttagagttaattgtatataaatacaaagtcatgatgggcaacctttccatagtccacctacttaattgagcagttctaagtaggtaattggcaccttgcccttctggtttcccctttcccccattagccagtctgaatccattccaacaacactgaacacagtgatcacctcatctgccagaagtgataattcagtactgtttgctgcatcataatcatagagaaccctggcctttctgctgccactacactccttaaggtcactgaggttggaaggagaggtgattactaggccacttgttgaagccatggcagaagaaccaatcgcatttggtaaaactgatggtacaggtgtcacagaagtctgattgttgttactaagataattggatggaaaacttcccagttgtttctggaggtccaacatatactggtaacactgtgcatagtaagtcatctgggcttctacaaagtcattcagacagcgaaggtgatgggcatgtgtactgctgattccctctagcagaagtctggtaatctctgcttgacgatcaaattcactttgagttattcttaattcctgttcagatgaatttctagtttctgcagcttttgcccttttttagtctcgtttttgcagcatccaaatccagtctcttattttgcaatagtttcctttctttagcaattgttttgtaatctccttctataaagtttcttaaaggagtaagaaaatttaaggctgacgtttgaatcagttctctgtctgctgttccaattcttttttgggtttctccacatttaataagggcattaccataagctgttcctgggccaaactcagtccctgcatcaatcatatattgtcccaaaagttctgggttgtttatacgacttggagcttttctatccagtttctcataaacaaattcttctatcctggcatttggatttggctgcaataacacttcagtttgtttcattattttttctgtccatattttggtacattcagctttgctaaggaggttctctaagtgagcatccaattctgtcttctcagcctggccaagcttttcttctgtgaactgcacggcgcgactgaggaaggtgcctgcgtcggccgccagcttcttcacgttgaagtccatgatattcatcctaggcggcagccgggcggagccg

SEQ ID NO: 13580 - DNA, 1098 bp, Homo sapiens
attcggcacaggaaaaagagcaaaaagaaggagaaagtggagtcctgattcatgacacccttgggctccctcctgcctcctctctctcctccccttcccttctcccatctctgtccctgcaagcacagggctaaggagggatagagtaggaccctggaccacattcggaaggggaacttagagatcacccgaccaacccttcgttttacagttgcccaagagaaatcaggtgacttgcccaaggtcacacagctagttagcgggcagagctgcacttcgaattcaggtctcctgacttccagtccagtgctccttctactacacaacactgcctagttgtgggctgcctttgtttgggatgctgtccaccaatctgagcctagggcaagaaggccagaaatgggccgtgagctctcacaggctcagactaaatcagaggtcaaggcttcccctgagtaaggtccatttcttcccaggaatccaatctcctgtgggatgggagctatctctacatttaaaaatctcttctcttttccactttgggtccctgccctgctgctcaaagtgactagccaaattgacccctccaacagaaagtaatctttgttcccaagggctgatggcttagcttgtactaccccaaacattaaccctgagctttcttcatggaacctcttgaatgatggatggaagagctataagaggtggtaggcataggggcaagcccatgtaagctgaggattggggatggtttcatcaacataagaggccaggaacttgacccctttgaattgtgcatctcaggcacttcaaaactaaaaccaaatttagcataggaaaaagttgtttaatgctcagggcagaaatttggggaagttgaaatcctctgttggctttgggttgtataaggaggatcaaaacaacagaggaaatgctgactttctagctttgcatgacacctgggagcaatgcactgtacctgcctcactcctgtccagtggtcaggtttcccctgaccttccctcacccccagaaacacttgcttacagaccgaaactggcatcttactcttggcaccttgacttgcaccctctgagg

SEQ ID NO: 13581 - DNA, 611 bp, Homo sapiens
  misc_feature (1)...(611): n = a,t,c or g
gggttgttttccagattggtacatgctctccctctttggcactggagctattctgatgcgtggagaggctgtactattaatgacatgtgggaccaggactatgataaaaaggttacaagaacagccaatcgtccaatagccgctggagacatttcaacttttcagtcctttgtttttcttgggggacagctaaccctggcactgggtgttcttctgtgtctaaattactacagtatagctctgggagcaggatccttacttcttgtcatcacctacccactaatgaaaagaatttcatactggcctcaactagccttgggcttgacatttaattggggagccgttacttggatggtctgctatcaagggttcctgtgatccatctgtttgcctggcctctttatttttctggagttatgtggacactaatatatgacactatttatgcccatcaggacaaaagagatgatgttttgattggtcttaagtcaacggctctgcggttcggagaaaataccaagccgtggctcagcggcttagtgttgcaatgctgggggcactgagcctantgggtgtgaacagtggacagactgctccctactacgctggcc

SEQ ID NO: 13582 - DNA, 542 bp, Homo sapiens
gccggacgcgagttggagatgttggactcgctgttggccttgggcggcctggtgctgcttcgggattccgtggagtgggaggggcgcagtctcttgaaggcgcttgtcaagaaatctgcactgtgtggggagcaagtgcatatcctgggctgtgaagtgagcgaggaagagtttcgtgaaggttttgactctgatatcaacaatcggctggtttaccatgacttcttcagagaccctctcaactggtcaaaaactgaggaggcctttcctggggggccgctgggagccttgagagccatgtgcaagaggacagatcctgttcctgtcaccattgctctcgattcactcagctggctgctacttcgccttccctgcaccacactctgccaggtcctgcatgctgtgagccatcaggactcttgtcctggtgagacccctccttcattgtttcccctcatacatctccctctgccaaggagtgtgccccttttcctttctaccctagaataaacatctgggttctccagtcagaccttttaaaa

SEQ ID NO: 13583 - DNA, 609 bp, Homo sapiens
gagacccctgaatggttggacagtgattcctgccaaaagtgtgatcagcctttcttctggaacttcaagcaaatgtgggacagtaagaaaattggtctaagacagcaccactgccgcaagtgtgggaaggccgtctgtggcaagtgcagctccaagcgctcctccatccccctgatgggcttcgagtttgaagtgagggtctgtgacagctgccacgaggccatcacagatgaagaacgtgcacccacagccaccttccatgacagtaaacataacattgtgcatgtgcatttcgatgcaaccagaggatggttactgacttctggaactgacaaggttattaagttgtgggatatgaccccagtcgtgtcttgatgactctcccaggaatcagaaagatagtatttactaaagaaacggttgttttaacccaaatcattaccagagtggtaaagcagacatgtgagaagtaagaaagaaactaaagaccctgaatgaatttgcagattacccatgtgcacagtggggacctggccagtgagcactcgcaaggggactcttccaacttgttcatacaatataaaagaagctatttttttaacaaaaaaa

SEQ ID NO: 13584 - DNA, 1260 bp, Homo sapiens
tgtgcattaggttggcagcagaggaggtatgcagggagaggggttctgtgctcctgagattagttcagatggtctaaccattgttctatatgtgcattttagttaatattgtgtattaaaggataagtcttaatgctcaaagtatgttaaaaatagatgtagtaaatcagtccctttgtgaatgtccttttgttagtttttaggaaggcctgtcctctgggagtgacctttattagtccaccccttggagctagacatcctgtacttagtcacggggatggtggaagagggagaagaggaagggtgaagggaagggctctttgctagtatctccatatctagacgatggttttagatgataaccacaggtctacaagagcgtttttagtaaagtgcctgtgttccattgtgggacaaagttattattttgcaacatctaagctttacgaatgggggtgacaacttatggataaaaactagagctagtggaattagcctatttgtaaatacctttgttataattgataggatacatcttggacatggaattgttaagccacctctgagcagtgtatgtcaggacttgttcattaggttggcagcagaggggcagaaggaattatacaggtagagatgtatgcagatgtgtccatatatgtccatatttacattttgatagccattgatgtatgcatctcttggctgtactataagaacacattaattcaatggaaatacactttgctaatattttaatggtatagatctgctaatgaattctcttaaaaacatactgtattctgttgctgtgtgtttcattttaaattgagcattaagggaatgcagcatttaaatcagaactctgccaatgcttttatctagaggcgtgttgccatttttgtcttatatgaaatttctgtcccaagaaaggcaggattacatcttttttttttttttttagcagtttgagttggtgtagtgtattcttggttatcagaatactcatatagctttgggattttgaattggtaaatattcatgatgtgtgaaaaatcatgatacatactgtacagtctcagtcccataaaattggatgttgtgcctacacacaggatctagaagaatatgtcaaactataaactgcttgtgattgtgaatgactttgttctttgcttgtgtttttcaatttcctataatgcacatactaacttttaaaaaataaaggttattttaaaagcctgaaaaaaaaaaaaaaaaaaa

SEQ ID NO: 13585 - DNA, 881 bp, Homo sapiens
atcttttgaaagcccttgaaacgtcaaaggcagatctggagtcacttctgcagacaccgggtgggaagcctcgtggcttcagtgaagcagctgccccgcgagcctttggtctccactgtcgcctgagcatccatcttcagcacaagttctgctcagaaggaaaggtgtatttgtccatgttggaagacactggcttttggttagaaagcaaaattttatcttttattcaagatcaagaagaagactacctgaagcttcatagggtcatttatcagcaaattatccagacctacctgactgtgtgtaaagatgttgttatggtaggccttggtgaccatcagtttcagatgcaactcttacagcggagtcttggaatcatgcaaacagtgaagggatttttttatgtttcattacttcttgacattctgaaagagataactggaagttccttgattcagaaaacagattcagatgaagaagttgcaatgctgttggacacagtccagaaagtatttcagaaaatgttggaatgtattgcacggagcttcaggaagcagccggaagaaggcctgcggctgctttattctgttcagaggcctcttcatgagttcattactgctgttcagtctcggcacacagacacccctgtgcaccggggtgtactttctactctgatcgctgggcctgtggttgagataagtcaccagctacggaaggtttctgacgtagaagagcttacccctccagagcatctttctgatcttccaccattttcaaggtgtttaataggaataataataaagtcttcgaatgtggtcaggtcatttttggatgaattaaaggcatgtgtggcttctaatgatattgaaggcattgtgtgc

SEQ ID NO: 13586 - DNA, 1377 bp, Homo sapiens
agaatacagttaacccaagagagtggactccagagattgtcatttcaggacactttgatggtgtccaagacctagtctgggatccagaaggagaatttattatcactgttggtactgatcagacaactagactttttgctccatggaagagaaaagaccaatcacaggtgacttggcatgaaattgcaaggcctcagatacatgggtatgacctgaaatgtttggcaatgattaatcggtttcagtttgtatctggagcagatgaaaaagttcttcgggttttttctgcacctcggaattttgtggaaaatttttgtgccattacaggacaatcactgaatcatgtgctctgtaatcaagatagtgatcttccagaaggagccactgtccctgcattgggattatcaaataaagctgtctttcagggagatatagcttctcagccttctgatgaagaggagctgttaactagtactggttttgagtatcagcaggtggcctttcagccctccatacttactgagcctcccactgaggatcatcttctgcagaatactttgtggcctgaagttcaaaaactatatgggcacggttatgaaatattttgtgttacttgtaacagttcaaagactctgcttgcctcagcttgtaaggcagctaagaaagagcatgcagctatcattctttggaacactacatcttggaaacaggtgcagaatttagttttccacagtttgacagtcacgcagatggccttctcacctaatgagaagttcttactagctgtttccagagatcgaacctggtcattgtggaaaaagcaggatacaatctcacctgagttcgagccagtttttagtctttttgccttcaccaacaaaattacttctgtgcacagtagaattatttggtcttgtgattggagtcctgacagcaagtatttcttcactgggagtcgagacaaaaaggtggttgtctggggtgagtgtgactccactgatgactgtattgagcacaacattggcccctgctcctcagtcctggacgtgggtggggctgtgacagctgtcagcgtctgcccagtgctccacccttctcaacgatgcgtggttgcagtaggattggagtgtggaaagatttgcttatatacctggaaaaagactgatcaagttccagaaataaatgactggacccactgtgtagaaacaagtcaaagccaaagtcatacactggctatcagaaaattatgctggaagaattgcagtggaaaaactgaacagaaggaagcagaaggtgctgagtggttacactttgcaagctgtggtgaagatcacactgtgaagatacacagagtcaataaatgtgcactgtaatgga

SEQ ID NO: 13587 - DNA, 544 bp, Homo sapiens
gcattgatatagtgatcctcatagtaactaaaaagtaaagtagaggttcctcttcaaagactttcctccccatctaattaggaataaatggtaacttctcttataagcaaaatttattcaaagacctgtgctaacattcttaaatatctgctagccataataaagaaatcaatgtactttatgttcttagctcccacaatttagcctaaatatttgccctggcatgcttatactggtccaagcaagcattaggtcatagcctgttcctcttccttatttaaaagtgtttttacctttctcagcattccacaagttacttcctccttcctttcttctcctctgcctttacgccttttaaaaagttctaagccaatcaaaacaagtacaaaatgtgaggttccattccagccagtggaaactggacacagcagtagggtggatgcgtcaggttataaatgaacctgtctcctttgttcggtgtactctcatggcaaatctgctggggagtgtaccctttctgcagaaagtgtaaaaatggccttgc

SEQ ID NO: 13588 - DNA, 2360 bp, Homo sapiens
  misc_feature (1)...(2360): n = a,t,c or g
tttttttaggtgtcatttttactttatttaaggaaaaaagggtagggggacaacagtaattttcataatacacagtagacaagttagcactgcaaaaaaaagggctgtgtacttgccaccagtctgctttgcagccttttataattagtaaatttaatgcagtttgtcatttgtattactatttagcaaattaataattggcaaaattagggtaagtgtgctacaactaagacgaaaacctaaataacccataaaaagtcacttaaaataaaccataaatatgtggtgcgcattagtgtaacaaaaccatttttgtaaacattttctccaacgtaacatgtgcatgagaaaagagtaaaaaacactgcactcaatacagaaagggttactctgattttaatacagaaaggttattacttgtgaaagctctgactaaacctagagacatttttgttttgtttggaagagcactcctctaacagttcaatgttccttatgtaatggtgtcattgcaatactgttttcttgtgtaattttgccatattggcacttctgtggagaagttactaccctgtaaaaggggggaaaataattcctttcctaaaagaatctaaacatttcgacgactcccaatctttaacggagaaacttcactgggtccctgcatcaagctatagcaactcaatctggttgacaagggggtgaggctaagacgggaaggaaaaaagccaagtaaagcacagaccaggaagcccccgccgagaaggacaaagggtgttccaatttcagtaacttaagcccaacaatggattcaattcagttcaccacaaacaccaccagagtgcccaccgggtgcctggagctgcacaagcaagccaagcacaactcggtgtgagctcagacccctttacccacctatgggaaagccagcaagttctaagcacttggtaattccaatgaaacaccatttgcatttttttttgtgtaacatttgacttacagacatggagcttcaagtctttggataatgttaagaccattatgccacatcctttgttctctgccttctcccacttagcatcagacattgagcatttcttcaaagacatctgcccaccttttactgttctccacctgtgcctttccttcttctcttgatatgtacacgagtgtgttcactgtggcatgtttcatcttatgaaaagcctaaacatggatataaattacaagcaggaatttaattctaactaaagtcctgtggcgatggaatccagcctacctcaaatccctttaaaggtaggattaatttttcaaccttctctaggttaactacaaaccagtaggcggctttggccttcagcactgctccaaactcatacaaatgaaacatccatttccatcttcctttactttccccaaaaagtaagcttctcagcttgtctttacaggtatacacaaaaccaccagctgctgtgtctgcattcatgagtggatgtacttgtcttaccagatgtttgtagctcaaaggagggcctttttcaaaaagatggaaccaggaacaggaaactgacaagaggtcagagtggggtgccaagtgggatgggaagcaaacaggtacaaatgggctgctgtgtttaggtggggtgggagcagagggaanatcccccattttcacnatatacaggaaaattanccncaaaggaaaaagatcnagcctaaaaaacagcaagtttcttttgatgactgaggttaaagcagccataatgcagttatttccagtcagaactccgacaagaggaaagtaagatggcaggactgtgacatggagtcctgatcctttcctgagacggtaatatccttacgggagcttgagtgatgaccatgaagccatgaaacaaattctttctcaagacatttattacaaatgtcatgaatatattcataaagtaaaattggtttaaaaaaacagagaacaagagagcaagtgagaaaacgagaaaagccaggacttcgatattacacctaaaacacagaagatgcccactttatgaataagcagaattaactacattcttaaaatagttttagtgcattgcatttttagaaaagggaaactcccccacccccaagaaaaggttcctgcaacactgaacagtttgtgtgactattctaatgtaaccacctgtctgctaccaacccctctacatcgagaacaatgagatcttgtgtcatgggctgcagttgccccatcaacctctaatggtgaatctggtaaaaacaaagcattctggtttctaaacttgtaagtaaactgcatcagccttaaggctatttcccatcttcatggacagttcttgtgc

SEQ ID NO: 13589 - DNA, 1061 bp, Homo sapiens
gggaagatttgggctatctaggctattcaatattgactgagcaagagtctcaagcttcagctgttacagtgacaagagataaaaagatagacctgcagaaaaaacaaactcaaagaaatgtgttcagatgtaatgtaattggagtgaaaaactgtgggaaaagtggagttcttcaggctcttcttggaagaaacttaatgaggcagaagaaaattcgtgaagatcataaatcctactatgcgattaacactgtttatgtatatggacaagagaaatacttgttgttgcatgatatctcagaatcggaatttctaactgaagctgaaatcatttgtgatgttgtatgcctggtatatgatgtcagcaatcccaaatcctttgaatactgtgccaggatttttaagcaacactttatggacagcagaataccttgcttaatcgtagctgcaaagtcagacctgcatgaagttaaacaagaatacagtatttcacctactgatttctgcaggaaacacaaaatgcctccaccacaagccttcacttgcaatactgctgatgcccccagtaaggatatctttgttaaattgacaacaatggccatgtatccgcacgtgacacaagctgacctcaagagctccacgttttggcttcgagcaagttttggtgctactgtttttgcagttttggggctttgctatgtacaaagcattattgaaacagcgatgatataaaaagaaatactgtccctaccaaaaacaaatacttttatgtacattctgaatgctttaagttctgctagaattattgagatatttatacatgcagagttactttattaatatttgtaattcatgcataagagtattttaatgatagttataactgcagtattggctagcatatggaaagaaaacagctaacagccaaactaaaatggctaaattccagaggccaaaagggaatattttgtaaatatatgtacatattcaggcaagatatggtctcccaagctgagttctagaaatgatgtttctagacatttctaagtgggtattgttagt

SEQ ID NO: 13590 - DNA, 465 bp, Homo sapiens
caggatgtttgatttcaggagacgatacaggattaaatctaaggggcacatctcacactgaagagcaaaacacatcaataccaatctcctgagcattatgttcattgtggagattttttcatgaccagtgtttctcgaagtatgctcctacgctaggtaagtcttgaatttattaattactttgccagttagcaaaaataatgggtaacctctacactggaagccgagagaagatggcagatgatttagtttacaattatatatttaaagcttaacggattgcttttttcattttggtgtgcttgggaacacagccctcctacccctatccctgccgcttgttttccatcctgagcaagtttgagagctgcagagggaggtatgggcactcttgcatcaggatgtgagttttctaacagctgctccctaaggccaaaagaagagccttacactaacagctggggt

SEQ ID NO: 13591 - DNA, 5893 bp, Homo sapiens
ccacgtcgcccaccggtgccccggcgctctcctggctcccttctgccccagctccgtctcggcggcggcgggcagttgcagtggtgcagaatggctgacctcagtcttgcagatgcattaacagaaccatctccagacattgagggagagataaagcgggacttcattgccacactagaggcagaggcctttgatgatgttgtgggagaaactgttggaaaaacagactatattcctctcctggatgttgatgagaaaaccgggaactcagagtcaaagaagaaaccgtgctcagaaactagccagattgaagatactccatcttctaaaccaacactcctagccaatggtggtcatggagtagaagggagcgatactacagggtctccaactgaattccttgaagagaaaatggcctaccaggaatacccaaatagccagaactggccagaagataccaacttttgtttccaacctgagcaagtggtcgatcctatccagactgatccctttaagatgtaccatgatgatgacctggcagatttggtctttccctccagtgcgacacgtgatacttcaatatttgcaggacaaaatgatcccttgaaagacagttacggtatgtctccctgcaacacagctgttgtacctcaggggtggtctgtggaagccttaaactctccacactcagagtcctttgtttccccagaggctgttgcagaacctcctcagccaacggcagttcccttagagctagccaaggagatagaaatggcatcagaagagaggccaccagcacaagcattggaaataatgatgggactgaagactactgacatggcaccatctaaagaaacagagatggccctcgccaaggacatggcactagctacaaaaaccgaggtggcattggctaaagatatggaatcacccaccaaattagatgtgacactggccaaggacatgcagccatccatggaatcagatatggccctagtcaaggacatggaactacccacagaaaaagaagtggccctggttaaggatgtcagatggcccacagaaacagatgtatcttcagccaagaatgtggtactgcccacagaaacagaggtagccccagccaaggatgtgacactgttgaaagaaacagagagggcatctcctataaaaatggacttagccccttccaaggacatgggaccacccaaagaaaacaagaaagaaacagagagggcatctcctataaaaatggacttggctccttccaaggacatgggaccacccaaagaaaacaagatagtcccagccaaggatttggtattactctcagaaatagaggtggcacaggctaatgacattatatcatacacagaaatatcctctgctgagaaggtggctttgtcctcagaaacagaggtagccctggccagggacatgacactgcccccggaaaccaacgtgatcttgaccaaggataaagcactacctttagaagcagaggtggccccagtcaaggacatggctcaactcccagaaacagaaatagccccggccaaggatgtggctccgtccacagtaaaagaagtgggcttgttgaaggacatgtctccactatcagaaacagaaatggctctgggcaaggatgtgactccacctccagaaacagaagtagttctcatcaagaacgtatgtctgcctccagaaatggaggtggccctgactgaggatcaggtcccagccctcaaaacagaagcacccctggctaaggatggggttctgaccctggccaacaatgtgactccagccaaagatgttccaccactctcagaaacagaggcaacaccagttccaattaaagacatggaaattgcacaaacacaaaaaggaataagtgaggattcccatttagaatctctgcaggatgtggggcagtcagctgcacctactttcatgatttcaccagaaaccatcacaggaacggggaaaaagtgcagcttgccggccgaggaggattctgtgttagaaaaactaggggaaaggaaaccatgcaacagtcaaccttctgagctttcttcagagacctcaggaatagccaggccagaagaaggaaggcctgtggtgagtgggacaggaaatgacatcaccaccccaccgaacaaggagctcccaccaagcccagagaagaaaacaaagcctttggccaccactcaacctgcaaagacttcaacatcgaaagccaaaacacagcccacttctctccctaagcagccagctcccaccaccattggtgggttgaataaaaaacccatgagccttgcttcaggcttagtgccagctgccccacccaaacgccctgccgtcgcctctgccaggccttccatcttaccttcaaaagacgtgaagccaaagcccattgcagatgcaaaggctcctgagaagcgggcctcaccatccaagccagcttctgccccagcctccagatctgggtccaagagcactcagactgttgcaaaaaccacaacagctgctgctgttgcctcaactggcccaagcagtaggagcccctccacgctcctgcccaagaagcccactgccattaagactgagggaaaacctgcagaagtcaagaagatgactgcaaagtctgtaccagctgacttgagtcgcccaaagagcacctccaccagttccatgaagaaaaccaccactctcagtgggacagcccccgctgcaggggtggttcccagccgagtcaaggccacacccatgccctcccggccctccacaactcctttcatagacaagaagcccacctcggccaaacccagctccaccaccccccggctcagccgcctggccaccaatacttctgctcctgatctgaagaatgtccgctccaaggttggctccacggaaaacatcaagcatcagcctggaggaggccgggccaaagtagagaaaaaaacagaggcagctgctacaacccgaaagcctgaatctaatgcagtcactaaaacagccggcccaattgcaagtgcacagaagcaacctgcggggaaagttcagatagtctccaaaaaagtgagctacagccatattcagtccaagtgtggttccaaggacaatattaagcatgtccctggaggtggtaatgttcagattcagaacaagaaagtggacatctctaaggtctcctccaagtgtgggtctaaggctaacatcaagcacaagcctggtggaggagatgtcaagattgaaagtcagaagttgaacttcaaggagaaggcccaggccaaggtgggatccctcgataatgtgggccacctacctgcaggaggtgctgtgaagactgagggcggtggcagcgaggctcctctgtgtccgggtccccctgctggggaggagccggccatctctgaggcagcgcctgaagctggcgcccccacttcagccagtggcctcaatggccaccccaccctgtcagggggtggtgaccaaagggaggcccagaccttggacagccagatccaggagacaagcatctaatgatgacattctggtctcgtcttccgtctcccccgtgttcccctcttgtctcccctgttcccctctcccttccctcctcccatgtcactgcagattgagacctacaggctgacgttccgggcaaatgccagggcccgcaccgaccacggggccgacattgtctcccgccccccacacttccctggcggccccaactcgggctcccgggtccttggccccctttcccgggctgtccactagaccagtgagcgcttgggcgccgtgctgggcagcccgctaggctcgccttccctcctgctttgcgtgcccggggcagcagcagccctgccccacacctcctctcactccccagcctgggcccatctccctgctttggtcttgccccatcactgcggccactgctccgtggagggaggttgggagggggttggggtggttgaggctaagttgggatctaggagaggagaaccagattctatcctcatctttttttggttctttgggtccaaacccaaaagaaactgacatgccctcccttctccctggatctacctggagggaagactggaggtggattccgagtggtgacaggacgctgaccgtggagcttaagccactgcctctccctctggtcccacaaatgggcgcccccccctccccatgcaggtggtgtcgggcccttcttgctgccctgccccaagttgggggtcagtgctgcctgtcccatgcttaacataaccgcctagctgctgtcacatttttcttgttttgtccttttatttttttctaataacctaaaaactggcaaaatagttctgcaggttgaagccatgtctacatggaaagtcctcagtaagtgttagagggaacagggcggagatatccttatgccacccccgctggaggatgtgggcagcttagggccctggaggcggtgcggcagggaagaggggtgcagaggctgtggctggtgagccggtcaggcacacaagggggcccttggagcgtggactggttggttttgccattttgttgtgggtatgctgcttttcttttctaaccaagaggctggttttggcatctctgtcccattccctggggatctggtggtcagccctagggataaaaagccagggcctggaagacaagaaagggccaggagatggaattccttcaggcccggcaccccacacccttaggacatgtaagccctcatgtccaagggagcctcatgcagatagtaggaaatcaggtctggaaatttaaaaataaaaggcatgagactaaggctatctgcttcccttatgccctgactggagaggggagggaggagaggcaaggcccacagagggcatcccagctaggccttgggatggctgcagtgaggagaaatcccgggaactgtattgacacaaagattcttattgcacttgtattttttgtattaaagtttgcatggtttctaataaaggattcaaacataagtttgtagtgaaatggcctgggagattccaagggcttctctggagggggattggctgcagtgtagatttgcctctgaggaggctgccccagacttggcctcctcatgccccctcctgacctctgcccttctctggtcctggcatccctggagaaggtaggggtcttgaccctaagtttagatttgatctccatgtgcagggaggctgtcctggggcctgacaggtcctccccctttctgaggtaggcagtgccttgtggaggtttgacaccatgtccctagctccccaagcacacaccaggaaactgcaggggctcacggaggaagtgctgcctgggccagggggaccagctttcctccgtagagaccatgtgcagaacacttctgctgtgccaagaacatgagggagccagtgttttgtcagcaggaagaaagggcctgctgggatgaaagtgggaaggaaacagggttgggtagtcaggagacacctcaggggcaacagcacaggcccagagtacctgcttgcctccactgcgtctgtcctggggtcatgaggatgctgaggttgacgacaggttccaggtcctttcactcctttggccaaaggttgggggtaggtggcccaagtggcgtgctctctaggtagacaacaggagtggtcagagttccctcaaagaaggatcctccactccagagcacctgagaaggccgggaccagaggccctgtgtgatgtgtactccgcagctgtttggggtgggacatttctgtacttctcgatttgcttatggctcagcccattacctgtgtcagtccatgattctgttgtaacagttttaagagtaaataaataaagctgcctg

SEQ ID NO: 13592 - DNA, 724 bp, Homo sapiens
gtcggaagcatccactctctcctgaggcgagccaccttgggttgctggagctcaccagtcttgagggaggtgcaggggaaactgtgttttttatcttcatacatgacggtgggcagagaggcctgtcttaaagtttccatggaattgttttataaaatatcttaagagatgaataccttatcagctgttgcttgaaacctgttaaaaatgttcataacattggatagtctagtctctaaatgatggctaagtagtggggttggctttgaaaacaatgttttatgcaacaaggaacgaatggtagcagccagctttgcggggcgtatgtgtggccagctcttaaccattccagtctattacttgggtgaatccctgtggacaaccacacacacgtgcccacatggtactagctgccgttcgtttctcgttgcctaagatgttttggcaactctagagccacaggcctaagtcattaaaaaattctccctttgtaacctcagtgctggggactgaggcgagccccctcaggtcgctggagtgcaccagtcttggggaagaggtgcaggagaagctgtgttttttatctccacacgcagtatgaagataaaattacatagtattacctagacatagacagtattacctagggtagatgcactgatcacctgcgcccttccccagctctcatttttgttaggtgatttttggatagggatagtgtttt

SEQ ID NO: 13593 - DNA, 1508 bp, Homo sapiens
attgttaggctagaaaaagattacacttcataaaaccatgtttattcaaaaaaatctattcagaaagtctggaaagcgtaataaatatctgtacagtggccacccatctcaaacatgaattacaaagcaggaacataaaaatgatgtgtaaacataactgctgagccagtgaacaaagtgctgagtcaggagcgaggcagagaagcgtgctcagtagaacgacacagatgctgcggcctccgtcctcagcccctcaaggctgcgctggagtccaccttccgccctctccacaccgctcagggaccggcagcgtccttctccattctcgaatttgcatgacgcttagaaaggtaggaggcagcaaaacgtgtcagaaatgaacggagtgcaaatcaaactttgccatgtgcttgagagaatcagtaaagcgttaggtaaaaatcccaagtgcagctttaggataacaccatttaatgaacaatactggataacattaagtactattatcactttaaaattcaaacaatcttccaaacatcaatacatacacagttagtttaaaatcacagacaaatcggacttgagggtaaaagtgaaatcctcacctcttgcccatgtttgactttgggatggaattcagcaaagctctcccactgcagattgggagaatcaggtatttctcccacatggggggctgccagggaaggaggaccctatagggtggccagcaaggggccactggcggtaggtcaggaagcctgagatctagggttcaatgtgtttataagttctgtgattttcatgacccgggggtggggggttgggttatgatgaactgtgtgaggaaggagagccagttaacttttggggaggtctatgtcatttgtgcaaatcatacggagcatttcattcgttgtggaggtgcgctgagctggcaaaatgcgaattctaagaacaccttcatttacatgtcgactgctgcttgaaagcagtcacttgctatttcactaaggtttttgaaagcttagtttaacatatgataccataacttctttaggctgacttttgtggaaggatgtcaagtatcattttgttctggatatgggagggaaagtagaggtatttcacagacactcagcggagcagggccaagccagtgttctcctccgctgatgcacatcaaatacatgtaaggacagagctcgctgtgatggggagtctcgtcggtccctttggcattcttagagttcagaagctaagtctgtacaaactgggatgactgaaaaagaccatgagctgtcgccccatgggcacacaaggagggaaaaccgtggccgctttctcacggatgctttccctttcacttcccccacttctcactccctgcaccagaacccactgactttaagcaaacagacaggcctgcacaccaagccaggccaaagggtccgggcagctgatgggggaatcgttgcctgtgtagcaagcagaaaaggtgatgacttttg

SEQ ID NO: 13594 - DNA, 1828 bp, Homo sapiens
  misc_feature (1)...(1828): n = a,t,c or g
cgagcccgagtggttcactgcactgtgaaaacagattccagacgccgggaactcacgcctccaatcccagacgctatgtccagcaaaggctccgtggttctggcctacagtggcggcctggacacctcgtgcatcctcgtgtggctgaaggaacaaggctatgacgtcattgcctatctggccaacattggccagaaggaagacttcgaggaagccaggaagaaggcactgaagcttggggccaaaaaggtgttcattgaggatgtcagcagggagtttgtggaggagttcatctggccggccatccagtccagcgcactgtatgaggaccgctacctcctgggcacctctcttgccagggccctgcatcgcccgcaaacaagtggaaatcgcccagcgggagggggccaagtatgtgtcccacgggcgccacaggaaaggggaacgatcaggtccggtttgagctcagctgctactcactggccccccagataaaggtcattgctccctggaggatgcctgaattctacaaccggttcaagggccgcaatgacctgatggagtacggcaaagcaacacgggattcccatcccggtcactcccaagaacccgtggagcatggatgagaacctcatgcacatcagctacgaggctggaatcctggagaaccccaagaaccaagcgcctccaggtctctacacgaagacccaggacccagccaaagcccccaacacccctgacattctcgagatcgagttcaaaaaaggggtccctgtgaaggtgaccaacgtcaaggatggcaccacccaccagacctccttggagctcttcatgtacctgaacgaagtcgcgggcaagcatggcgtgggccgtattgacatcgtggagaaccgcttcattggaatgaagtcccgaggtatctacgagaccccagcaggcaccatcctttaccatgctcatttagacatcgaggccttcaccatggaccgggaagtgcgcaaaatcaaacaaggcctgggcttgaaatttgctgagctggtgtataccggtttctggcacagccctgagtgtgaatttgtccgccactgcatcgccaagtcccaggagcgagtggaagggaaagtgcaggtgtccgtcctcaagggccaggtgtacatcctcggccgggagtccccactgtctctctacaatgaggagctggtgagcatgaacgtgcagggtgattatgagccaactgatgccaccgggttcatcaacatcaattccctcaggctgaaggaatatcatcgtctccagagcaaggtcactgccaaatagacccgtgtacaatgaggagctggggcctcctcaatttgcagatcccccaagtacaggcgctaattgttgtgataatttgtaattgtgacttgttctccccggctggcagcgtagctgggctgccaggccccagctttgttccctggtccccctgaagcctgcaaacgttgtcatcgaagggaagggtggggggcagctgcggtggggagctataaaaatgacaattaaaaattatcacaacaattagcgcctgtacttgggggatctgcaaattgaggaggccccagctcctcattgtacacgggtctatttggcagtgaccttgctctggagacgatgatattccttcagcctgagggaattgatgttgatgaacccggtggcatcagttggctcataatcaccctgcacgttcatgctcaccagctcnttcattgtaagaagagacagtggggactcccggccgaggatgtacanctgggccctttgaaggaacggacaacctgcactt

SEQ ID NO: 13595 - DNA, 646 bp, Homo sapiens
ggcagtcctctgggaataaacagctgccctagccccagagggtccctgcacccaggaggcctcctgacaccagccaaaatcctgacagcagggtctgccctcttgagtgtggggagcccctagtcctttaaggttggctgctaaggcctgtgctccaaagcaacgggctggggcagcctgcagctgcctacccaacctggtcttcacaccagattgcacaggatactgggtcttgtctatcttgatggagaagaggggttcctgcccaggatcttacaacacagcaagtagcatagagctctttccttcctcttttttggggaggttggggtcaggggttgtttctttgagatttaagttttcatttttgaggggtaatcaccttcaagtaaaacagtaatagcaagagtgaaggtactttggaaccactaacacctctgcacagggcagttagccagctcaagttctttttcagagaaagggacttggccagtggtttaagtacctgccccttcacctctcagacgaggcagctgacgaggcagctggcccagtcttgggagtctgctcaggacagtggtggagctgggtcttgaaccccagtctgcacctaaaaaactaaaggaaatggatttttttttttttt

SEQ ID NO: 13596 - DNA, 533 bp, Homo sapiens
gaacaacaggaacaccagttaaactaattaggaaaagagggagatttccaggcctgggtaactatatactgtgaccattggaggtagagacaggtctcaacagttggaaccaggaactctgctgtcaggttgtgagttttgtttctcttccagcttttcactgtgtgggggtcttttctcttatgtcagctctttctatcacatggcagctgacctctcacgctccactctgcagcttggacacccagtagaccctgaatttcactctctctaaaaggttctgagggctcatcctgggccaggggccctcctgtgcactgttagctatggccacgggagcctccagagctgcctggtagcttcaggttgacctgcttatcaggcctacgatccttctgatttaagtacagctggaaagtattatctaattaagttcatgatagtgcttttggagaacttgtcaaattacagccaatgagaaaataaggacctagcataccgtggagaaccattaaaaatttgagaagaaaaaa

SEQ ID NO: 13597 - DNA, 1958 bp, Homo sapiens
gggaagaaaagaaagaagacaaggtggaaaagttgcagtttgaagaggaggactttccttccttgaatccagaagctggcaaacagcatcagccatgcagacctattgggacaccttctggagtatgggaaaacccgcctagtgccaagcaaccctccaagatgctagttatcaaaaaagtttccaaagaggatcctgctgctgccttctctgctgcattcacctcaccaggatctcaccatgcaaatgggaacaaattgtcatccgtggttccaagtgtctataaggaacctggttcctaagcctgtaccacctccttccaagcctaatgcatgggaaagctaacaggatggagcacaagtcaggatccctttcctctagccgggagtctgcttttaccagtccaatctctgttaccaaaccagtggtactgggctagtggtgcagctctgagttctcccaaagagagtccctccagcaccacccctccaattgagatcagctcctctcgtctgaccaagttgacccgccgaaccaccgacagggaaggagtgagttcctgaaaactctgaaggatgaccggaatggagacttctcagagaatagagactgtgacaagctggaagatttggaggacaacagcacacctgaaccaaaggaaaatggggaggaaggctgtcatcaaaatggtcttgccctccctgtagtggaagaaggggaggttctctcacactctctagaagcagagcacaggttattgaaagctatgggttggcaggaatatcctgaaaatgatgagaattgccttcccctcacagaggatgagctcaaagagttccacatgaagacagagcagctgagaagaaatggctttggaaagaatggcttcttgcagagccgcagttccagtctgttctccccttggagaagcacttgcaaagcagagtttgaggactcagacaccgaaaccagtagcagtgaaacatcagatgacgatgcctggaagtaggcatataaatgctcacagttaaatctgacccagtaaactctgtgtgtttagggagtatacaaaagaaatcgttcttttccttttcttatgttgttgaatacttcattcacaagggaaataatcatatcccaaagagagagcaattggcttgttttgcttttgttattgttcttccctgttatctgctttatagagagaagtttgtgtggtgggacagattttttaaacacactcatacacacacacacatacacacccagtatatatggggcgatgcacaggtaggagctggcagtgcagggaagaggagacactggtctgcagcaacagcttctactaccagcccttggggcactcacccctgtgatcaagcaatcattgtcaatgacaaagtgactattgaagttataattgtattaaattaatgctaataatttggatattttattttatttttggctgctcgggtaactttagcccttaaccaagcatatgtgggtttttttggttgtttttttttgttttttttttctttttcctttttgggtacagctgtaaaatatttggatataggaaatgttgtgttattcttgcagccttgatattcagggtggattgtaaaatataaatttttgtgagatttcaaagattaagattattttgataacattatttacagatttaaaagatgtggttatcacaagtctcgagggggaaactactgcataaaataactaacttggaataaatattttgcatcagtttggattgtcttgtgtaagaagtatattttctttaaaattagatgagtggattcttttttaggggaaatatttttagaagttggggggaaatgtgaattcagacacaactttctctattttagcagatacttttttgatgcagaaaaacctgtgcaataaattaccagtaataaagtcagaaacca

SEQ ID NO: 13598 - DNA, 649 bp, Homo sapiens
ctttccaaaatggcagcctccagtcgcgcacaagtgttatctctgtaccgggcgatgctgagagagagcaagcgtttcagcgcctacaattacagaacatatgctgtcaggaggataagagatgccttcagagaaaataaaaatgtaaaggatcctgtagaaattcaaaccctagtgaataaagccaagagagaccttggagtaattcgtcgacaggtccacattggccaactgtattcaactgacaagctgatcattgagaatcgagacatgcccaggacctagcaagccggggaccagccaccagtggcggccagggaccaccttcagcatccactctctgtttgagatgggggctcccaaaaccagcttacaatagccttttgcgctgcctgtcctgtgggagctgataaaccaagtcacatttgcattctgttgcaggcttagtgaaaaaggactgctgtctttccttggttcaagtgttagaatggagagctggagttcgttcagaatagtgctgtgtgttaccacgtctcccctgcaccccattcctaccttgtagctcatgaccattgtgtatagcatttctacactttgtttcttggtccttggcaataaaaagaatgatctccctgagcctttgacccca

SEQ ID NO: 13599 - DNA, 1702 bp, Homo sapiens
  misc_feature (1)...(1702): n = a,t,c or g
gcgggcccgccgcggccttcaccgccgcgcgctctgacgccggcataagggccatgtgttctgaaattattttgaggcaagaagttttgaaagatggtttccacagagaccttttaatcaaagtgaagtttggggaaagcattgaggacttgcacacctgccgtctcttaattaaacaggacattcctgcaggactttatgtggatccgtatgagttggcttcattacgagagagaaacataacagaggcagtgatggtttcagaaaattttgatatagaggcccctaactatttgtccaaggagtctgaagttctcatttatgccagacgagattcacagtgcattgactgttttcaagcctttttgcctgtgcactgccgctatcatcggccgcacagtgaagatggagaagcctcgattgtggtcaataacccagatttgttgatgttttgtgaccaagagttcccgattttgaaatgctgggctcactcagaagtggcagccccttgtgctttggagaatgaggatatctgccaatggaacaagatgaagtataaatcagtatataagaatgtgattctacaagttccagtgggactgactgtacatacctctctagtatgttctgtgactctgctcattacaatcctgtgctctacattgatccttgtagcagttttcaaatatggccatttttccctataagttttatgtagttaaatgcttcctagaaacctaaataagatctattaatttctgacgagaggtgttcttctagaattaattacttttatcttttgtcttcatttgtggccaaaattatgtttactagaggaaatttgggatcattctcagctaattccaaaatgtagtgctctattgcatggatccttggtaatcctcaagcatcagatgccataaggggaaacttaattctgctaaattaatgtttattttgtgagaagtgactttatcttcatttggggtagaaaaattatttctttatgtagtagagacaaattattctcattttgcaagtactttcaatttaagctacaaattgagaaaaccgttataaataagaataaaannnnnnnnnnnnnnnnnnnnnnnnnnnnnnnnnnnnnnnnnnnnnnnnnnnnnnnnnnnnnnnnnnnnnnnnnnnnnnnnnnnnnnnnnnnnnnnnnnnnnnnnnnnnnnnnnnnnnnnnnnnnnnnnnnnnnnnnnnnnnnnnnnnnnnnnnnnnnnnnnnnnnnnnnnnnnnnnnnnnnnnnnnnnnnnnnnnnnnnnnnnnnnnnnnnnnnnnnnnnnnnnnnnnnnnnnnnnnnnnnnnnnnnnnnnnnnnnnnnnnnnnnnnnnnnnnnnnnnnnnnnnnnnnnnnnnnnnnnnttaaaataatttggatgaaaatcatgtttatttaaatagtaatgtcatgagactattaaagatgtgccagagtttcaatgaaaatcattaaagtaggacagctaagaaattaatattaatatcaaaattattgataatcttaaattattgattattccttaacgcactccattctccttttacattttatcatgtttcttttgaatatatgaattggcaaaggacttgatgaaactgagtactaagatttggtacagagtatgtcaggaagacaactcagattgccattttaaataaagttgtacatgaac

SEQ ID NO: 13600 - DNA, 805 bp, Homo sapiens
atcaactgctccacaccggccaactacttccacgtgctgcgccggcagatcctgctgcccttccgcaagccgctgattatcttcacacctaaatctctgctgaggcacccagaggccaagtccagctttgaccaaatggtatccgggaccagcttccagcgggtgattcctgaagatggggccgcagcacgggcccctgagcaggtgcagcggctcatcttctgcacgggaaaggtgtactatgacctggtgaaggagcggagcagccagggacctgggaggagaaagtggccatcacgcgcctgggagcagatctctccattccccttcgacctgatcaagcaggaggcagagcaagtacccaggtgcggagctggcctggttgtcaggaggagcacaagaacatgggctactatgactacattagcccacgcttcatgaccatcctgaggcgcgcacggcccatatggtatgttggccgggacccagcggctgcaccagccacaggaaacaggaacactcacctggtgtcactgaagaagtttctggatactgccttcaatctccaggcctttgagggcaagacattttagagctgggcaaaacctgtgtaggtctcgctgtgggtttgctggggaccaagggggtgatgaaaaggggaggggcggagctcctgcccaagagaggggctgtggggccccaggataaaacagacacagtgacagggccaagagccagcactgctggccttggtgtcatgccagaatctaccaggactgagggagccagaggagtcctgtaggca

SEQ ID NO: 13601 - DNA, 2431 bp, Homo sapiens
ggactccctccccagctcggtcattagtgccatcagtggacagctgcagtcctacagcgatgcctgagaagagctgtctgtcgtaaaagtcactctggggtttctgagcacagctggaggggatccaaacatgcagctgaatgagtatactcaagacatcctgcaaatgggtgatcagacgattcacgtgttaaaggccttaaacagatgccagttaaaacacaccattgccctctggcagttcctgtctgctcataagtctgaacagctgctgcggctgcacaaagagccatttggggaaatcagttcaaggtacaaagcggatctgagcccggaaaatgctaagctcctcagcacattcctaaatcagactggcctagacgccttcctgctagagctgcacgaaatgataatcttgaaactaaagaacccccaaacccaaaccgaggagcgcttccgccctcagtggagcctgagagacactctcgtaagttacatgcaaactaaagaaagtgaaattcttcctgaaatggcatctcagttcccagaagagatactgctcgccagctgtgtctcagtgtggaaaacagctgctgtgctgaaatggaatcgagaaatgagatagaattatttcctcagctatctttggatgactttggagagaagactcctctctcctcgtctgcggcgtggacttgatcatggactggtgcctttgcattcagaaggagagctgtcagcgtagcaccgaattcaagaccaaggcgtgctacctgagctgacagctttttgaaagccgagctgtttctgaaccatgtacatacatgttctgaaactttctcatcattttatgagtactgttcattgagagatgacaatgaagattagatgaaattggaaataaaccaacattgtttacattccaggagacttgtagctcagccacacacgcagtaatgacctgtgcccgttcgcctctggcactgcccacccctctttttttttttcttctaattctgtactcacaaaagagaatctcattttcttctttcttccattcccttaaattctgagtactgtacatatatttctgggttcccacgatgatgtgaaaaactaccagactgttttttgtcttctcacaaagacaagaaaaatcagggcattttgtgagtgccttaagatcaaactaacaagatctgaccctctcccctcacagtgagccactgccccacttcagagggtaagagccaaaagcctcattgtgaaaggcactggacttggaccagggacaccatcagggccttggttttctcacgcataaaatggagagtggattaatcgccaaagattcttctgatctgacattttgaaattgtgagagaaactagatgactgtaaacttggtcacaggcctggttctggcagttctttgcggacttttttctagcattatgccaaataaacatgcagtctcagtgtgctctcgcatgtatgaatatctagtcctttctgtggttctcagccaagacataaaaactaggactcagagcacatacaaaaccagttatgtttcggaaagagggaaaagagtccccgagcccggatcttgtgctgcttttctcactgacgtgttgccttttttctttacaaaatctgctttgatacttaggacctctctggactaatttctcttcctagacagctcagcacagctattgatatgttagaggcagtatccttaatattcattctaaatgagttaacgacttaacttgaaattgggcctaaggagtgagaactacaaaaatacaaaatgcttgtccaggactcagccatgcacaccttgagcagcgccggcaggaggcacggaaggaactgtgctccgttctcctcactgtcatggtgccaccagtgtctgatgaagggcagagtgacccagactgcaggcagtaactgacttcacacagtccctggcatttagtcatctgtgattgttttatcactctggactgtgcagagccacctgccaccgagatctgcattccgactgcctatgaacgggtgtgggggccgggggctggcttgctgaagtcttcaacttgcactcggagctcctttgatacctcagagctggctgtcaggtggcagctcacacccagactcactggccacacctcagcagggggggagtcgagtgtcagtctctttctgtgaaggctttttttttcctttggcctgggaatttttcccatttttatgaaggggttttaaattgtttcattttgtgtgctgtgcttcaaagccttaactgtcaaatcttgcattatcttgtttgtacagaaatatactggcctagcagaggcaaaaaaaaaaaaaaatgaattttattttacttgtcacacctgtcttaataaactggagttttgct

SEQ ID NO: 13602 - DNA, 1067 bp, Homo sapiens
gttttttttttggagtcttttttttttttaattaagtcaaatgcagagcaatttcccacactatatgcaggtgtcagaatgaggtatataaaacatgtatatagagaaatgcctttatagaaaagtagaaaccagtaatattctcttctccagcatcactaacaccaagagaccacctgaggtctaggtccccaaagcagatggctccatagaaagccccactaacccctgtctccacattgggcagtggaagggttctggaaaggaagctctatggctaggagctgccaaggcctcttgagtgtgacatcacaggttagaggccctgctgagctgctagcacagtgcagtggagaaatgttgcgctccgtcaggaagctgggctcttgccatgccagtagcttgcttacgaccttgggcaagtcactttttcctctctggggtcctgtgtccaaaaggcttaatgagccctttctaatggttctttgattgctttatgagttaggggctgtgaccctagccccagtgccctacaggaaggtgctgacctggacgcccgcaggaccacctgctaaatcaggcccacttggggagcaagccctgaagtgctttattaccttgcctctgagcttagtttccaggttagcctcttagaagcagctcaggaaggccccacagtataattcccataggttagctaactactctcttacctgtgcaaaatgaagacaggtcactatccatccctgaagagaaactggggcatcccaggtctgcctctgctcctgtggccaaaggcggagcagatccttctctatcctcttcctaagtggaatgctcagtgcaattcttcctttccttatgaaacaggaagagtccctgggcccaggcctggcccacggttgtcaaggcacatcattgccagcaagctgaagcataccagcagccacaacctagatctcattcccaacccaaagttctgacttctgtacaaactcgtttccagttctcagaggtcagtagggagttccatcccgaaatattttaaaaactaaatatattttttc

SEQ ID NO: 13603 - DNA, 438 bp, Homo sapiens
gagcaatggagcttaccatctttatcctgagactggccatttacatcctgacatttcccttgtacctgctgaactttctgggcttgtggagctggatatgcaaaaaatggttcccctacttcttggtgaggttcactgtgatatacaacgaacagatggcaagcaagaagcgggagctcttcagtaacctgcaggagtttgcggggcccctccgggaaactctccctgctggaagtgggctgtggcacgggggccaacttcaagttctacccacctgggtgcagggtgacctgtattgaccccaaccccaactttgagaagtttttgatcaagagcattgcagagaaccgacacctgcagtttgagcgctttgtggtagctgccggggagaacatgcaccaggtggcttgatggctctgtgggatgtggtggtctgca

SEQ ID NO: 13604 - DNA, 2820 bp, Homo sapiens
  misc_feature (1)...(2820): n = a,t,c or g
ctaaactgaagctgcagtaactaaaggaatctgaaaagaacaaccctgaagcagaggctttattgtcttggttgccagtagtaccttgttttgccatgtagcagacaacacacaaaataatgcagttgtggtgtgccatgctatgtgcacagccccttggattactttgttttaaaaagcatcagagttgggggtactttagggaaacctttgcttaccttgttttgccagtgataagagcagtgggttggagggcacttggccagttttctgttcagcttttcagtgaatgtacccctttaaggttcagacttaaacttccttaaaaagtggcgttgttcatagaatcgttggactcattaatgaatcgttcaactccactcactgaagcccagacctccgtgcccaggcccaatctcgtcaggctgccagagaaagttggtgctgctcatactggtctcacagtctaagtaagtgtctgtgatgctcccaagcaaaggaaatgcaagctctggaaattcgttaatgtatttgatgtcttagtgttttagtgactagggagaccattaactagtttatcattaaccacttatcagtgtattgatgttaaagcatttccctgttagctaaaagaggcctgttcatacaagccaactggtatatacgtgtggttcatccatcatctgctgcacatagcagactagaattctgggaaccctgtgcaattcagtctgctctcccttgtggaccctggtaaagaaaagcctcagctcatagtgaacacagcagacctagaaatgtagcagcagcctactgagtagctttcatttactgatcatctgctgtgactgtggccctgtctggaggttcctaggttttgagatttagagcaatgcattctggagacagaaccagcagaacagccatttttcaatttttctttaaatcagtattccatcaggcagataactgctgtattcatgaatcttgagagtgttcctgagacagaattaatggtcatttgggaaaactatngccatggcttcccatctgtggttttcctctaaaagccttggagattagcccttccttgccagtgagaacggtgaccgcctcctgctctgcacggtctgcggcagttgccgtttctggttaggtgtgtcaggttggcttattttgggttcaggcctggcgtagcacccacaagtggcagacatatcacaagagtccccagactctgcctagaaacagtgtttgccctttggccagtgacgtggttcatcccggcccatgttgagccatgagtggagtttccagcagagggaggaatgtgtgccttgttcaaggagggcacgacccttaggcctttttcaaccagatttagctgaagggcttgacacctttgaattacagcagttgactcagagtgcaagaagtctggccattttggaaagcaaggtttcctttcagccctgtctactgaccaataccccgactcaccttgtgtggcgcacttcagaatcagatatacctagagtatacctgtggtttggttttataattaatcagctcgttacttcagcccatgaaaatggcatccagggctgccaggagattcagagctcaaaacaaggcgagcttgagttctgcactccagatatgtgccaaaactagtaaaacttaacggacttacaaccttgtcagtttttttaatgaggcagggatactctgtttttcacactaaacatatgaatgcagcactgctgcctcagctcagcttcgtgcctgggttccccactggtctgggaagactgttgtgctccatagagcagtgcacatctgacccagagggtgggtgttcataactgctacttgctctgctctaccatgtttaaagaaatatttggatgttaaattaactcactatggtttttcacctgggaagggaaacaaattacgtactagagggcattgactggttaaaaacttgtgtatcccgggaaggacctgcggtacaggagtcagccatgtctgtgctgtgtggaaccacctgatgacatggttaacgaggaagacgatgtgttgaccggctgccgtttgaggactttgggtcacccagactagacaccttctgtgctcatgtttggaaagctgaaagggaaggacagctgtgccctcctgggagctcatgtgtccctgggcgctgtgctagctttcctttacagctgtttacagacaaggcagggcctgaggcagatggccactgctcttgtgatgtttgctcagaggaatatgaacattttatttttgaaaagggatgatgtggttttttgccaggtgtttataattaatcctttaatattatggttattaacctcttaaacatgaatgaattcttgattgttttaacacagtacctaagactaatgctttctgtggacaccactgagctctgcctcaactccaccctctgcgaccggaggactatgcccctagtaactgctgtcggtgtggacgctgtgctggttctgttttctaaaggagcagaaggacaggtctctgagacaggatcgttgtccctacaggaggaacagtggccttgcttcttagacggtcttcactgtgtgttttaaaacaacaacaacaacaacataaaactcttttgacctgtaacttaaagatcataaacttcaggcaataatattttctgtgtaagcttttaaaattatttttggggatcatagcttgttttattttgtgctataaaattaacagtattaaatgacttatattcttagaatacatcgagtgtcttttctt

SEQ ID NO: 13605 - DNA, 1175 bp, Homo sapiens
aaaaagcgccggcaattggggtcgcagctggagatgctgcggccggcagggctctggcgcttatgtcggcgaccttgggcggcgagggtcccagcggagaatcttggccgtagggaagtcacctctggtgtctctccccgcggtagcacctcgcccagaaccctgaatattttcgaccgggatttgaaaaggaaacagaagaactgggcagcccggcagcccgagccgaccaaatttgactacctgaaggaggaggttggaagtcggatcgcagaccgtgtatatgacatacccagaaatttcccccttgctttggatcttggttgtggaagaggttacattgcacaatatttgaataaggaaactattggaaagtttttccaagctgacattgcagaaaatgctttgaaaaattcctcagaaacagaaatacctactgtcagcgttttagctgatgaagaattccttcccttcaaagaaaatacatttgacctggtggttagcagtttaagtttgcattgggtgaatgaccttcctagagcacttgagcagattcattatattttaaaaccagatggagtgtttatcggtgcaatgtttggaggcgacacactctatgaacttcggtgttccttacagttagcggaaacggaaagggaaggaggattttctccacacatttctcctttcactgctgtcaatgacctgggacatctgcttgggagagctggctttaatactctgactgtggacactgatgaaattcaagttaactatcctggaatgtttgaattgatggaagatttacaagaacaaaagtccagaatgttgacctaattttacaaaacaagctgcatatcagctgatgaatgcatgagaaattttcaaggctttcacagtggtcttaaggtatgggtgagagtaactgtgcttggaatagaaaagccctgctgcatcgagacacaatgctggcagctgcggcagtgtacagagaaatgtacagaaatgaagatggttcagtacctgctacataccagatctattacatgataggatggaaatatcatgagtcacaggcaagaccagctgaaagaggttccgcaactgtgtcatttggagagctaggaaaaataaacaaccttatgccaccggggaaaaaatcacaataaatattt

SEQ ID NO: 13606 - DNA, 1276 bp, Homo sapiens
  misc_feature (1)...(1276): n = a,t,c or g
tttttttttttggatttttttgtgctttaatgttcgcagtcacacgaaagtggcatctccatcagcactgggcgccgccgcctcctcatcagccgacagctgcacggtccccgcctctcatccatttggtctgtttgcaagttactagatcatacaaaaataaccgctacaaattctctgtatctggcatataaaaactgagcaaaaagtatctcttaaagcaaaacatctcagaaaaaatacaacacaggtttaacttctgcagtactttgttcatataaaacactagtaaaataggcttcttaaaaattaaatagtgaaataccaaccaaattatatacattgttacagtacaagtgaatgaggcaaaatatccagttcttagtttcccaggtgggggggggtggccttcagtgcgtggcacggagggggtgacaggaaggccacgttccgatgtcacagtcagcgcagaaagaggcttgcagcgggacaaacagatggaaagaactgagtcacacagggaagaccaggggctcctttgaggaagagtgaggtcatgtttttattgcttgctaatccgaggttttccctggcccgatgcccctctaggtagcctggatcccaaatgctgcagcccacgtagcgctaatccatgtcaccaagcagccacggggaagccacagctgctccagagaagacagaactaggcttcagagccctcaatatctgagctggaccgatcctggtctttcaggtccatcagggtcccacatggtccaactgacacacacgtttccccgctgacggccacgttcacctgagagcctgagggcgggcagtgtgggctcatggcactgggatggtatcactgtggcctggggggtggcactcagacccagccaaccccctcagcgaccacagtgcctcgcccgcttctctgccgccaccagggctgagggtctacgtgcggcgccgcttggcagcactgggactggaagggttgctgtttgcggtcaggactttgtcggtgacccgggatnggttccgcttgtctgcgccttctttgcaccccaagtctgaggagttcttctctttgtctttgctggatttttctgatgctttccccaaactccctgaagatgaaaaaacatcgtcatgccccattgtgggggtccacgtcttccttcatctcctctttcatctcctcttctatcatcacttttccttctcggacctcctgaatgatctcttcttggaaggaccctcatgccgaata

SEQ ID NO: 13607 - DNA, 301 bp, Homo sapiens
ctgttgcttgcatggctgcagccattgatactgcggtggagcaagaagcccaagtagaaaccagtccagagacgagcaggtcttctgacgcttttaccactcagcatgctctccgtcaagcgcagatgtctaaggagctggttgagttgaataaagcgcttgcactgaaagaggccctggctaaggaagatgactcagaatgacagccaactgcagcccattcagtaccaataccaggtaaactattttcctagggcagtatttgttcatgtctacagtctcttaaacttgaattggggaa

SEQ ID NO: 13608 - DNA, 1235 bp, Homo sapiens
aatacaacaatttccagaatgcacttggatagaccaacaatttttgaacgacctcagaaatgatattgaaaagaaaataggctttgatgctattatgagggttcgtaccagcacaggtttcagagccactgatttctttggtggaatcttgatgaacaacaccaccgatgtagaaatggctgccatcgattgtgacaaggcagtgaccgtggagttcaagcacgatgacaaactcagtgaagacagtggagccttaatccagtgtgctgtgctttacacgacaatcagtggtcaaagaagacttcggattcacaatcttggcttaaactgcagctctcagctagctgatctttataagagctgtgagacagatgctcttatcaacttctttgccaagtcagcttttaaagcagttctccaccagcctttgaaggtcatccgggaaattctagttaatcagactgcccatatgttggcatgttaccggaagaattgtgcaagtccttctgcagcaagccagcttattctaccagattccatgaaagtattgccagtgtacatgaattgcttgttgaaaaactgtgtactactcagcagaccagagatctcaactgatgaacgagcataccagagacagctggtcatgaccatgggtgtggctgactctcagcttttcttctacccacaacttctgcccatacacacgttagatgtcaagagtacaatgttacctgctgccgttcgttgctctgagtcccgtctttcagaagaaggaatattcttactggctaatggtctacacatgttcctgtggttgggagtaagcagcccaccagaactgatccaaggaatatttaatgtgccatcttttgcacatatcaacacagatatgacattgctgcctgaagtgggaaacccatactctcaacaactcagaatgataatgggtattatccaacaaaagaggccatattcaatgaagctcacaattgtaaagcagcgagaacaaccagaaatggttttccgacagttcctggtagaagacaaaggactttacggaggctcttcttatgtggatttcctttgttgtgttcacaaggagatctgtcagctgcttaattaattgaaacttctctgtcattgatgttgcatttccaaggagataatctccttcttggtgcctcatattctagatgataataggctagatttgattctggctcatattcagagta

SEQ ID NO: 13609 - DNA, 831 bp, Homo sapiens
gtttaattttctagtttttctttttttttcaaattctcccagatcctgatcaggtacttctttatagcaacacaagaacagcctaacacacaggattaagttgattccaggtaaataaattaagagaagcaatgactcgctggagacagcagcaaattcagcccagttttattgcaaataaaacaagtcattcaagtgaattgtggaaattgagggtgcacgtgaaggggtggcaagggaacgggactcttgaagatggtcagtgtttccttggtttgaacttcaaagccacactgttgatgcaaaacctctgaccattgggcccaggtccatcaggaaacacgtgacctagatgagcttcacactgcttgcagacaacctctgtgcgagctgatcctaacgaggtatccagacgtctcaggatccctgtgtggctttcatcagagccagacgtaccatgagcctcggaaaacgaaggccacccagtgccagagcagtactttttctcagaactgaagagtggactgtcgcagcacacgcaatgatacattcctgcttccttgttattcaggtagatcccactgaaaggcggttccgttcccttttctcttgtgacgtagaactgctccggggttagtttcttttgccactcactcttggcaagaggcagctcacacgttgcaagagaccctgcctcccccagtcccggcccggtgccgggcccgccgccgcccgcttggccccgcaccgcccgccgaggcgcagttccgagggtcaggccccggagcaaccagaggagccgcgccatgacgcccgctccggcctcgtgcc

SEQ ID NO: 13610 - DNA, 1945 bp, Homo sapiens
tttttttttttcaagttgaataaagcttttaataaaacagtcttgttctttatcaatacctgtaaattctcttaaagcagtagcaaaggcgactgtagcaagagctcaaaaggcaaggcaatatcggaaagtgtatttaacagaagattaaaaatataaatgtagaagatctgtttgtttatatatttttctttcagaaataaatcccccctcccctgccaggtgaaaggaaatattgcactttctgttctcatgactaaggggacaggagttccagaagaacctttcaagatgatcaggaacaccaggacgagggccgtctcacctcactcggaccacatggagacctcccttcaaaatgggagccatgtcctgccccaccaagccctgtctgaagtggagcttccccgcctgtgctccctccacagtcccggaaagcccagcggcaaaaggcagctttgtcccagctctgccaccctcctgctcacagtggtcagggcccctcaggggcaaggacggcagggattggaacgagggctctggaaggactgttcagccctatgcctaagacccctatgctggggacactacaggcacgcagaggaatagcagggccaccctcagagctcacacatccacgaacaaatgaaggctgaggaggtttctaaacctaaagtccatgagtgtgcacttcaatccaggaaggtcgggacttccttcagtttcaaaaaataaattctccccttccggtttggactgttgcaggctcgaggccattcaggagttgtcccaccacctggtggggcagtgtgacagaggggccattggggaaggtggctagcttatcccgccccttcaagaagaaggtcagcagctcccccttccccttcacaaagatggggcctcgcctcacaaagcggaagccgtactctcggaggatgacttgggtttcttctaccacctgaatgttgcccatgacccccgtggactccatcctgctggctacattgactgtattgccccagatgtcgtagtgtggtttccgggctccgatgaccccagccagaaccccgcctttgttcatgcctatgcgcagcatgaagttattgaaggactggttgttgatgttggtgagcgtatccttcatggccagcgcgaagtcggccaggtcagccaggtgctgccagcgctctctctcggacttgtcttcctgtgccaggggaccgtggagaaagtgtcaggggccgctcactgcagcagcctgctctgctgccttccctggcagtgttctgggggtggattccctacacctagatgttcaaggccttacttttcctcccacaaaggagtcgcagccacgctagctctgacttgccactgtgacaaagttcacgtagcaggtctaggcaaagactgggcaattgagcagaggagacggacctgtgagtctgaccgtgaggcgggccctttcaccttggctgggcctggtcctggtccttaggttttgtcaggttgtccttgtttggatccctcaactaggtgataagcactggagggggatgacccgccttggacgtgtttctttaacctcatccatataatagggccgtgggatggttgtagaggtaaagcaggatgatggtgttttaagaccagagcttgggaccagggctcctacacctaattttctctcctggtagctgaacaaaggtctaaattagcttaacaaaagaacaggctgccgtcagccagagttctgaaggccatgctttcagtttcccttgttgacaattgctctccagttcctatgaaagcacagagccttagggggcctggccacagaacacaaccatcttaggcctgagctgtgaacagcagggggttgtgtgtctgttctgtttctctgcttgccgaactttctcaataaaccctatttcttatttat

SEQ ID NO: 13611 - DNA, 782 bp, Homo sapiens
ggagagcgcggaggcagccatggtgcggttcaagcacaggtacctgctctgcgaactggtgtctgacgacccccgctgccgcctaagcctcgatgaccgagttctgagcagcctcgtacgggacacgatcgccagggtgcacggaactttcggcgcagccgcctgctccatcggcttcgcggttcgatatctcaatgcctatactggaatagtgctacttcgatgcagaaaagaattctatcagcttgtgtggtcagctcttcccttcatcacatacttggagaacaaaggacaccgttacccatgctttttcaacacattacatgtgggaggtacaataagaacatgtcagaagttcctaattcagtacaacaggagacagctgttgatcttgttgcagaactgcactgatgaaggagagcgggaagctatccagaagtctgtgacaagaagctgcttactagaggaggaggaggagtcaggtgaggaggctgcagaagcaatggagtgaacctctgctccccacacagctggctacactgctcaggcttcaggcccacttgttgaacagaacaatctgggtagcaacagcatcttccacagttttccaaactggatagctgccaaccagcagacattacccacttgaaatggagtactcagttaaactgaagttgcctttacctagcattccctggtgaagtgttgcaggttgtgaactctgtagacatctttattgcttggctaagagtagatttaataaatgtatctggtttccgtgg

SEQ ID NO: 13612 - DNA, 757 bp, Homo sapiens
  misc_feature (1)...(757): n = a,t,c or g
gttaaggacacgcacccaggagacagacatctttctctgaagatgatttttgagggcttcaaatttaaaggggaaagggcaggatattgagaagtacacaattttcaggtaagggggtgggtgggaaaagatagtcatgcctttgtctggctccatgaatctgcatgtttttacataagatgacataaacggggcagaagaaaaacgtagggaatctgcattctacataacacagacaaaatggggcaggggaacaattagatatgcatttgcgtgtggtgggcctgggtgactgcacctgtaaagataagctatcactttgcattgctcactaggaatttccttgtgagcaaaatatgggggaggcatgtagcttttcctcttgtagccatcttatttaggaaccaaaaggnnnnnnnnnnnnnnnnnnnnnnnnnnnnnnnnnnnnnnnnnnnnnnnnnnnnnnnnnnnnnnnnnnnnnnnnnnnnnnnnnnnnnnnntaacatcatgctaacagaaccaggagaagaggcttcttctccacgaggctaggatgttcaaagccttggtaagacatatctgatccagtgggtgggaggtaaaacttaggaagaattcaggagcttttccatgtcagtaaatttttagaagttcactggtctgggcaatgacaagacacttcctcagaagaataaattactgcatcttgcacttcccataacagaagggagcacagtgcctggttggcttcaacagg

SEQ ID NO: 13613 - DNA, 1563 bp, Homo sapiens
acaattttaagttttgcttagtgctgcttgaaatcctagctaccttatctcttttcttcttggtcttctagacttcttatgaatttaaaatgctacctagaacttcaccttctttattaggtgcgtaacactccatcttaattaaatatgatggcagataggttcctgcatccatggcctaacgttggagtggaattttacaaaatgctcactagagatcactgcagtcatttcctaagtgcttcctttgccacagactggcctgggtcctttatttaccttccctcattcactttccctcggccaataccacgttcttgattttctttcttcactggaagaaagcagataaactcctctttggtctgttttcagaggccaggctgattcagatgcctgttgctattgttgctctccattgttgggaggcattccttttcacaagaatgttctgggaaactcttcagaggacgtgaaggaaataccctgaagagtcatgattaactattgactattttctgatttaaaactgctcacctgaaattgatacttttagactttacgatcagtaaattattcagaattcatgaagatgctgagtatgttaagtgtcactgcaggaacggagctgtggtgatcacgttttgcctgcctgtgcccatgtctcttcccttgagcttattctgttgctgattcatatcttgtgttcaattattttggaagcttttcagtcgacattctgtagagtgtgttctgaggaggaactgtgataagaaagtttattataaatattatgtaaaatatatggctctctctgcaccagttatatcttattggttggtcatatcactggaaactggaacctttgattagcaaaattaatattgaaataagaaatagttcttttatattgtgtcatttggacactttcaagtacaaaatggtaataataacttggattgaggcggaaacacctattttatggctatctatctaaacatcttaaaatggccttctctgtaatacactttcttttaaaagacttcactaaatctatctttaaaaggaaaaacaaaagggagaggttgaaaatggcgcgagctgccctgcactgtgtgatgctccctccccgggagacgtggacgggggacgaggcacccgcaggacgcccttctgctcactcgctcctctgtgcattcagcgagccacttgccacagatggagcccgtgacggtgtggagggtttcctggaaaggccatcttccaccaggtagaggcgagcgtgcctaggacaggccacagggctccacagaaatacctcaccccagcttcagggttctctctcctgagcctagatttgccagggtcttggtgccacgcaaatggtttcaaactgatctctatggataaatgctgatgttggttaaagaactgaaaaatgtgctcaactgtttcatcttttctattttatttttgtaaatttatattgtacacaacccaggaagtaactattttggacatgtatttttataaaccaggtaatttactattatcctggaattt

SEQ ID NO: 13614 - DNA, 863 bp, Homo sapiens
ggacgagagggcctgacgtacagattataagcgccatggctatgcgctagtgttaaattgcttgccggtgttttaagaaagccagatgcctggattggactctggggtgttctccgagggacaccttcatcatacaaactctgtacttcctggaatcgatacttgtatttttctagtaccaagttacgtgcaccaaattataaaacacttttttataatattttctcactgagactcccagggcttttactatctccagaatgtatttttcctttttccgtaagactcaaaagtaatataaggtctacaaaatctactaaaaagtctctgcaaaaagtagatgaagaggactctgatgaagaaagccatcatgatgagatgagtgagcaggaagaggagcttgaggatgatcctactgtagtcaaaaactataaagacctggaaaaagcagttcagtcttttcggtatgatgttgtcctgaagacggggctagatattgggagaaacaaagtggaagatgctttctacaaaggtgaactcaggctgaatgaggaaaaattatggaagaaaagcagaacggtgaaagtgggagatacattggatcttctcattggagaggataaagaagcaggaacagagacagttatgcggattctcttgaaaaaagtgtttgaagagaagactgaaagtgaaaaatacagagtggtgttacggcggtggaaaagtttaaagttgcctaagaagagaatgtctaaataaatggattgctttttagcaatagagctgctttctagtggtaaaggaaggggtccctgaaaaataggacatttttattaaaataaagttctcttagcgtttgtgga

SEQ ID NO: 13615 - DNA, 2318 bp, Homo sapiens
tcccgggtttctgcagagtctacttcagaagcggaggcactgggagtccggtttgggattgccaggctgtggttgtgagtctgagcttgtgagcggctgtggcgccccaactcttcgccagcatatcatcccggcaggcgataaactacattcagttgagtctgcaagactggggaggaactggggtgataagaaatctattcactgtcaaggtttattgaagtcaaaatgtccaaaaaaatcagtggcggttctgtggtagagatgcaaggagatgaaatgacacgaatcatttgggaattgattaaagagaaactcatttttccctacgtggaattggatctacatagctatgatttaggcatagagaatcgtggatgccaccaacgaccaagtcaccaaggatgctgcagaagctataaagaagcataatgttggcgtcaaatgtgccactatcactcctgatgagaagagggttgaggagttcaagttgaaacaaatgtggaaatcaccaaatggcaccatacgaaatattctgggtggcacggtcttcagggaagctattatctgccaaaatatcccccggctagtgacaggctggggtaaaaccatcatcatttggccgacatgcttatggggatcaatacagagcaactgattttgttgttcctgggcctggaaaagtagagataacctacacaccaagtgacggaacccaaaaggtgacatacctggtacataactttgaagaaggtggtggtgttgccatggggatgtataatcaagataagtcaattgaagattttgcacacagttccttccaaatggctctgtctaagggttggcctttgtatctgagcaccaaaaacactattctgaagaaatatgatgggcgttttaaagacatctttcaggagatatatgacaagcagtacaagtcccagtttgaagctcaaaagatctggtatgagcataggctccatcgacgacatggtggcccaagctatgaaatcagagggaggcttcatctgggcctgtaaaaactatgatggtgacgtgcagtcggactctgtggcccaagggtatggctctctcggcatgatgaccagcgtgctggtttgtccagatggcaagacagtagaagcagaggctgcccacgggactgtaacccgtcactaccgcatgtaccagaaaggacaggagacgtccaccaatcccattgcttccatttttgcctggaccagagggttagcccacagagcaaagcttgataacaataaagagcttgccttctttgcaaatgctttggaagaagtctctattgagacaattgaggctggcttcatgaccaaggacttggctgcttgcattaaaggtttacccaatgtgcaacgttctgactacttgaatacatttgagttcatggataaacttggagaaaacttgaagatcaaactagctcaggccaaactttaagttcatacctgagctaagaaggataattgtcttttggtaactaggtctacaggtttacatttttctgtggttacactcaaggataaaggcaaaatcaattttgtaatttgtttagaagccagagtttatcttttctataagtttacagcctttttcttatatatacagttattgccacctttgtgaacatggcaagggacttttttacaatttttattttattttctagtaccagcctaggaattcggttagtactcatttgtattcactgtcactttttctcatgttctaattataaatgaccaaaatcaagattgctcaaaagggtaaatgatagccacagtattgctccctaaaatatgcataaagtagaaattcactgccttcccctcctgtccatgaccttgggcacagggaagttctggtgtcatagatatcccgttttgtgaggtagagctgtgcattaaacttgcacatgactggaacgaagtatgagtgcaactcaaatgtgttgaagatactgcagtcatttttgtaaagaccttgctgaatgtttccaatagactaaatactgtttaggccgcaggagagtttggaatccggaataaatactacctggaggtttgtcctctccatttttctctttctcctcctggcctggcctgaatattatactactctaaatagcatatttcatccaagtgcaataatgtaagctgaatcttttttggacttctgctggcctgttttatttcttttatataaatgtgatttctcagaaattgatattaaacactatcttatcttctcctgaactgttgattttaattaaaattaagtgc

SEQ ID NO: 13616 - DNA, 344 bp, Homo sapiens
gtggccattgaattctgcgtggattgcctcagtttgccttgtcagccaacttccactggctgccttgtcactgccatgacagcacagctccacaccagagctggggtttctcttcagtcctgggtaccccttggcagagggatttgctgaggaaaattaggtatccttcctagccctccacacacttccaaaccagggctgcggatctgatggatgccaggaagacagccttgggctgagagtgacatcactgcaagagttgagagccagcgtctaaagtgtccacggcatcctgggaggttttatccttggtgactctaatggtagatttttgtccaccttgt

SEQ ID NO: 13617 - DNA, 6210 bp, Homo sapiens
aattgttctacactgaaagagctcatgttcgaacactgaaggttcttgatcaagtgttctatcagcgagtatccagagaaggaattctgtcaccctcagagctacggaaaattttttcaaacttggaagatattcttcaacttcatattggattgaatgaacaaatgaaggctgttcgaaagagaaatgagacctctgttatcgatcagattggggaagatttgctgacatggttcagcggaccaggagaggagaaattgaaacatgctgctgctaccttttgcagtaaccaacctttcgccctggaaatgatcaaatctcgtcagaaaaaggattctcgatttcagacttttgtgcaagatgctgaaagtaatccactgtgtcgtcgtcttcaactgaaggatattattcccactcaaatgcaaaggcttactaagtacccacttctgttggataatattgccaaatacacagaatggccaacagaaagggagaaggtgaagaaagctgcagatcactgtcgtcagatcttaaattttgtaaatcaggctgtcaaggaggcagaaaacaagcagcgcctagaagattatcagcgtcgccttgatacctccagcctgaagttgtcagagtacccaaatgttgaagagctcaggaatttggatttaacaaaaaggaagatgattcatgaagggccattggtttggaaggtgaatagagataaaactattgatttatacacgttgctgctggaagacattcttgtattgttacaaaagcaggatgatagactggttttaaggtgtcatagtaagattctggcatctacagctgatagcaaacacacgtttagccctgtcattaagttgagtacagtgttggttcgacaagtggcaacagataacaaagctttattcgtcatttccatgtcagacaatggcgctcagatttatgaactggtggcacagacagtttctgaaaagactgtctggcaggacctaatctgtcggatggctgcatcagtgaaggagcaatccacaaagccaattccattaccacagtcaacacctggcgaaggagataatgatgaagaagatccttcaaaattaaaagaggagcagcatggcatttcagtcactggtttgcagagtccagacagagatttgggattagaatctaccttaatatcgtcaaaacctcagtctcattcactgagtacctctgggaaatcagaggtacgtgatctgtttgtggctgagagacagtttgcaaaggaacaacatacagatgggacactaaaggaagttggagaagattatcaaatcgcaatcccagattcacacctgcctgtctcagaagaacggtgggcattggatgcactaagaaatttgggtttgttgaagcagttgctggtgcaacagctaggtttgactgagaagagcgttcaggaagactggcaacatttcccaagatacagaacagcctctcaggggccgcagacagacagtgtcatccagaactctgaaaatattaaggcctatcattctggtgaaggacatatgccctttagaactggaactggtgacattgcaacttgttacagtccacggacttcaactgaatcttttgctccacgggattcagtgggactggcaccccaggatagccaggcaagtaacattttagtaatggaccacatgattatgaccccagagatgcctaccatggagccagaagggggtcttgatgacagtggagagcacttttttgatgcccgtgaagcacatagtgatgagaatccatcagaaggtgatggagcagttaacaaggaagagaaggatgttaatttacgcatctcaggaaactatttgatccttgatggctatgacccagtgcaggagagttccacagatgaggaggttgcttcctcacttaccctgcagcccatgacaggcatccctgctgtggaatccacccaccagcagcaacattctcctcagaatactcactccgatggggcaatttcaccattcacccccgaatttctggtccagcagcgctggggagctatggagtattcctgttttgagatccagagtccctcctcttgtgcagattcacagagccagatcatggagtacattcataagatagaggctgaccttgaacacttaaagaaggtggaggaaagttacaccattctttgccaaaggctggctggatcagccctcacagacaagcactcagataaaagttagagccgcatgtcctggaggtgactgcaggttgttggatttggagtatcggccgtgtctcaccacatcctggctccagtgtggatgcagagagagtgtgacagaggatctgcctgtgaaccacctgggattagtcaagtcccaaggtgcccagagtgggactagttcttcacagtgtggcagctgcactaatctgtttgtgagggaatatccattccctcactctactctcctcactatcggaaattcattttgattcagaataaaaaccaaatgtatagagctttgggtgtaggatatgaaattgtacttagatttaagaaaaagagaaaatcagatgtatttatttgacttcattccgtatttgaaagcacattttaatttttatttgccttgttttgttttaattgagtagtgagagttttagacctttgtctttagtacacccaaggatcaactgctcctgaagcaaagaggtcaggatggagtatgcagaagttgggtagagaggttaagaagaggaggaagtgagacggggaagggaggagcaccttgcttcactatacagtattccaagctctctgctgtccagtaggctgcttctctgagggtcacctcaaaggtatgctatgccgtgtggctcttatgtgcccaggtggtgtggtcagagagtggatgggcttcctcccgccctgaggcaagcacctcttctctgtagctgggatcaaccacaattaataggaatcctcaacatactaaatagcaggcacttgaaaatgggtgtgttttcttccattgtcgtcttttctattgagggttgggatttgggtgggagaggaaagcaaattttattttcttgactataaatttgttattcttggtatcatttcatttttataattatacattagacattggcacttgtgtaaaactgtccctgcagattgagcaggaagtaaaaacaaatggaaatgcttcggatagtggcaggggtgggggttgctaaggaaagggtgggatgggagtgggtaaagagtttgggaaggttatctaactgaatcactactgagttgaatcatggctatcattagccacaggtactgctgattataaggccagtaaaattttagtacctggaggtttgactctaatttttgcactgatggtgccaaagggccctgagtcaaaaggatagccaagggtggagtggaaaaagatatggtgaaggcagaactgctcacaccagctccagaagcacgtcctctgacttcactgccgcagctctttccacacggggccgtgattgaccctaaaaattgcagaccagcacatacactggacactgcaggcaaggtgttggtaactgcctgctctaggatgaatagtagcgttagcagcaccctacagagggtaagtttcagaattgtaatttgagaactccttcaattatattgactttctttggttttccttgtgcattaggtatatattttttgaagtatttttgccaactaaaatgaagtctgtaaattctgttaataaacaaggagttcatccgttgctcacatctttcattggtgccctctgaactctgtgggttgctaggatgtaattttaatgcttccctgcagtccaaagatgatttttcaccacaaatggtaagggatgcccacctacttttataaacaccactgcaacttaacaagtttatttatctatgtccagatttctgtttctgtcctaaattgatctgtgtttttaggtggatcaacttggatctttagacctcatctataaattgaaattatatttttagtcataagccaagtacaatctaactcagaatgggattaaaaattttagaagcagaagctaatatataaatgaagtttgggatttggaactttctgtatctcttaggaggaacaagtaaaaaccaaatggttacattgtgctgctagaaataatgtcattctcaattaaaagggttacacctgtagccacttgacactaacaccatcgagggcaattaatcaggagaaaagtaaatataaaaactgctcttaacgtcacacactacagggtaattatgtaattctctagcactcaattaagaagcttgtaggttagcaaaatttcagtttctctagttcagccagtgtcttgtccttagtaattatttgctttccctgcagttcaatttctccttggaactctaacaggactaactggaaaaatactttgaccatagctctagtacttccaaataaattcatatctagattttcaaacaaagccccaagatgaagtctaattctgaaaatatctcacaatttttgaatgttctttttatcttaccgacctaacttctcttttccctcccaacttggcctcccacacgttccatttcattttggccattatagtcacatccgtttgactttggttgtgacatcttcctttcaggatgatggaattagatgcagtctgtctttgagtgagactggtcaccatcagaggagttttttctaagtgacgtgactagaagttgaaatctacttccctgctaaagggcacaggggtggtgtacaaagaaagctaccttcccagagcaagcaggctgcattttagctatggaagtgacctgctgtgacactgtgctctcttctgtgggcttaatggttcctttgctatgaagtggcaaattacatgtagagtgtctccttccttttcagagaacagttaatcaaggcaaatcagcaagcccccaaagtgctgtaatttaacatcatgattaccaccttcgaagctatatattttgcatactttaaaatcacctaacttggactgcttgaattacattggcttttagaaccgaaattgtaactatgtattgtatttcatgggaggtatattttatgagctttttggctttcttttttcccacagcaactgccaatgaaggatgaatcccctttttaaaaagttgttgttgttgttgtttatttgattttgagttaggagggataatagagaagtccatttaaaaattatttttagaagctaaagaaagtaattatgcttcctgtgaattgtcttttactggcatctttgttttcctctttgatgttagtaaatttggtgtaatacgtggggcttccatatttcaaagtggaagctttcttctctgaagtcgatatatggttttgaattactagagctttggtcagtatttccttccctatatgtcacagagggcaccactgagaactgcgtgcataggacctcaaaatacaaaattagcagggcctcacagtcagcttcctcatggctagtttttcccccttatattacaatttttgttttataagtcatttttttcctgatatttccaccacttttcagagtcatctacaaaatttttctttcctcaagaaaagagttccttttgccttattccttatgccttccccactggtattgagggttttgataataaattggtaggaaaaaaaagtacctcctagaaggaagccttccccaccatttccaggtgccaactgctaagcagatatattccaaaaatggtaactgtcatgtgcacactgttggttatttttaataagcctcttcctactagaacattttattttccttgttcaccatacaatcatgtactctttaacagaaattgcttttaaaaaatatctggaactatctttaaaaaaactttattaataatcatgtatttttactgatcacattttgaaatgcctaaaagactttattgttctaattatccagatgtacctttgtaaaatagctcttttatgaattagctgataaggctgtatgtttctggaacaaaatattggtcatctaaaaactttctgttttctggggtctgggaaaatagaaaataagatttcaaatattaaataagcttaaaggaaccaaa

SEQ ID NO: 13618 - DNA, 878 bp, Homo sapiens
agaatcaaaagacatataaatgaattcaagcctaacaaaagtagcttcaacccaaagtggcaccattttgttttttatttttcctttttaggaaagtatctctgatgactaaattagtttcctaagcaaatactgccttgcccagtgcatagaagcacagtccctctgctcaatattcccaatgaagtcatttaagtgttaatgatttaacacttaagaataatcacatcaatatttgtgtgagacatggacgcttgtgtatacaagtttttcacagagatacaactaagcagaaagggtttaggtgaaaacaaaaggttttaacaggacaaaatggaatgctctgttgaaagcttccatttagaatcccaaaatgaggcaagaaccgctaaagccatgtatagagaataaaggatgccatgcacaaactgcctaagggaactgtcgtctcactaattcaagagatctaagaacagatctacagcttatactgctgccttccatcttatcctcaatcttgctgcagtgtcgggcagtcctcctattggcagtttttgccagatcaagtcccaacatgccacagaatggatgtttctttcacctcagccaagtggatggtacccactgaggttcagtatcaagtttgttaattaacctaagcaattccctgataggctttatcaagatcggaattcacaattgccgtatcaaagtagtggccattgttctgctccatctctcttgtcttctcaatgatttctctcaactcttcaggctttggattcttgccttctttggccaataatgcccgaagtctttcttgtgaagggggtgcaatgaagataatatatggtttcaaatctgaattccggagagtc

SEQ ID NO: 13619 - DNA, 454 bp, Homo sapiens
  misc_feature (1)...(454): n = a,t,c or g
ttgnaaacctntatgacngattacgaatttaatacnnnnnnnnnnnnnnnnnnnnnnnnnnnnnnnnnnnnnnnnnggcacgagctcatcacattcacagctcccagaactgtgtttctctccctctaaagtttgaggatttaggttatataaaatcagtttcctagtttatcaatttaccaagttcaaaattctcagctgccagaaaaggtctaggtaataaaaaaaaaaaannaattntcacagttnagttnataataaggaatatcnggactattcttaangaaangaccntgacanaaaataanancnttttaaaactgagggcttaattccaanaaggggncntatgatatataggaatancttancgatttgtaacttccttgcaatctcttaaaagttntaaaggtaagngtgcaccttgacctgcagggctcaagngatccttccc

SEQ ID NO: 13620 - DNA, 499 bp, Homo sapiens
gtttctgcggagaggcgggaggcgctgagagtctgcgcggaggtccgtgcacagactgctttgcctgttgttgctcttcggaggcggcgatccccgaaggcgagctgaaatacggctgcaggctacaatttgcagccgacgattatggaagacggcaagcgggagaggtggcccaccctcatggagcgcttgtgctcggatggcttcgcatttccccaataccccattaaaccgtatcatctgaagaggatccacagagctgtcttacatggtaatctagagaaactgaagtaccttctgctcacgtattatgacgccaataagagagacaggaaggaaaggaccgccctacatttggcctgtgccactggccaaccggaaatggtacatctcctggtgtccagaagatgtgagcttaacctctgcgaccgtgaagacaggacacctctgatccaaggctgtacaacttgaggcaggaggcttgtgcaactcttctgct

SEQ ID NO: 13621 - DNA, 1776 bp, Homo sapiens
ccctttctcacccttttgttcccttgccgatagaatcagtcactattagaaaaaatgaaagacgctctgtttaaaacaatgatgacagcagtacttaatatgtatttcgaggtgaacttatatagattgagagaggctgcatttggcagactgatgtataggaagacccatttgtttctagcttctcccctgcagggaaaatgctttcgtcattatagcctctttacacagactggccattctagtgaaacaggtggtaaacctttgggctgcccagaaacattttatctgttttcacttacctaggaaggggaaggattagcgggtcatccaaaatctgtatgtaagctatcttcattttcttccccaaccttctcctcctgggaaacacaaatgctatctcatctgacaaaaggttttagaggataaagctgaaaagattggattgggatctttttgtggcttggggcggagccttttgctaaaatctcaagaatgctgctttgagtttagctagggtggctctcagaactggggtgcctggcattctcagcatttctcaggggcctcccacctctgacaactgcagtgttagctaatacataccttgagcatagaactgaatgctgtaattcagagccattttttttttcaacttgaacattgtacaattttactgcaatttcctttgaactttcttgccactgtttggaatcttaaaaattcattagccttctcctttctgacataaagctactcttcatcagagatgagttcctatgtatgtcctttgttccttcaatagctaattaatgtgcttgaggatacttcagtggaaaaaaaggtttaaatatgcaaattactaataaatgtgtaaccttatgtaacttgtgttacatcaagtaacaagctaatctagtttgtttcactggactagggcttgtgctccctacttcagtattttgatgctttccttgatctttgttttcacaaaatgttgtgaattttggtatcattcaaaacaaatgacatttattagggtttcattttgaaacgatgtacagacaagtccccaacttagaaaccggtttgttcttaaggttcttgcgtcagcccattagaagcccactggacctccaccacagcccaaatggagggctgtgatagccagatctggttggcttttgtgggctgacccagacatttaatcaccatctcttatgttgttgccgtaagaaatgcattccaggttgggacttgggatcctgagagcacattcgccccctgtggtggccgcttgccaccttgcaagatggaagcccagtctccttactaccaaactgtagttgtaagcagagggaggggtgagatgtttataggacattccctaagctggggagtgatttttatcactattcatgtcaactgtactttggtatagactccctatcaatttaataatatgaaaagcctaaaataaaactatgcatgctattctatgtgctattttatatcagtaaataagcttatgcttgccagttgtatacacagttatgaggtgtatagaactgactttgacagtattttttgcactgtttcctatctgtttttataaagtcttatttagatattggaccttgttgatgttctcactgcccttgtgcttgctataaaatgtttcatatgtgcctttacaaatgtgagatctttattctaacctttttttgtaaaagatatctattgatttccatatgcaataaacctttttttcagaga

SEQ ID NO: 13622 - DNA, 440 bp, Homo sapiens
agaagcctaggattcagtgtgatttgtccccttcatgtcccccagactccagaaaggtgctcaggttaaatggtgtctcatctgtgtatgccgcacttgcactacacctgagggtccctggaagacatctctctctgggttttatattccatggtgatatgacttgctggctaaagcattacagtgtactgtttctggtcgggactggaacagaacttgagctgttttggtcagtcccttcctatcttaagatgttgtgttgtacaattattcttaagaactacaagtgaaaaaaggaggagaactgggtggtccaaggccatcagagcactgtcctgcagatcccaaggagccaatttaaactaagaaaggtattggctgagatagtgaaagaagtctttcctccttctgatcagaggagtaaaaaaaaaaaaaaaaaa

SEQ ID NO: 13623 - DNA, 842 bp, Homo sapiens
ggcgtacgcgggcaagatggaggcgactacggctggtgtgggccggctagaggaagaggcgttgcggcgaaaggaacggctgaaggccctacgggagaaaaccgggcgcaaggacaaggaagatggggagccaaagaccaagcatctcagagaagaggaggaagaaggcgagaagcacagggaacttaggctgcggaactatgtcccggaggatgaggacctgaagaagaggagggtgccccaggccaaaccggttgcagtggaggagaaggtgaaggagcagctggaggccgccaagcccgagcccgtcatcgaggaggtggacctggccaacctcgctcctcggaagcctgactgggacctcaagagagatgtggccaagaagctggagaaactaaaaaagcggactcagagggccattgccgagctgatccgtgaaaggctgaaaggccaggaagacagcctagcctctgcagtggatgctgccaccgaacaaaagacctgtgactccgactgaggcatgccctgccccaccactcgcccatcaggcctgtcctgcaggggatggtcttgggcagggatgggggctaggcttgccatcacctccagtttggcttctgagcagagactccctgcccatcaagtctgaaacccccatggatgaggtcagctccttgtctgctgggtggcccctgccattctgaatggaggcagaaccagcaacaactctgggcgtgcctgtgtctgcacatgtggatgtacatatgtctgtatatatgtatatattttgaactttctaaaaaaaaatctggaaatagaaacaagtaaacccctgtgtgtgg

SEQ ID NO: 13624 - DNA, 440 bp, Homo sapiens
  misc_feature (1)...(440): n = a,t,c or g
gagctcagaccactgctcagagcagtaatccctgctcagaatgctcccagttccctcgtccctgcccaggtctcttgtctcttgggaaggaactgataggtcgggccattgttgggccatcactgagcgctcagtatctcaagagactctgttcattctgctcgtatcccaaggcctggttggtcaaactctgggcaaagggttttcaggatgaggaggtcaagacaggatgtccagagctaccgagttcatctgnngcangctgcgctggccccacctgccttgngccctggagnggggnntctccttgttgaanaanaggcatccttctctgatgngcacaaacacnatgtntgaccanagccttgcaactnaaagtgnggactgaggaccagnagcggcagagacacctgggagcttgttatgaatgcanagctagg

SEQ ID NO: 13625 - DNA, 1126 bp, Homo sapiens
ttttttttttttgaaaccaatgcattctttattgcagactgaagcttaggggctcactcactgtgagctctgatttgggggcatctgtggctgcccacactttccaagacagacaagggcaaactctccaagcagaggagaaaacaacttccagaagctgccccttcaaaggcctgaggtgaggacctggggcagcaggcagcttggcatgcaggggttaaccagaaaggccgggtctggagggctgggcacacctaaccctcatctcctggtgactgcaggtccccactcccttcttcaggagtgccatgcagactctggaacaatctaaacaggccaagtgtcttcccagggtgggttagggaggaggctgaacacaggctcagattccctggaagtggcagggagagaactgagagaaacttcaccctctgctcggaggacatccccagcctaggtccttgcttctcaaactctaaagtgcttataggaatcagctgggggtcttgctaaaatgcagggtctgagtcgggaggtatagggtgaggcctagactctgcattcctaacaagctcccaggtgtcactgccgctgcttgtccacagaccacactttgagttgcaaggctctggtcatacattgtgtttgtgcaacatcagagaaggatgcctcttcttcaacaaggagaaaccccactccagggcacaaggcaggtggggcccagcgcagcctgcacaggacttcagcccccacttgcccccaacacccacagatgaactcggtagctctggacatcctgtcttgacctcctcatcctgaaaaccctttgcccagagtttgaccaaccaggccttgggatacgagcagaatgaacagagtctcttgagatactgagcgctcagtgatggcccaacaatggcccgacctatcagttccttcccaagagacaagagacctgggcagggacgagggaactgggagcattctgagcagggattactgctctgagcagtggtctgagctctcaacatcttagccttaggagtagtaaagtggccactcgtccacggcacacaggatttggacggcctggctttgcctcaagctctggggcctcaggtgtctc

SEQ ID NO: 13626 - DNA, 499 bp, Homo sapiens
  misc_feature (1)...(499): n = a,t,c or g
ggatgaccgggtttacccaaactcaacgtgcaagcctcggattattgcaccatccanaggctccccgctgcctgtactgagctgggcaannagagaggaantctggaaaatcatgttaaacaaggaaaagacatacttaagggatcagcactttcttgagcaacaccctcttctgcagccaaaaatgcgagcaattcttctggattggttaatggaggaaatctatcctccaaagttgcaccantttgcgtatgtgacagatggagcttgttcaggagatgaaattctcaccatggaattaatgattatgaaggcccttaagtggcgtttaagtcccctgactattgtgtcctggctgaatgtatacatgcaggttgcatatctaaatgacttacatgaagtgctactgccgcagtatccccagcaaatctttatacagattgcagagctgttggatcctgtgtcctggatgttgactgccttgaatttcctaatggta

SEQ ID NO: 13627 - DNA, 605 bp, Homo sapiens
  misc_feature (1)...(605): n = a,t,c or g
aacaattaactttattaccaagtagtaactgtcagtttcaaccagcagcagttattcgctcccaccctttgagggggggcncccgtggctaatgctgtctttaagaatacacatctgtgtacttcctgtttcttagctgagagaggaggcctcaacaatataaagcgcagggagctggggagcggcaagcagtgggaatgggcacctgggcataagtcagagaaggggaaggagagttactttattctcttctgggtgcccagtaaggaactttatcaaggtactagtgcccatcagctccctgccccaagggcaccccaggggccccagggtcagcatgacggatttaagacacattacgttctgggaagacggctaggaagggagattggagacacagacacagagcaggaggacacgtggagacagaggcagactcctgtgatgcggccacaagccacagagggcctggagcccccaggagctgggagaggcaggaaggaccctcccctagcacctgtgaagggaacagggtcctgccacacctttatttttgacttttggctccagaattggaacgaatacatttctgtgttgaaccatca

SEQ ID NO: 13628 - DNA, 1991 bp, Homo sapiens
tttttttttttttgaagaaaaaatgcttttattaatcacaacatgaaattaacatgacatcgtattagaattaaaccaggataaatactgctgttataaaatttacatttctcacatccattccagaggaaaatcttacatattagggctcatcttaatgttatggactgatttcagtaaaactttttaaatagtaaatagcaattaacgtattctcaaactgtgctaagtagttagaaaggcaactataaaatctataatgataacacgtggcaggattagaactgttctgttaaacattaagaaccacatctctgttttagatgttacctcagtgcacctttttcactggtaagggcaactgcttggctgtgggtgccacaatgattaccaagtttcttcttaagtaaaagacacttgtttgatcaagactcaagtgagttttctttcccaattttgttcttttgaagcagaaggaaataccttggtctttgatatatataaggaggcaaatatgaaatacagctgttataatcttctaaatcacaagggcaatgaattattcattttctttgaaaatattcagtctttgaaatatttcatttttaaaataacaaggcttctgaataatttctcaaaactagctttccattttagtacacgatttgataaacatagcacattagataggtatttagcaatttcttctaccaactacactttgccctcactaagggttagagtatgatttgaaaccaatttctacatataaagcatctttaaataagttttgtgttcactgaactgagactctttcacttatgtacctatggaagttaatctgagcatacacatatatacatacttgcatacatatgtgtacatatgttttttaagtaagttacttttaccattagaataaacctagacactacagggacaactctggggaacagggcggtctgccttaacaacccttctctaggttgaggaaggcaggtatagttcactgaaggatgtgatgaggctgtagtaagtcttctcatcatctgttaatcctgcgttgccctggtctcacccaccacagctacgtgcaacatctgcttcctcagcagcactggcctctcgagtaacatctgtcagaaacaaaatgttgttggttgagcacccaatgctgtctgcaatctttcggtaactttcactctctactttgtgtccaatcttggtatcaaagtgaccatcaacaagctcaagaatatctccctccgtagaatgcccgaataacagtttctgtgcctccacactccctgaggaatagatgtacaccttcattccggcctctctccacttcctgactgctggaactacatctgcaaagaactctgctttcatgcgcccagctgtgaatgccgccctccacatgtggccctgcagctgtttgagtgcagtggtctttcgatccagggacatctgccagcacacattatctaccacggcctggatcatctgttgcagatcatccactccattcccagatgctgcagggataggaacagccccatccaggtgggcgtcctcttcagcctgtttcctcaaaagactgacatcctgctggcactcctcttcttcccaatgtgtctgcagatactctttaacattttcttcgatgtaaggaaataaaatgtccttcacgaaagcaatcggggttgtggtaccttcgatatctaacaggatcacggtgacttcggcggggaccgaaagcacgaccatttccctaccggatgctacgggactcggcctgctgttggggagggcggagggcggcgccggctgcggctgcggcccccggtaccgtcttgggcttccggcggccccgcgcgatctcggagccagcgaccaagtgcagcccccgcgcgtggggagaggacacctctgcacacctggaactggaaaaagcggccgcccaggagccctgaactcgtgagcaggga

SEQ ID NO: 13629 - DNA, 1860 bp, Homo sapiens
ttttttttttttttttttcagaaattgaaaaagatgtattaaaatattcacaaaaatacaactgaagatcaaaaaataataatgagcttgatggtttttccctagctgatatatttccattgaaaaactagagatagtttgaaatttcaatctctaagtaatgccttttgagtgctcccatacagaattagcgcataattttaagacgaccctgtttgccaggacgaagacatggagagggcagatctgccctttaggcaaccttagttcgttatctgcaaccaggaaaggagtgctgaggcacagggaaaaggggagccaaaagggctgcaggggtgggtgtgcagggcttgggaagaggtcctgccctgagaggctcatctcagtgtgagcagcttccttcagggaaacctgtcctggcagagcaccatgctggcagctgcccttgcctggggggaaggttggtgagaactggtgaggattctctgccagaatgccagggcactgacagagtttgaggtgtctggttgggcaggaggccaagaagtcgggctggggaagggagtggtaagggaggaacaggcctccaggtgtcattcgagtgagtggcccccacagcaccagcttcaccaacacatggtcccggcaccgcaagaagaagtgaaggctcttgctctcagggagctccgaaatgtttcatttattcacaggaactgttgagaaagcagtgaaaaaacaatgccccttttctctgtaaaaaacgactgtaaggaaacatgacacaggcctgtctacaatgtgtgtcctctgtacctcaagcacagccctggtcagctatgtggttttcatggtggcaaaggctcaccaggagtctcagcttgaaggatggtgacaatctcaacacccttcccctccaaacataagaggccttccaaaggctcctatagttttcaaaatagatgcccaaaaagttttaggatgcaaggcagagttgaccactttgtggaaatgtctcagggccagcactgtgtgtcactctcttgggctgggcctatgaacatggaaggcagcagggcaggcgtttttttctccattccacacagaacacagagcagacgctgcccagcttcagacatgtgtggtgaccaaacctgatccctgttgactcacacagacgtggcatgtaaggtggagcgttacaagaataacaaaaatagctccctcaaaaaacaaaaggcttcatgtatggcaacagcattagttttgaagctcatatgccctttatcttaccaccttgtgcacacctcaaaatctcaatcctgttttattccctttgtgaattctgttggaactcagcccttcaaacatcccccagaagatgacaagatgagaagaaaaagcagcagcctcataatggactccaaactacaaggagaaaaagtaacattgcccctcactcccactcaccccaaacacgttctgcagaccatctagacagtaattctttccataactgtgggctttcgaacaattttaaaaggggggaaatttaaaaaaaaattcagaaaatgggagaaatgacaacataagtgttgaatgatcttcaccacactttccattcccagtaaaaagtaaaaactcatagattttaagtgcggtggggagtagtgaataggagaaaacaagttttagggaaggacagccaaactgtctaatctaggctctcattaacctcaacagtctttgaggcaccatgaagctgttataaagccatgactgatgctgcctcttgctggaagcatgactgacgctttataaagaaggtgattcttgccagctgcagtggtgcaactatagttc

SEQ ID NO: 13630 - DNA, 817 bp, Homo sapiens
gtcgacatgtgaatgcatctgtttctcctcacgaattgttttactgctgcattttttgtttttaaaattaaactgccaggtgtttcctggaatgtaaatttagctttgcttaatagtaaaataagtgagccatcttgaacactttaagtttatactatataatttcttaatgaacattggcaaatagagtagctaagagattgacaagcacattacgtttagataagcatgtgatgcagaagttgattcaagcaagtgaatccctgacattttgaggatctcacattagacaccaacaaattaaagctccaaaattatttattttttatgtgttcctcactttagaaacgtctactgcatattactggatatttgtatactaatacacttacctattttacattgtgttttaaatttagttaaaacttaaccgtagaagtctgttcaaacgcgaaaggtcttgctttgtttgttttaaatacatttattttattagaaaggatgatatttcattggggaatagtttctttcatttgggggctatgtgtttcaataacattcacttggaatcagctgaaagctgtaatatgtctttgaaatgagccatgataaattacaaacaagagaaatgagaacttacaggattgcttgaaattattgtgggtattatctgtttaccagagatactaaatattagttttaattatgcatctctttgaacatcataaacacactttggtgttggtaacagtattttaagcatttttgttcacttttaaggactatttgttttagtggcatcttaccaaactttaaa

SEQ ID NO: 13631 - DNA, 1824 bp, Homo sapiens
gtggagctctcaaggtcagaccaaggttgctgatctcagtcccactgtcttcagccagctgaagctgtggggctgggctggcagcttctattgtcatcttgcttcaccatttttttttctctctcttttcattctattttaagtttagaccaaaaaaatacagagtcatcccctacccccacccctctagagaccctccagctaaaaacagagcctgagttcagggacccaagtggtgagcggcgtcttttgggggtgagggagcttgggtagatgaggctcctgggctgagccctccctgtggtgatcccagcctaagatggcccctcttccctcctggtgggagacagaggactgggaccctggggtctcaggttccagcaagtcaggctagggacctggggggaggagacccatggacttcacccatactcagtgagggggctcctgccgtcctgacgccaccccgccccatcagcacttaagccacatgacacaaagtctgttaccgcacgggaaatgtttcacgcgcctgggccgtgttgcatgggccttcccgggctgttggggcagccgcacctgtgaggtgaccccgtgaaagtaggtgattcccttggcagaacttccagggactggggagcagaggccccctcactcaacgacgtttgtgcgacatagtattgtatccaccttagtattgtatcgagccttttctgtgttttaatgagaaagcagaacactagtttcctatttaagactttaagggtttgtggggcggggcgggattaacacaacatttggctttgttttctttttcctttgatttccacatcaggtgtgtgcgagtgtgtgtgtgtggagatgttaagagcctcacaaggaaactgggttattggaggccaaggcggcttacagttctctgcgttcgtcacttaattcctgaatgtttcagagaaacaggaatcagaaaatagcagatatcatgtaggaaagagaggataaacaaagaaaaaagaaaaaaaaataagctcatacccaaattcacaaagcctattttttaaaccaaagcacattttgaatgagtatggaacctccatgggctcagaaaaaagatgctaatatatttatctcattgtttacataagcttttacagtttcagacctcagcagctgtaaggccagtccagggaaccctcccctgctgctggaaacccttctgagttggccctggagtggctcacgggcagagaaggggtagcccctgggggctgggggagggattgggaagcctccctggagtcacctgagccctcgtccccattcccagggcccctccaagcccagctgggcaccaaagagcttgggcccgtgctgaccagcccccaaggccctctggccggaccatgctggtcctgaccagctagcctacgcggggatggccgtcagttctggccacaggacccgagtctgggcttgggtccccctgctgctctgcccgtgacccttggggatgggttgatgcgagggtcccactcaagccaaaaagccgggacctttgcgcagctctgtcgactctggtgggtccccactcctggggccccctaaccccaccccaggcagcggaaggggctgactgggtctggtccttaccaacatagacggtgcaaacactcttaacagtgttgtttttgtatcaatatgtttgtgcagtgatgaatgtatttatttctcagacttggggcgagtgagcgggtggcaggccgcgtccgccactgcaatgtcccgccggaccgagccccagcaagggctcctccaggattgcaa

SEQ ID NO: 13632 - DNA, 863 bp, Homo sapiens
tttttttttttttttttagtataagtatttatatttttattccactctaacacctcagagtaaagaactgatgggcaggcatcggcttctgctgacaattgccaaccggcatgagattgctgagctgaggtggactctccagacactggaactggaactccaggcccaatggctcctggtaacaatgctgcaacgtgagacccttgagagagactgacttgttgaagatgaagagaaaaccaagagcctccagtccagttgttgaagagcaaccacgagccaacaccaaggagacaaggaagaagtcgtccttctctcaaccgatgtccgcaagcacaaagaagagtcccaagatagcgaagaaaggaaaataactcaagggagagccaggaagaaaaatgctccacaaaaatccatggctttaagaatacttgaggaagggagcaggccaacaccctctggccacagtgaccagctgaatgaggaactctaacagaatgagctgcagttggagcaacagaggggacatagctggaacaacagagcgaggggacacagccggagcaacagagtgggaggatgccaaccatttcaactctctccctgagcagcgagtaatttcagggcaagcccagagactaggatccatctgagaagtcttcagaggtctgacccagagaactcaacaacaggatacgtcccatggtgatgaaaataaaatgaatcttgtgttcaccgttgtattcctcacgacttaagttaaaaacctgatgaaaagtggttaatctccataatgggtgttagctccatcgttttccaacgttagagataaccgaatgtgacctcaccacgtttagttccgg

SEQ ID NO: 13633 - DNA, 5425 bp, Homo sapiens
agctaatcaatgaatacaaagaggaccctaaactactgtcaatggcatattcagctgttggaaaactctccagtcggatgccacatttattcactaaggatatagcgcttgtgcagcagctttttgaagccctttgcaaggaagagcctgagactcgacttgctattcaagaagctttatctatgatggttggagcgtatagtactttggaaggggcacagcgaactctcatggaggcacttgtggcttcgtacttaataaagcctgaagttcaagttcgacaagtggctgtgaaatttgccagtacggtgtttccctcagatcatatcccttccagatatttgctgctactggctgcaggagatccacgtgaagaagttcatggagaagcacaacgcgtattaaggtgtcttccaggtagaaacagaaaagaaagtacttctgagcagatgccttccttcccagaaatggtttattacatccaagaaaaggcttctcatcgaatgaaaactccagtcaagtacatgaccgggaccactgtccttccatttaacccagcagcctttggagagatcgttctgtacttgcgcatgtgccttgcgcacagtgcgggggtggtgcccacctctcagagtttggctgatatgcaggatcatgccccagcccattgggcgctacatacggactttaatgtcaagcggggcagatggcaccctcatcatctaacaagagtggggagactaaccctgtccagatctacattggcctgcttcagcagctgttagcaggtgttggaggtttgccggttatgtactgtctattggaagctgtgtcagtgtatccagaaaagctggctaccaaatttgtagacaaaacagaatggataaagagtctgatgaataacagtaaagaagaaatgcgcgaactggcagcgttgttttattctgtagtggtatcaacagtgtcggggaatgagttgaaatcaatgatagaacagcttataaagactacaaaagacaatcacagcccggagatacagcatggatccttgcttgcattgggattcacggtgggaaggtatttggctaaaaagaaaatgagaatgtcagagcaacaagacctggagagaaatgctgacaccctccctgatcaagaggaactcattcagagtgctacagaaacaataggctcatttttggacagtacatcacccctcctggcaattgctgcctgcacagccctgggtgaaattggcagaaatggtccacttccaatccccagtgagggatctggctttaccaaattgcatcttgtagaaagcttactaagtagaataccttccagtaaagaaacaaataagatgaaagaacgagcaatccaaacactgggatattttccagttggggatggagattttcctcaccagaaactcctcttgcaaggtctgatggattctgtggaggccaagcagatagaacttcagttcactattggcgaagccattaccagtgctgcaataggaactagttctgtggctgcccgagatgcctggcaaatgactgaagaggaatatactccacctgctggagccaaagtgaatgatgtggttccatgggtgttggatgtgattttaaataaacatatcatcagccccaacccacacgtgaggcaagcagcctgcatctggctcctttcccttgtcaggaagctaagtacccacaaagaagtgaagtctcatcttaaagaaattcaaagtgcatttgtttcagttctatcagaaaatgatgaacttagccaagatgttgcatcaaagggccttgggttggtttatgaactaggcaatgaacaagatcaacaggaattggtttctacacttgtggaaacacttatgactggcaaaagagttaaacatgaagtttctggagagacagtggtatttcaagggggagctcttggcaaaacaccagatggtcagggcctttctacttacaaggaactttgttctctggcaagtgatcttagccagccagatctggtgtataaatttatgaatttagccaaccatcatgcaatgtggaactctaggaagggtgctgcttttggttttaatgtaattgctaccagagctggagagcagctggctccttttctgcctcagctagttcctcgactttatcgttaccagtttgatcccaaccttggcattcgacaggccatgacaagtatttggaatgcgttggtcactgacaaatccatggtggataaatatttgaaagaaattcttcaagatttggttaagaaccttacaagcaatatgtggcgagttcgagaatccagctgtttagctttgaatgatttattgagaggaagacccttagatgacatcattgataaacttccagaaatttgggaaacgctttttagagtacaagatgatatcaaggaatctgtacgaaaagcggcagaactagctctgaaaactctgagcaaggtctgtgtgaaaatgtgtgaccctgccaaaggagcagctggccagagaaccatcgctgcccttctgccttgccttctggacaaaggaatgatgagcaccgtgacggaagttcgagccctcagcattaacacccttgtgaagatcagcaaaagtgcaggagccatgttgaaaccgcatgcaccaaaactcattccagctctgctagagtccttaagtgtattggagccccaagttctcaattatttgagcctccgggcgacagagcaagaaaaggctgcgatggatagtgctcggcttagtgctgccaaatcttctccaatgatggaaacaatcaacatgtgcctgcaataccttgatgtgtcagtgctgggcgagctagttcctaggttgtgtgaactgatcagaagtggtgtaggtcttggaactaagggtggctgtgccagtgtcattgtgtcattaactactcagtgtcctcaggacctaacaccttactcaggtaaacttatgagtgctttgctgagtggcctgacagatcggaacagtgtgattcagaaatcttgtgcatttgctatgggccatttagttcggacctcacgggatagcagcactgaaaaactcctgcagaagctcaatgggtggtatatggagaaagaagaacctatctacaagacctcttgtgctttgactattcatgctattggacgatacagccctgatgtattaaagaatcatgcaaaagaagtcctgcctctggcatttttaggcatgcatgaaattgctgatgaggagaaatccgaaaaagaagaatgtaatttatggaccgaagtgtggcaggaaaacgtacctggatcctttggtggcattcgattatacctgcaggagttaattactattacccagaaggctttgcagtctcagtcctggaaaatgaaagcccagggtgcaattgccatggcatcaattgcaaaacagactagctctctagtacctccatatctcggaatgatactgaccgcattgctgcaaggcctggctggaagaacgtgggcaggaaaggaggagctattgaaagccattgcctgtgtggtgacagcttgcagtgcagagctggaaaagtctgtgcccaatcaacccagcacaaatgaaattcttcaagctgttctgaaggaatgtagcaaagagaatgtcaaatacaagattgtagcaatcagctgtgcagctgatatcttgaaggccaccaaagaggacagattccaggagttctctaacattgtcatacctctcatcaagaagaactcacttgaaagcagtggggtccggacaaccaaaaatgaagaggagaatgaaaaggaaaaggagctccagctggaatatctgctgggtgcctttgaaagcctgggcaaagcctggcccgcgaaacgcggagacccaacgttgttatcgtcaggagctgtgcaaactgatgtgtgaacggctaaaactcagcacgtggaaagtgcagctaggagtcctgcaatcaatgaatgccttttttcaggggttaatgcttttggaagaagaacatgccgatcctgaggctttggctgaaattctgcttgaaacttgtaaatcaatcacatattctttagaaaataagacctactcatctgtgagaacagaagctttatctgtgatagaattgctgcttaaaaaacttgaagaatctaaacagtgggaatgtttgacatctgaatgcagagtgctcctaattgagtctttagctactatggagccagacagcagacctgaactgcaggagaaagcagcgttactgaagaaaacacttgaaaatctggaataaattagaaggggaagaaacaaacaagtgccatgttcattgggggttgaagtggtggtgttctttgaaaaaccaagtgggaaaaagtaaagattaatctgtagcatgcatcattccttggctgaaataaaaagaaaaagccttaaattttgttccttattagctttattttactttatgtttttaaagtatctgggctgagtgagcttaatggaaccttggatgtttgaggggtggttgtaaaggaaactggcagaaatagttactaaaagagttcaagctgttattaaaggaattaatagacagagttgcagagcaagctggataaaaatcttagaactgcattcaaattagttatttcaggaaggggccctataaataacttattttaacctccctcttacacctgaagaaataggaagctgtgtcatctcagaggctttctgaggcctgtgccaaagtcagaacccaggtgtttaatgtctggccctggatactttcttttatggccatctgccaaatcagtgctaaccccggcttacccaagaaacttccaagatgaggtacgtttagggtggcacacagcagtctttgtgccagaactaaactgacccttaccattgggtttctgaaagccagaagctaaacattgtcttgtcatgtgtttaggtggttgatttggagaaaatgattgtttagcatctttacagatggagaggacagagtcagtctccttcggataattccaatcgtcttccttttacaggtggataaagtagattaggacaagatcacacattctatctgtgtctgtggctgcatattttgcaaaaccagaaacaaaatcgcagactgccgtggtttagaccatttataatgtcaaaactgtaatgacaaatttctgttcacttttatgctaccagtatgactttataggggagaaggaaagccttttaattagccacctgggaattactcttttaaaaaatgccttttctcaaaagaacatgataccactccaagtaaatcattgccactaggggttttcctccttccttctgttgcccatgcccctgcctgaaagtgtagggtaagag

SEQ ID NO: 13634 - DNA, 1248 bp, Homo sapiens
gagagagagtcagcggccctgatgttagcgatgcagactccaggagaagggggcatgctcgcagtttagaggaagtgagcccctcttccacgttccactcccaccatcctcctgggaccccagcctgcatgccccccaaaagatgcttttgcactgattcaacaaagcctaaagatgcaaaggcctaattgaagacctgtgaatggcatgtacggtcctcagttcccagctgaggggccactcgggctccccatattcccctcagcctctccatcttccaacaggggtgtggagtgcatccatggccatgagtattgatctgtcccagcctgtgcattgctccgaggcagttctgagtggatgatgtacagatgggattcctcagctcatttgcgtggttgacgttatggctgctggttttactgccacaactcccaggcccaacctggcttaatgtctaagttttaagccaaaaaagatggggagcagagctttgtggcagggctgggggttggggtccactttagttttgtggcaggatgaaggctgcagtggttttattaatcatgattggcctggccgtagctccaggctgagagggacaggtttgtcaagtggtggtcccccagatgtccctgtgcccaaaccctggcctgtctgccctcaggcccagcaagaggcgctaccacaaggctctgactggcgtccctactccctgtaccccagatggacagaaccttcgggtctacagtcggaatatatcattctccccattttaacctgagctgcctgacacacggagggtgtgctgggtaaggggcctagggagccagggttgaatcatggatcctggggaaaggttgcagacacaggaagggttgtcacctctctgtggagccctgctgcttaccacacagcaccttctgcagagactagctctgagggtggcaggggaccccacatgccatggccactccctctctgcacctgtccgtgcctgctgtggaagcctggactgggggaggagattgctaccctgtgagcctgagggagccacgtccagctgtgacctctacctggggctttacagagagttgtttatgggtaacagacaccttgtttcagagggaatgggcatgagctggcaagtgaagcacccccacagcttatcaggaacttgtactcatttttaaaccatcatgtcttcatttcacattggaataaagtgaggttttggaaaaaaacaaa

SEQ ID NO: 13635 - DNA, 1499 bp, Homo sapiens
gttttgccttaaaacatcaatatgctggattgtggcgtgaggtatttttattccctttgttagtactggaaaccgtctggtacatcttgtaaggcaaatgattaacacacggcaggctcttcgtccgtttgcaagttgctgtttgtttccaggtacaccagtcagagctccacagagagggtgcgttcctggttctcaggtgggcaggtgctatggtgcggggcgctggaaagaatggggttgaattggccctcgcctccgcttgtttgagactctcgttagaaagggcttaggaaaaccaagggaatggcagccaccccatcaccatcgagaacaggcagacgtttcccgagtaggggccaaagccactggaaaccgtgttccctgtgcagtccgactgacactaccccatgcctggggggaatgagtataaaaaggtaaatgtttttgaagacaggcacgatatatactactagagaatgcgcagtttcaaaccacagttgcaggaggatataggaataacgacaggtgccggggactacgtaccatgatttcatagtgctctgcagccagcaggctcactaaacgctcatcacggaacataccacaaatggtgctgatcaatgacacacgggttttcatgcttgtgacacagacagacagcaaaacaccacggcttattatcttccccattgtgtacaccactcacaggacggtgacagtccaggtattgcactggatctcggctttgccttaacagaaaacaaccctgcctacggttggaaagagttaccacttaaaacgatttggtcaacttgcaccaagaagtaggttgggaacaggtgttttcaggtgagcgtgaaaccccgcagtggaacgctgtgtgctgcaaattgcttattaatcagagaagtgagtcctactaacttcctattattacaaaagtagaaagactgaaaaaaaaaataaaatgaaatctgaaaatgatctcatttgcttaaggctgcactgagtgtattgcaaacaaacaaacaaacaccgggaagtccacttcgtaaaatgcagcagcccaataggtgaaaataataaaagaaagaactttttttaggaagaaaaacacttgccctgtcttgtgttgaacggatgtgtgtgtactgtttttcaggggcagggtggagggaagatgtcatttggcactctcgtaatgacaatgttttaatactggcactagctaaagaacaagcgcccccagcggatgcccaggactggaggtgggagcgctgttcattcagacgctgagaggtcggggttaaaaaacgcggctgtggagacaggagagctgctgggaagccatgtttttgattttcagacaggtgttaattttaccaggcttcattaatacagaagaaaggaaacgtcttccaggaaagcagccactgcggaaacgagtgtgtccggccatcaatacacaagagactctttgtggctcaacacgtggg

SEQ ID NO: 13636 - DNA, 472 bp, Homo sapiens
agcagctccgaggagtccgcccggaaacaaacattccccagggcaatgtcacgacttggtcttcccgaggagccagtcagaaacagtttgctagatgatgctaaggcccgcttaagaaagtatgatattggaggcaaatattctcacttgccatataacaaatactccgtccttttgccattggtggctaaagaaggaaaactccatttgttgttcaccgtccggtcagagaagacagatacattgataactccatttgtgggtttaatagaccacaacttccaggcccagccgaatcctgctgaagttaaggatgtattcctggtgcctctggcctatttcctgcatccacaggtccatgaccagcattacgtcacacgtcttggtcaccgttttattaatcatatctttgagtacacaaaccctgaagacggtgtcacttaccagatcaagggaatgacggcaaaccctt

SEQ ID NO: 13637 - DNA, 5677 bp, Homo sapiens
aatggtttcaaagagagagaatattgccacccatcatttatatcaggcatgggatcctgtcccttctctgtctccggctactacaggtgccctcatcagccacgagaagctgctgctacagatcaaccccgagcgggagctggggagcatgagctacaaactcggccaggtgtccatacactccgtgtggctggggaacagcatcacacccctgagggaggaggaatgggacgaggaagaggaggaggaggccgacgcccctgcaccttcgtcaccacccacgtctccagtcaactccaggaaacaccgggctggagttgacatccactcctgttcgcagtttttgcttgagttgtacagccgctggatcctgccgtccagctcagccaggaggaccccggccatcctgatcagtgaggtggtcagatcccttctagtggtctcagacttgttcaccgagcgcaaccagtttgagctgatgtatgtgacgctgacagaactgcgaagggtgcacccttcagaagacgagatcctcgctcagtacctggtgcctgccacctgcaaggcagctgccgtccttgggatggacaaggccgtggcggagcctgtcagccgcctgctggagagcacgctcaggagcagccacctgcccagcagggttggagccctgcacggcatcctctatgtgctggagtgcgacctgctggacgacactgccaagcagctcatcccggtcatcagcgactatctcctctccaacctgaaagggatcgcccactgcgtgaacattcacagccagcagcacgtactggtcatgtgtgccactgcgttttacctcattgagaactatcctctggacgtagggccggaattttcagcatcaataatacagatgtgtggggtgatgctgtctggaagtgaggagtccaccccctccatcatttaccactgtgccctcagaggcctggagcgcctcctgctctctgagcagctctcccgcctggatgcagaatcgctggtcaagctgagtgtggacagagtgaacgtgcacagcccgcaccgggccatggcggctctgggcctgatgctcacctgcatgtacacaggaaaggagaaagtcagtccgggtagaacttcagaccctaatcctgcagcccccgacagcgagtcagtgattgttgctatggagcgggtatctgttctttttgataggatcaggaaaggctttccttgtgaagccagagtggtggccaggatcctgccccagtttctagacgacttcttcccaccccaggacatcatgaacaaagtcatcggagagtttctgtccaaccagcagccatacccccagttcatggccaccgtggtgtataaggtgtttcagactctgcacagcaccgggcagtcgtccatggtccgggactgggtcatgctgtccctctccaacttcacgcagagggccccggtcgccatggccacgtggagcctctcctgcttctttgtcagcgcgtccaccagcccgtgggtcgcggcgatcctcccacatgtcatcagcaggatgggcaagctggagcaggtggacgtgaaccttttctgcctggtcgccacagacttctacagacaccagatagaggaggagctcgaccgcagggccttccagtctgtgcttgaggtggttgcagccccaggaagcccatatcaccggctgctgacttgtttacgaaatgtccacaaggtcaccacctgctgagcgccatggtgggagagactgtgaggcggcagctggggccggagcctttggaagtctgtgcccttgtgccctgcctccaccgagccagcttggtccctatgggcttccgcacatgccgcgggcggccaggcaacgtgcgtgtctctgccatgtggcagaagtgctctttgtggcagtggccaggcagggagtgtctgcagtcctggtggggctgagcctgaggccttccagaaagcaggagcagctgtgctgcaccccatgtgggtgaccaggtcctttctcctgatagtcacctgctggttgttgccaggttgcagctgctcttgcatctgggccagaagtcctccctcctgcaggctggctgttggcccctctgctgtcctgcagtagaaggtgccgtgagcaggctttgggaacactggcctgggtctccctggtggggtgtgcatgccacgccccgtgtctggatgcacagatgccatggcctgtgctgggccagtggctgggggtgctagacacccggcaccattctcccttctctcttttcttctcaggatttaaaatttaattatatcagtaaagagattaattttaacgtaactctttctatgcccgtgtaaagtatgtgaatcgcaaggcctgtgctgcatgcgacagcgtccggggtggtggacagggcccccggccacgctccctctcctgtagccactggcatagccctcctgagcacccgctgacatttccgttgtacatgttcctgtttatgcattcacaaggtgactgggatgtagagaggcgttagtgggcaggtggccacagcaggactgaggacaggcccccattatcctaggggtgcgctcaactgcagcccctcctcctcgggcacagacgactgtcgttctccacccaccagtcagggacagcagcctccctgtcactcagctgagaaggccagccctccctggctgtgagcagcctccactgtgtccagagacatgggcctcccactcctgttccttgctagccctggggtggcgtctgcctaggagctggctggcaggtgttgggacctgctgctccatggatgcatgccctaagagtgtcactgagctgtgttttgtctgagcctctctcggtcaacagcaaagcttggtgtcttggcactgttagtgacagagcccagcatcccttctgcccccgttccagctgacatcttgcacggtgaccccttttagtcaggagagtgcagatctgtgctcatcggagactgccccacggccctgtcagagccgccactcctatccccaggacaggtccctggaccagcctcctgtttgcaggcccagaggagccaagtcattaaaatggaagtggattctggatggccgggctgctgctgatgtaggagctggatttgggagctctgcttgccgactggctgtgagacgaggcaggggctctgcttcctcagccctagaggcgagccaggcaaggttggcgactgtcatgtggcttggtttggtcatgcccgtcgatgttttgggtattgaatgtggtaagtggaggaaatgttggaactctgtgcaggtgctgccttgagacccccaagcttccacctgtccctctcctatgtggcagctggggagcagctgagatgtggacttgtatgctgcccacatacgtgagggggagctgaaagggagcccctgctcaaagggagcccctcctctgagcagcctctgccaggcctgtatgaggcttttcccaccagctcccaacagaggcctcccccagccaggaccacctcgtcctcgtggcggggcagcaggagcggtagaaaggggtccgatgtttgaggaggcccttaagggaagctactgaattataacacgtaagaaaatcaccattcttccgtattggttgggggctcctgtttctcatcctagctttttcctggaaaagcccgctagaaggtttgggaacgaggggaaagttctcagaactgttgctgctccccacccgcctcccgcctcccccgcaggttatgtcagcagctctgagacagcagtatcacaggccagatgttgttcctggctagatgtttacatttgtaagaaataacactgtgaatgtaaaacagagccattcccttgggaatggcatatcgctggggttcaacatagagtttgtcttcctcttgtttacgacgtgatctaaaccagtccttagcaaggggctcagaacaccccgctctggcagtagggtgtcccccacccccaaagacctgcctgtgtgctccggagatgaatatgagctcattagtaaaaatgacttcacccacgcatatacataaagtatccatgcatgtgcatatagacacatctataattttacacacacacctctcaagacggagatgcatggcctctaagagtgcccgtgtcggttcttcctggaagttgactttccttagacccgccaggtcaagttagccgcgtgacggacatccaggcgtgggacgtggtcagggcagggctcattcattgcccactaggatcccactggcgaagatggtctccatatcagctctctgcagaagggaggaagactttatcatgttcctaaaaatctgtggcaagcacccatcgtattatccaaattttgttgcaaatgtaattaatttggttgtcaagttttggggggtgggctgtggggagattgcttttgttttcctgctggtaatatcgggaaagattttaatgaaaccagggtagaattgtttggcaatgcactgaagcgtgtttctttcccaaaatgtgcctcccttccgctgcgggcccagctgagtctatgtaggtgatgtttccagctgccaagtgctctttgttactgtccaccctcatttctgccagcgcatgtgtcctttcaaggggaaaatgtgaagctgaaccccctccagacacccagaatgtagcatctgagaaggccctgtgccctaaaggacacccctcgcccccatcttcatggagggggtcatttcagagccctcggagccaatgaacagctcctcctcttggagctgagatgagccccacgtggagctcgggacggatagtagacagcaataactcggtgtgtggccgcctggcaggtggaacttcctcccgttgcggggtggagtgaggttagttctgtgtgtctggtgggtggagtcaggcttctcttgctacctgtgagcatccttcccagcagacatcctcatcgggctttgtccctcccccgcttcctccctctgcggggaggacccgggaccacagctgctggccagggtagacttggagctgtcctccagaggggtcacgtgtaggagtgagaagaaggaagatcttgagagctgctgagggaccttggagagctcaggatggctcagacgaggacactcgcttgccgggcctgggcctcctgggaaggagggagctgctcagaatgccgcatgacaactgaaggcaacctggaaggttcaggggccgctcttcccccatgtgcctgtcacgctctggtgcagtcaaaggaacgccttcccctcagttgtttctaagagcagagtctcccgctgcaatctgggtggtaactgccagccttggaggatcgtggccaacgtggacctgcctacggagggtgggctctgacccaagtggggcctccttgtccaggtctcactgctttgcaccgtggtcagagggactgtcagctgagcttgagctcccctggagccagcagggctgtgatgggcgagtcccggagccccacccagacctgaatgcttctgagagcaaagggaaggactgacgagagatgtatatttaattttttaactgctgcaaacattgtacatccaaattaaaggaaaaaaatggaaaccatcaa

SEQ ID NO: 13638 - DNA, 562 bp, Homo sapiens
gcgggacagctcagagcagggcagaactggggacactctgggccggccttctgcctgcatggacgctctgaagccaccctgtctctggaggaaccacgagcgagggaagaaggacagggactcgtgtggcaggaagaactcagagccgggaagcccccattcactagaagcactgagagatgcggccccctcgcagggtctgaatttcctgctgctgttcacaaagatgctttttatctttaactttttgttttccccacttccgaccccggcgttgatctgcatcctgacatttggagctgccatcttcttgtggctgatcaccagacctcaacccgtcttacctcttcttgacctgaacaatcagtctgtgggaattgagggaggagcacggaagggggtttcccagaagaacaatgacctaacaagttgctgcttctcagatgccaagactatgtatgaggttttccaaagaggactcgctgtgtctgacaatgggccctgcttgggatatagaaaaccaaaccagccctacagatggctatcttacaaacaggtgtct

SEQ ID NO: 13639 - DNA, 1143 bp, Homo sapiens
ctgccatcttctccgcgctatggctgcgttcggccgtcaggtccttgattggcaccgcctgatccccctcacctgggcctgtatggctaggcagactcctcatcttggagaacagagaaggacgacagcttctttgttgcgcaaactgactacagcctccaatggaggggtcattgaggagttatcttgtgttagatccaataactatgtgcaggaaccagagtgcatgaggaatcttgttcagtgcctccttgagaagcaggggactcctgtggtacaagggtccttggagctagagagggtcatgagttccctcctggacatgggtttcagcaatgcccatattaatgaattgctcagtgtacggcgaggtgccagtcttcaacagttgctggacatcatttcagaatttattctcttgggtctgaatccagagcctgtgtgtgtggtcttgaagaaaagtccccagttattgaaactgcctattatgcaaatgaggaagcgctccagttacctgcaaaagcttgggcttggagaagggaaattaaagagggtgctttactgttgccctgaaattttcaccatgcgccagcaggacattaacgacactgtcaggcttctcaaggagaagtgccttttcacggtacagcaagtcaccaagatttgcacagttgcccctctgttcttcgagaggacctgggtcaactggaatacaagtttcagcagcctcgtcttacagcgtgactgcaaagaaaaagacttttgttttgcaaaagaaaagcagctcggtgactccgtccacatcgccacagttgagtcagatggcagtggcagtcctttgccagtggaaggagttcctgctaaggggaggtgcaggaggactaatttattattgtgcaactgccagtcctgcgcattccagctacgctaagcgccctgcccaggcacgtaacaaaacatagacctgttttgaagtggcttgttacccaagggtgcctcactcatctgcgccaccaggaagatgaactgtgagggctcctataaggggcaggaagagcaaagctgtcctaggccaaccagagattcatctttcatgcagtgacatgttgataaaaaatgatggtcagtatgaaactggaaaaa

SEQ ID NO: 13640 - DNA, 531 bp, Homo sapiens
cacgtaccagtcatgttttatttggaggttaattcctattaggatatgaaaggattcagcaacgattgagattgtgttcctcacggaggggctcgggccaaggtcgtggggtgggggggtgcagagtgtgtcctcttcagtggtatttgcggaccgctcgtgcttgagattgtgttcctcacggaggggctcgggccaaggtcgtggggtgggggggtgcagagtgtgtcctcttcagtggtatttgcggagccgctcgtgcttgagatgcttgtaggaaaaggagtagctaaagagcacgtagcatgccagcaccatggtaatccccgagatgctccccttcttcacattgatgtacttgttgtagtaccggtagtaacctctttgaaacgctccgaaaatgccactaggactgaagtcccgcatcaagatccagcttggcagctcccccagtttgacctccagaagtttcttgtccttcactggtactggggccggacactcaccaactgacgccattttggagtcctg

SEQ ID NO: 13641 - DNA, 1069 bp, Homo sapiens
caatctctcagctgaggactttaatatctatggccatgggggcgccagttctggctggtcagctcctgcttcttcttcctggtctactctctggtggtcatccttcccaagaccccgctgaaggagcgcatctccctgccttctcggaggagcttctacgtgtatgcgggcatcctggcactgctcaacctactgcaggggctggggagtgtgctgctgtgcttcgacatcatcgaggggctctgctgtgtagatgccacaaccttcctgtacttcagcttcttcgctccgctcatctacgtggctttcctccggggcttcttcggctcggagcccaagatcctcttctcctacaaatgccaagtggacgagacagaggagccagatgtacacctaccccagccctacgctgtggcccggcgggaggggctgggaggcttgcaggggctgctggggcctcagctgccagctacttcgagcacgcagttcgactctgcccggcggggtggcctacctggatgacatcgcttccatgccctgccacactggcagcatcaacagcacagacagcgagcgctggaaggccatcaatgcctgagggcagctgccagggcctgtggaggacaggccagagaggaggccagcaggcccagagtccccaggggaggaggaccaggtcaagggacgttctgtgggcagtagccctgtgtggccctgttcccaccatgagtctggaggccccacctccctggggctcccaatcccctttgccatctctgctctcactggggaccctcctccccttcccacctgctctcatactgctcagtgacatggcccaggctttccttccagggccatgcttggcaaggttggctgagggcaccctccttctctgcacccttggcacgagggcagggctggctctcccaatgcctccatcccatccccatggtgctttggcctcctcaaagcatccaccatggtggatggactgaagtgtgtatattttcttgatctattttttaataaaaaggaaaaggagcaaaaaaaaaaaaaaaaagttttg

SEQ ID NO: 13642 - DNA, 633 bp, Homo sapiens
gccaagtataaggagcgagggacggtcttggctgaggaccagctagcccagatgtcaaagcagttgggacatgttcaagaccaacctggaggaatttgccagcaaacacaagcaggagatccggaagaatcctgagttccgtgtgcagttccaggacatgtgtgcaaccattggcgtggatccgctggcctctggaaaaggattttggtctgagatgctgggcgtgggggacttctattacgaactaggtgtccaaattatcgaagtgtgcctggcgctgaagcatcggaatggaggtctgataactttggaggaactacatcaacaggtgttgaagggaaggggcaagttcgcccaggatgtcagtcaagatgacctgatcagagccatcaagaaactaaaggcacttggcactggcttcggcatcatccctgtgggcggcacttacctcattcagtctgttccagctgagctcaatatggatcacaccgtggtgctgcagctggcagagaagaatggctacgtgactgtcagtgagatcaaagccagtcttaaatgggagaccgagcgagcgcggcaagtgctggaacacctgctgaaggaagggttggcgtggctggacttacaggcccc

SEQ ID NO: 13643 - DNA, 651 bp, Homo sapiens
ggctgactttcctccggaaaaagaaatccactcccaaagtgctgtatgagatccctgacacctatgcccaaacagagggccagcagggaggtgggcatggcagggaatggagagagtgagccagacagacttcacctccttactggacacagggtcaagggcgagtttcaattgctgctccctttactttctctacctgtgactactccctggaccaatcctgaggagggcacattttccagaagccacgtgataggggctggtttctgtggagccagaggcagagacactgaacttgagctcacctcctaacaccggcagtaaacttcctggaactttgccctcaggtgcggaggggacagaggaccctggcactctgttagggtgctgtagaagactagattgatggtagtttggcctgttagttcctgttttggccatgacttttgcagatggcaagttcacacaccctcaaaggggaagctacacgggccaaatcgggggagtgggtggggaattttctcctctccctttcctactataatagtatttaagacatatcagctccagagatgagtcctggagccttgaattttgtttaacaaaataattgtaggtttctctctgtaataacaacgctggaaaggccga

SEQ ID NO: 13644 - DNA, 700 bp, Homo sapiens
  misc_feature (1)...(700): n = a,t,c or g
ggcacgagcggcacgaggagacgtacattgagaagtacactcgaggcgtgctgcaggtggaaaacattctgagtcttgaacggctccggcaggccgtcacagtcaaagaagcactttccaccaaagcccggcacattcggaggagcctcagtacaccaaatgttcataatgtctcttccagccgaccggacctttctggctttgatgaagatgacaagggttggccagagaaccagttggacatgtctgactatagctccagttaccaagatgtagcatgttatggaactttacccaggggattctcctcgaaggaataaagaaggttgtacatcagagactcctcatgccttaaccgtcagcccttttaaagcattctctcctcagccaccaaagtttttcaagcccctaatgcctgtaaaagaggagcataagaaaaggatagccctggaaggcaaggcctcttctaagccaggaggactctgaggaggaagaaaatgagctggaagctatttaacaggaagctaataagttcacagccttatgtacctgtggagtttgctgacttcagtgtttacaatgccagcttgggagaacagggaatggtttttcctcttaaagtagatctgttcaaactcacgggtnttgggagaaagaagtgtccccgtaggccctaccaccagcagtatttaaccagtgg

SEQ ID NO: 13645 - DNA, 1246 bp, Homo sapiens
tttttttttttttaagaagtcatttaagtttttattaaatatactctcttggcacaaatctttaaaatatataaacattagatataaacagtgtcttcatggcatcaaaatataactccagaccaagaccagtgaccagcagggaggcgagtgaccgcagagcctgagggcctggctgtgtgcaggggtgggggacagcactgtccccaactcctgccgggtcccactcagctagggagccatctccggggagacacactggggtcagcagggactgggggaccctcccacctaccccttgtctctcctgccttagcctgtggccccaaatccactcatttggtctcaccccaccttggggcagacccccaattcctactgctgttgcatgcttgtgggagttgggtgccctcccatctccctgtgagggttgccctgcctctcctgccaagtttaagtgctgggtaagggataacccacacagtgggacagcccctcacagccatcacaggctgcctgggcctctggggacaagatcagggatggctggtggccacatgcaaggaaggcagagagagcggtctgcacacctgcaggtccaaggcaagaacaggaggaggacagaaggaagggaaatgaagtcacgactggagatgaacaagctcagatcccttcacacagcgtgtgctgagccagctgtcgaaagcaacactcacggtcacgctcacccctggcaccaggcagaccagtcaggggttcgatgtgaatagatcatagacccggggtcagccaagttgaaaaccaaaacaaaacaaacaaaaaaaagaaatcaagaaactcaccatgtcattaggaaatgggtgtttctgagtccctgtgatagctggcgggccctgggggactcctctgagagaccagttagctgggggttcccctgggtacctcagattttcctcacctcccacccccaagctatactctatcatgaggctcccacttcgggggattgaggctagcaggcaccccatgctccatttcatagaaactgaacaacccctgtgggctttaaattgctccatatcccagccaagtgcctgctcaagtggggacccaaggacctgctggataccacagctgggcagagggttggggcactgagatgctaggcctggggggcttctgggccaaaggaggtggtttgtgtgctcacatttcagcagatgccccaggatgcaggtctgacccc

SEQ ID NO: 13646 - DNA, 374 bp, Homo sapiens
  misc_feature (1)...(374): n = a,t,c or g
gcacatgtgttgtactttcagctctaggcatgcagacaaccccacacggccacaccaccacatgcccaagtgtacacacacagagccacaccgtccctctgggcctgctggctcctcccttggctttcccttggcccacttccagggcccaggtgcttgcaactaaaatgtgaaagctcagtggccgctccttctttcagcccatcaaccagcattggtcccatagggaagcacaggggactcaccctctttcatatcccttgccctgccctgaaatggacaatcactttttgggataggttgaaatttttaaagagcctgcatcatttggttccctcaaagggaagccttgccattgngggatnaatnnnaat

SEQ ID NO: 13647 - DNA, 422 bp, Homo sapiens
  misc_feature (1)...(422): n = a,t,c or g
gcttaagtccttactcaaaatcagacagctgatccagggagctatttccttactataggagtgaggaagaatgcaaacctccacttgtttcagtaggaggcagagttgggagcagacaacttgagttgtcttcagttaactctgatgggttttaattttagtaggaccatcatgactgaaacgtgccttgggtcttgttatatcaccaatacttctgaccctttatgtgttaactcttgagttatcactgagactctgtaaagtaggtgggaactcagtccctctaaagtgtactaactcttctcggtattcctttctcgtagctatgggtttggcccgcattggaggtcatgcaagccgtgcagcgtacatggaccaactcgaaatgttcgaatgaatgggaaagacaccgnttgatgcct

SEQ ID NO: 13648 - DNA, 1375 bp, Homo sapiens
gaaagtgtgaacctattattatgactgttcccaggaagtctgaccttttccaagatgacctgtatcctgacacagcggggccagaggccgcgctggaggcagaagagtggttcgaaggcaagaatgcagacccaatcctcatctccttgaagcacgggtacattccaggcaaaaacagggatctcaaggtggtcaagaagaacattctggatagcaagcccactgcaaacaagaagtgcgacctgatcagcatccccaagaaaaccacagacacggccagtgtgcaaaatgaagccaagttggatgagattttaaaagagatcaaatctataaaagacacaatctgcaatcaagatgagcgtatttccaagttagaacagcagatggcaaagatagcagcctgaaggtcccacccccacccctacagaaaaaatgggagcaagaacttgtgcttgggagctggttattggtgtggtcctagggagggcggaaagggaggcactgccatttggagacattccatttcagatttgtcaaccagcgataggccacattccagtaagaactcaatttgtctcccaaatttgcagaaacaaaacgtgatttaaaagctgagctttttatcagaaagcttttttgatgttttaagtgttatgtgacttgttgaactttttaaaaagtgctacttttaaaatcccagatactctgaattttagaaaacaaactaattctgattgtgtcgtgcccaagtacccttttttttttaatgaatagggaccaatgccacattgctttttatatttctttcttttttaatgttgccaaaaccaaaagtagctttgttttcctttgtattttgctactttgcagtatttgtgtgtgtggttttttttccttaatttgaaagggacagcactgtgtatgtttataaactaaatgaagataagatattattttgtataaacattcatctgagaacaatcaaagcagtagccacatggtgctggctcctttgcagcacaaacctggtcattttgatgactgtacaacaggaagacttgaaaaatcacgtggattcatattaccaccgctctcatttcatggagtcttctgatcaaaaaagctcacgtcgtatttcttcttttcctttctcttttctagaaattgggtgtttgtaccagaatggaattttgcttctcggttatcctgtgcttcagatgattataatctaacccaaactagcatgtgtttctgcagtttgttacacacctaggatcatattgcattcatcactttaaacatcatgtttcagggttttgggtcaatacttgacaaggggtgcccaggaccagggaagacgtggactgctgagtgg

SEQ ID NO: 13649 - DNA, 704 bp, Homo sapiens
gggctgctggctgctgcgtttgcggcgggaggtggtggccgcggtcccacgagagggggtatttttcgtcagccaagatgggttccaaaaggagaaatttgagctgtagtgaaaggcatcagaaattagtagatgaaaactactgcaaaaaattacatgtccaagctctaaaaaacgtcaacagtcaaatcaggaatcaaatggtgcagaatgaaaatgataaccgtgttcagcgcaagcaatttctcagattattacaaaatgaacaatttgagttggatatggaagaggccattcaaaaggcagaagaaaacaagagattgaaagaactccagctcaaacaagaagaaaaactagctattggaattggcaaaactgaaacatgaaagtctaaaggacgaaaagatgaggcaacaagtaagagaaaacagcattgagcttagagaattggagaagaaattaaaagcagcttacatgaataaagacagggcagctcagattgctgaaaaggatgccattaaatatgaacaaatgaaacgtgatgctgaaatagccaaaaccatgatggaagaacacaagagaataataaaggaagagaatgctgcagaagacaaacgaaacaaagcgaaagcacagtactatcttgacttagagaaacaacttgaagaacaagaaaaaaaaaagcaggaagcttatgacagctg

SEQ ID NO: 13650 - DNA, 548 bp, Homo sapiens
  misc_feature (1)...(548): n = a,t,c or g
ggtcgaccctgtctcaaaactaaactaaacaaatttctctggctgaagtttagtaatttgcttttaagtgacgtttgtacattttagaaaataactttgtatattagacatcatttatggtacttaccattttccatggtcataaaatacctagtctagtgtgataaatgccaggtgatagaggtatgcctggggcataaacctaggggcttggtgggatggggtgagatggttgaaatagtatgtagaaggaaaggctttccagagtttactcttagggtggctcttgaagggcaagtgaaggaaagacatttcaggcagaggttgtggtgagccgagatcgtgccgttgtacttcagcatcaacaagagcgaaaccgtctcacaaaaaaaattagtcgggcacaatggtatgcatctgtggcacagctatttgggagactgagctaggaagattgcttgagctcaggaattcaaggctcagtgagctctgattgtggactgactccatnccggcccagagactctgttctaataaataaataaaag

SEQ ID NO: 13651 - DNA, 1316 bp, Homo sapiens
  misc_feature (1)...(1316): n = a,t,c or g
ggagctttgaacaggaccagctggtggctgggggccagctgggcgagctgcacaacgggacacagtatcgtgaggtccgccagttctgctcgggctctggccaccaccttgtgcgcttctacttcctcactcgtgtttactccgagtaccttgaggatgttctggaagagctgacatatggacctgccccggacctggtgatcatcaactcctgcctctgggatctctccagatatggtcgctgctcaatggagagctaccgggagaacctggagcgggtgtttgtgcgcatggaccaagtattgccagactcctgcctgctggtgtggaacatggcgatgcccctcggggaacgtatcactgggggtttcctcctgccagagctccagcccctggcaggctccctgcggcgggatgtggttgaagggaacttctacagtgctacgctggccggggaccactgctttgatgtcctagacctccactttcacttccggcatgcagtacagcaccgtcatcgggatggtgtccactgggaccagcatgcacaccgccacctctcacacctgcttctgacccatgtggctgacgcctggggctggagctgcccaagcgtggctatccccctgacccgtggattgaggactgggcagagatgaatcatccattccagggaagccataggcagaccccagacttcggggagcacctggccttgctcccacccccaccttcttctttgcctnctgccatgccttttccctacccgcttcctcagccctcgccacctcccctcttcccacccctgccccaggataccccttttttcccaggccagcccttcccaccccatgaattcttcaactataatccagtggaggacttctcgatgccaccccacttaggatgtggccctggagtgaactttgtgcctggccctctgccacctccaatccctggccctaatccccatggtcagcactggggcccagtggtccaccgggggatgccacgctatgttcctaacagcccctaccatgtgcggagaatgggggggccctgcaggcagcggctcagacactcagagagactgatccacacatacaaactggacagacggcctcctgcccattcggggacatggcctgggtagactggatcttgggctgggactggatgtgccaatggcccttcagggcctgcctggcacctcaggtactgggctagggtgtctgctatgcctggtattgttcttgtccattgctgtcaccaataaaggcatggaagaacagagtgacaaaaaaaaaaaaaaaaaa

SEQ ID NO: 13652 - DNA, 770 bp, Homo sapiens
tatatattaaactatgtatatatttaacacacacatcttaaaaatagctccagatgaccgaacagtattgcatacacaggtccatacatgggaccctccaagtcccagggcacccttccctgatcactgtgtcctagaaatgatttcctgtgtcagtgacacagaggaactgtccaagcaagcctccagtcccaagcaagcctccaggccctgagtgttctgatgcctgaagggtagtcataggtcccgaggtggagtcgggggtggagtgctggggtcccataggatgtcctcatatgggcttagaactgggcccgacagccatccttgagccccagtctgctccagcagggctttgagcaagcccacagtgagagggggctctgctccaggctcagggaatggggttgggggccccacctcatctgggaggtatgtcctcagtagaagcaggagctcagctggagccagttctggtgggcacaggcggcaaaggagggggaggtgagcatcaagccggcggtgctgggcaaactcggccagcagcagtttgaagatttcacttcgaagcaggggactggacgggccgagggccaggccagcatccagagcccgatcccattgttccttttgcaccagctgcccgacagcttggagcacagctttaggccgcccactgctcaagagcagctctagctccagagcctcaggcctggtcccctcctcacctagcactgccagagctcggcgatacaggggcagtcctgggc

SEQ ID NO: 13653 - DNA, 429 bp, Homo sapiens
gacagaatctgttaatgcctactttaaaggagcagatcccaccaagtgtattgtgaagatcactggtgatatgacaatgtcatttccaagtggaattattaaagtcttcaccagcaatccaactccagctgtgttgtgcttcagggtgaaaaatatcagcagactagagcagattcttccaaatgcacagcttgtgttcagtgatccatcacaatgtgattccaacacaaaagatttttggatgaacatgcaagctgttacagtctacctcaagaagctgtcagagcaaaatccagctgcttcttattataatgtagatgtattaaagtatcaggtatcattaaatggtattcagtccactcctctgaatcttgcaacatactggaaatgtagtgctagcaccacagatcttaaagtggattataaatc

SEQ ID NO: 13654 - DNA, 966 bp, Homo sapiens
  misc_feature (1)...(966): n = a,t,c or g
cttctgtattttctaattttttcattgtctttgataaataaaacagttttgttttgctaatatagcctattttttgttttgtctcattcagtttactttcctgcgtagaatttttattgttatattaaaatttttattgttgtattaaagtacctgtgttacaccccttgaagtaagacagtagcatggggtaaagaaaaaatatttagtttagttgcctaatttggaagttaattaaaattaaactgtactaataacatattcaaactcatgctggatctctttcatattaatttcttatagacctgtactttattctttcaataatttttaaatgaaattaagctttgctacatggtaattaaataattactaggaagcttaggctatcaaacatcgacttactaaaatttcattttagcttttatggtatatgtgcttgttttctgaatatggatacatgttatttttgatccagcatcaaaacttcactttttgttttgacttttccccccaaatctgtaaggttcaagtatacatattactgaatcctctataattgggcataattcaatgggtaggccttaaatctcatcatgtaaggcagggggaatcaggaatgttattttcaaggaacttaatggttcccttcagatatataaaatcctgcatacttcatttcctgtgagcttggaacagctgctgttgtgttttgggggatgcttgatcatctttggcactctgccttaaaaggattggaaaaatccaaaactcttgttaggggtatcctaaacatttttggagtgtggaacggggggttggggaggtaatacaaaaaatttccaantatttcnattgtaanggataggcagtcnggccggggtatccctttttcngtatttatggcattaaccgattttagggcaaaccacantttcctatgggttgcgggcggttttgggactg

SEQ ID NO: 13655 - DNA, 754 bp, Homo sapiens
ggcagaggcttggcggtcgtggttccggaggttcctcgggatgtcggtggccttcgtaccggactggctgaggggcaaggcggaagtcaatcaagagactatccagcggctccttgaggagaatgaccagctgatccgctgtattgtggagtatcagaacaagggccgcgggaacgagtgcgtgcagtaccagcatgtgttacatagaaatctcatttatttggctaccattgcagatgccagtccaaccagcacttcaaaagcaatggaataatctttcaaaagcaatagaataatcttccatttggctgtcgtgaggagtaattgaatgtaatccatctcttacaaaatggagacagggtctttaccaactcaactggttaaaacatgaatgaaacctctgtggctctttcgaaacgtgaaaatgtgaagaaagctactaacttagctgtattctcatgtaaatattttttaaataattaagcaaatccctcaataagttgagcccaggtgtcctctttcctgaacttggagcatgtttggataacaaagacatcactgggatgttcaagtctactttttagtttcaacctgaagaggaaactcagtaggtgttgggcaggaattggtgagattcctgacttgataccttgctaaatggacatgtaactgtgtgctccttcctatcagtttgtaaatgtggtccccctgactgctgttttcagattgctttgaaataaagcttatttttcta

SEQ ID NO: 13656 - DNA, 739 bp, Homo sapiens
aagcacaccacccagtgtgccatgactgaggtgtctcgttcatctctcagaagcaccttggggcctcgccagggccgtggtcttcaccgaggcgtgggtgggcagccgttccccaggctgtgtggggtcctgctttcttctgctgagacagtgacgctttccagtttccaccctaatcagccactgctggtcacagcccccacagccatgggtatttctgtggtctcctcgcttcattgaagcaaagcatgagccttcctagacaagggcagctggggaggggaagggaccggaagtttgtgaagttgaacagtccatccatctgcactgagaggctggatcctgagtcccggggcagcaggatcccaggaaccttcctcctccagggcagcacaggactcagccatgtctggaccggccctgctgaggctacagtcactctggaagctctgcgcttcatcaggaggcaggactgtggcgggaggggtccttgaagatgggtgtggggagcagtgggtcaggaagtgggagccagaggtttgactcactttgctttatttttcaggctacaatacaggtcagagacaatggcttataaaggtttagtgtggtctcaggatgtgacaggcagtccagcctgacctttctgcacactccagacaaacttcccagacaagctcctttgtgcctctacgtggagagggtgtggaaagttatcacattaaaagatggaggattt

SEQ ID NO: 13657 - DNA, 431 bp, Homo sapiens
gggaaggttcaatttgaaaagaaaagaaaaaagcagtagtagacaaatgtttgactccatctctgtgagtaccctgtaatttaatgctaaattcagctcgatttggtttctgtggcaacccaaggaaccagctctccacagctcatatcatcactctttgtcagatttctaaatacagggtgcctggaacacagtcgttatcccaaatgtctgagctctgatactctcagaagcccctgatcctgagcttgatccacaggtacaaggatgcaggatgggagcatcttaataaagtctttgcccaacacaggaaatgtagaaaagacaggattcaggagccttcattcctagaaatctcttgaaatggggcagactgtcactggtccaataagactttggaaaagaacttcatggagacaaaaagaagcctt

SEQ ID NO: 13658 - DNA, 539 bp, Homo sapiens
aaggatcggtggaatgtgaggggaggtggaggagatggcggcgacggcccgggaagatggcgccagcggtcaagagcgaggtcagcggggctgcgagcactatgacagaggatgtctcctaaaggcaccttgctgtgacaagctttatacttgccgcttgtgtcatgataacaatgaagatcatcaactagatcgctttaaagtgaaggaagtgcagtgcataaactgtgaaaaaattcaacatgcccaacagacttgtgaagaatgtagcacattgtttggagaatattattgcgatatatgccatttgtttgacaaagataagaagcagtatcactgtgaaaactgtggaatttgtaggattggtccaaaggaagattttttccattgtttgaaatgtaacttatggcctagctatgaatcttcaaggaagacacaagtgtattgaaaatgtgtcccgacagaattgtccaatatgtttggaggacattcacacatcccgtgttgttgctcatgtcttgccatgtggacatctttta

SEQ ID NO: 13659 - DNA, 1181 bp, Homo sapiens
  misc_feature (1)...(1181): n = a,t,c or g
ttttttttttttttcatcttccattattttattattttttatacatatatatatatgcgcagatctgttttatgtacaacaattggttctatcaaatattcagaccaaggcattctactggtaatttccccccaaatcaattcaggtaaaattagatacttatgcacttcacgggctatcaaaacttgcaacttcattatcaatttcagttctgaggtcatacacacaattcaaaatatacattaactaggttaaggcgataaaagtgggctgaaagaaaccacaggattcagaacaatgaaactgtgtattttgcttgcatgagagtcataacgtgaacagcaagtattgtgcgtatctcatagctcttcagtggagaggaagcggcttctgaacatctaaggtgactgcacagcaggtgggaaacagctggtgtggcctgctggaggcttcgcccgagggagggctcatttcttctctgcctctccttttttgggttcttgtttcaatttgtaatcagccagggcggccttgattgcatcttcagccagcatggagcagtgcagtttcacgggaggaaggcagagctccttggcgatatctgtgtttttgatagtcaaggcttcctccaccgtctttcctttcacccattcagtggctaatgagctggaggcaattgcggaaccacagccaaatgttttaaacctagcatccacaatcttccccttttcatccacttgaatctgtaatttcattacgtcaccacatgctggagcccccaccagtccagttccaacatttttagatgtcttgtcaagggaccccacgtttctaggattttcataatgatcaacaacctaaaatgagagggttaagataaatcatgttcactctctattggtactggtctctggtttgatggtaagctcctcggtcagcatcttgaacctggcaggcaatcactaaataccaaatttcacctgagtagaaaggtctacactcatgtcaatgagaaccatttgtgacccccaattccttttgtgtctcctctacaatacttcacagatttgagataccttcttgtgatagagtcgggcggggccgacagctcccggcgggcaggcggggtccgcagcagcagagccgatgccgcccgcctcagacggaaagncccagccgcc

SEQ ID NO: 13660 - DNA, 444 bp, Homo sapiens
  misc_feature (1)...(444): n = a,t,c or g
gtcaaagtttggaagtatactcgtgtgctttgctatttttttatgcttcctggaatttggggactcatgagagacttgaggttagagttctgcaagtgagaagacactacatggttgcagctgccacatgaagaacccaagctcctgtcaaagttgtgaatgcgactttggatgagattaagaaggcccagtggacggttggtcttgaagagtggcagtgtgtggatttgaggacctctgcagaccatcagatcaaaggagggagagctgttttgggtgttttgttttttttttttgcttttnnttgaanngnaatttcccnatggcatgtacctgggcacatcgngtancctgctggngaccancctacaatngggatgagtcctaggnncatgggttnncngctttggggtaaccactttggtaaaaaacagttttgcccca

SEQ ID NO: 13661 - DNA, 1096 bp, Homo sapiens
tttatgttgtgatgatgaatttctcccacttgtactttaggtggccaactgacgaactgtgttcacctgataaggagtcgtggctgcttggacaggctcaaaccaagagagcctttcgttttgtctcccctgtttttctgcctgcgttttctccacattagccactcaatttccagtaccatcctggcggatgacttcagcattagatggtcaggtgtatttttttattaataggcgcattcagtttggaaaagacagcttttcattaatgtcccacgtaaaggaatatggcctatacagtacgtacgctgctgctgggtcatatttgttcctgtgatcttattgtattttcaaagtttggaagtatactcgtgtggctttgctgtttttttatgcttcctggaatttggggactcatgagagacttgaggttagagttctgcaagtgagaagacactacatggttgcagctgccacatgaagaacccaagctcctgtcaaagttgtgaatgcgactttggatgagattaagaaggcccagtggacggttggtcttgaagagtggcagtgtgtggatttgaggacctctgcagaccatcagatcaaaggagggagagctgttttgggtgttttgttttttttgtttttatagcattttgctttttcttggaatgtaattttcctatggcatgttaactggtgcacatcgtgtaacctgtctggtgagcaacctacaattgggatgagttctaggtacatgtgtttgctgactttggggtaaacaactttgttataatacagtctctgccacagatgcatgtgacctcttcaggggcccagagtggctgaggaaggaaagcttcaagctggccatgggggtcccaaacagtcattccaggcttagatgatgactagcctaggtcatcagagcccagactccacagagactaaaatcagagctctgtcttgttatgataaatttcatttgcttggaaaaagaaatgctgaaagccagtgtttagaatctttgtgcagatgaccaaagcaattgacttggccaagaaaaggtaaggtaaataaacatttttcaaaatga

SEQ ID NO: 13662 - DNA, 1404 bp, Homo sapiens
ggcacgagtcatttttaacctaagttccaactttgttgactccttaaaataagcacccatgaaagccagccagcccttcctccttccctcaccaccctccgtctcttcgtccctcaccaccctccgtctcttcggctgcctgctctttagtgtagattagtggaagccattcacagaatgtagactcatgtataggtcaccgtttctttcccccactagaaatcacattcactaagcagtggattgaatttaagagtgctgcccctgcccggcgcagtagggcgtggctctagttccagctacttcgggagtctgaggcagaggatgggcatgtgcagggagtttgaggctgcagtggcaattatgcttgcacctgtgaatagccactgcactccatcttggggcaacacagttgaggacccccatcttttaaaaagagagcactgcctgaacctcggtggcactgggaagctctggcctgagagttaaacacccatgctgaatggtacagtgtgcattctctccagctgaaaactttcttcaactttcctaaattcttactaaattcagaggaataggataaagatcacttagagaaagggtgcttatggacatagcctgagtttcctttaacctctctccaatgggtgcttttaactagcttctacatggcaagctgtttcagtttgcaaaatcactgcccagcatgtttgaggtcagttggcaccttaaaacacctgttctccagcccttggacagtggagagaatctgtaaaagtgtgaccccctctaagatttcgttttaaatgatcagattcggttccagtttaatccttgttgagtttttccctatgaaggctccttttgaatgtgtcttgagacccaaattgagcatgttgctgttattcctgccctgcacctgtggagccaggagtggcagggctggctgtgctgggttccagctcgctcctgccgagggactagcttggcctttgcgctttgattccagatagtaagatgagtggaagtgtttatcgagcatgcaaaagaaaccctcacggctaacggctctgggagttgtgtctgtgtgacctgagagtgatccatctcctgcctgtgtgaggtagcagtgggcactttttcattgagacaaactccagggtgtccagagggggttctgccccttgtgaaggcccattcctggcacttagagacagaaagaactcagcaatctttcgttctagttatattcggtctttgaaactgacaatctttgaaatgtgaatactgtaacaatatgttttcttggattgttgtctttaaaaaggatttttgtgaagcaattgatttatcaaagcaaaaaaattaaaaatagaaacttgcaaaaaaaaaaaaaaaaaaaaa

SEQ ID NO: 13663 - DNA, 2179 bp, Homo sapiens
  misc_feature (1)...(2179): n = a,t,c or g
ttttttttttttttaccaaaagaaatctttattcttcagcaggtagacaacatctgccagccctggtcctcagggccacactcatatgcactcacccctcagcagcatatcgccccttttctgacatataaatgcaagagacccaggaccctagatctttcttcaaacgcaagtgtctcacacacacttattttacaaatccactagaaatatggactcttatgttctttgtacagccatgcaacagaggcctagcatttgtgctgtgtctgtgggaaaggcagtcagagaccagtgggtttccctgctttgggggaaaatggctcaacagttagtaatcccaggttagattgtcagaacagtctaggccaggactgaggggcttcagctggncaggggctccccaacagaaaccactcccctctggctgacactgcttccttgcgcaccagtctcttcttgtcatccaggggtttggctaaggcccgaatcacctgtggtttgtacggcagcagcacaggggtgggcaggcgagtgagagcatgcatgcactgcagtgcggcgatccggacagccatggaagggctagagctgaggttcagaaacttggtgacgagggtgtccacgtgaagactcatgacttggggtgcttccagtagaagaggctgaaggcagctgagggtggagagctgcaccacacagtcagggcaggacagggcctccagcagcaaggaaagaagcgtgggcagctctggcaagagtacaggcttgggcagcctgttaagtacatgagaaagacccttcaagtagtttggcttcacatcttggggagcagcatggaagccctggaccaaagccaggcacattatctgtgaagaaccgctggcggaacatgatccgcacttcggcatggccagcacgagtcaagcacatcagtgcagtcagacatgaaccagagagaagccatcagctgctgctggacctaattctgggtcactcaggaggcccatgagccgggctgtaaggcaggagctgagaggatggtatctgagcactagggcctttgttacccagagaagaagagtgaaggcctgactacgaccaggcccagagcccaggccagcctccactttgtccacagctagctgtaggaattcatccagcttgctgccctgcagggtgcttgttgaggagtcctgcaaagcacttggcagcagcggtggaagaaaaggggcagctgtggcagcagctcagttccaaaagctcccgcatgagttggttcagctgagggatttccacatttcgaggcagggagcagacaaaggccataagcagtgcaatcagccgcctctgccctgaggagccatcctggaatggctggaatctgctcgggaagctgttttcaggcagaaaggacacgttgccatccaagaagagggcacaatgtgtgtcacactctgggcagctaactcagggctcaggtgggttgtagcagtgccaatgacagacaccatggcagccaacacctcatcctccaatagtacttttctcagaactgagggctccttctctggcatagaggcctgcacagccaaggcaagcaggcaaggtatagctgtctggtggaaataccagcaactctcagggtcctgctgacatttttctgccatctgtctgaggctctgacagacagcaataacgtcactggattgtgcaaaccatattccctctgttcacttgccagagatgctgcagcagcagaggcagtgtctccttgacgatgctgggatgtgttgatacagctgacaaggcttgcagacagcacagatgccgggagcattgggtgggctcatctccgttagtcaaatttgactcccctacacgcagctcctcagcgagcttgggtacgaggtggctgctgaaggccacagggtagagagcagccagggttcctgatgcttccagtgctgccaccctgcaactctgggaatcctccttcaggaagctcagtctgtacaggtgacccactgccagctccaagtcctcataagataggagatctggctgggcacccaagactgtcagtgtacggatgccctcgtgccnnnnnnnnnnnnnnnnnnnnnnnnnnnnnnnnnnnnnnnnnnnnnnnnnnagggatcanaaatagggnttcaaa

SEQ ID NO: 13664 - DNA, 1844 bp, Homo sapiens
catacatactaacttggcaccctctgaagagccacttccactggatagatggaggcagtagagtctttgccttcaaggagctcccagcaagtgcaggagataactatgacccacagacagaagcctgaaggcaggagctggaatgcataccagggaaaaatgggaggctttatagacggacaagatggcattgggttatgccttgaagaaatttggtggttgaggaagttttctgggccaggatacagatggtggagagatgggaaaaggagtgcattacctcttggatcatggtagctgccagcccgtagaccacacccacccagacttcatcagactgcacactggatttatcagggacaccatggggctgcatcccattcacagcccccatggcccctcctgcaaaggcctggacgttcagctcaaagatagtttggagagcacggaccacatgttgggtaggaaacacctcagtgtctccttctcctaggccacaggccttcaggaaccactgtccagcacactggtcagacataacactacgagactgaggccgagagctgctgtcatagttgtaatagcggccattccacagcagtctctcataggcttcttggccccggctgaggatagaagaaaacttatcctggatgtcctgtgccccacacagagcagccatctggaccatcacagccacagctgccagccacagccctccacagtaagcactggggcctgtggtcacccatccatcataggtctggtctgcatagcctccattttcaatgagtccatcatggtccttgtcaaacttcatttcagattccatcacagctagacacacaggccacatgtccttcaggaagttttgatcacccgtgaggtaatagtcccgataaacctgcagcacaaacttcaggttcaggtccttccaatcagcagtatcatggattaaatatgcattgacgcggagcccatggttcatcatctgggtccccaatatcatgggggatgacgttcctccttttcacaggtgccatcaccccactcatcaggtaccgtcgccgtgtcaggtcctccctgagagtggccagagccatgtcatactgtaggctgagctcaagtttgggccagagcatgatgagggcaaaggaagcataaaagtggacatcatatgtgttgtacatgcggtactcctggccctcaaggtagccaaatcgaccgtagtccgtagggtggggcggaggtgacacatgtttctgcccagctcctctggtagggagtcctcaagaacttccagccacactgtgcctccatcagccaggaagtatagttcattgaacagcgcagatttgtaccaggcaggcagtgatctgtcatccaataccggggctctgccaagctgagatcctctcttcccactctgcgtatcggcacagtgcatagtggctgagggcaggtgctgcatctccatcctggccaaagaaccttgtataccgcctgtagtggacttggcctttagctccaaacatgatcctgggcatgtcccaagccagtgaaaactccaggcggcactggcctcgaggtcgcaacttgctggaaacacacacagctccagcaatgcctactcctttctgcgtaggggtgctttggccagtgggagagtccagctgtccatcctgaagtagatcctgccacacctgctgccccgtgctgtcagggtcaaaggctgtgatgtgggttaccgtggtagctgccgtgactcgtgcagccacagcccatcgtgtaggggtttggaagggttggatgatgcaggagcagcccccggacagtttccccgc

SEQ ID NO: 13665 - DNA, 723 bp, Homo sapiens
cggattttagaggaaggcgctcggttacattggagaactggagtggtctggagttccacggtgtagtggaccagaggccacctctcctgggcttctcagtgtctcgccggcggggttcggcctgagctggattgacatagcccttggcggatttaaacaacctaaacattaagcagtacagctgcctcaaacctttgggattttcagaatgactgacactgcccgaagctgttccaaagtttgaagagatgtttgctagtagattcacagaaaatgacaaggagtatcaggaatacctgaaacgccctcctgagtctcctccaattgttgaggaatggaatagcagagctggtgggaaccaaagaaacagaggcaatcggttgcaagacaacagacagttcagaggcagggacaacagatgggggtggccaagtgacaatcgatccaatcagtggcatggacgatcctggggtaacaactacccgcaacacagacaagaaccttactatccccagcaatatggacattatggttacaaccagcggcctccttacggttactactgatagaaatgttggcagcttttagtaaaagcatttactctgttaccatgagaaaagtttgggtgtcttctgttggtcatagttttacatctgattttacagaatggattattgattttttggaagttgagactttaaaaaaaatagatcttacttgcga

SEQ ID NO: 13666 - DNA, 1544 bp, Homo sapiens
atccccaaggtgggttccgctggcccttgctgccaaaaactttaacccttgcggggcagtccttaacatcctcgattcagatggacttcaacctgcctacctagcagtttcagaatctttgaatatgcttgtcaattaggaatggtttccccgcatgtctcatagagacattattatttgaaccctaagttagacatgtttaaaatcaaagtcctaagaaacagaactttggaaaaatggaggaaatgtttttaaagtctgtaagtttgcacaatactgtatagtaactaaatgcatgctactccgttgtatcctagttattttagaaacagaggtggcctaatttggtggccaaagtaactggtttactttgagtgtaccagcttatggtgccattgatgaggaattaaagtaggtcaaaatttaattggagttggtattacttcgtaaagctagttttcaagaggaagaaaaccacacttactaatgttttctgtatctaatcaaatactcttcatatataattaagcctcatgttatcttttttttaaatcaaccttttgaacttcaactacagtctaaaagtcttgatggtaactatagtgtaattatctttttgtctcactggattttatagttagtggaaaatgcctttacaaaatgtatttaaaatagctgtcatctcatttgtaaattttgtcgtgtattgtgatatagtgaaccttattgtccttatgaaatggtagctttgtgaaatacattcaccaaaaatcaaaatttgaacatctttatgattccttaccagctgaagccagatagacaggtattaattgagctgatgccccacttgagtttatagactgtttgataactgcctgtcctccaaattgtgtatgtatatgttacgatggtttaattcttgagtcagggccagcacgcatttatattttctaccaattaccttgatagaaatatcttagaaattgctgacctgggaacggttgtgagaagactcctgggcttctttcttgcctcacttaacaaatattttaaggtcaaagcaatatctgtgcacggctttccttttgctcctccagacaagtgaggctgttggtatagtcctcttcaccctctgcatgtagcttcaccctagatcagacttttgtctcttgggtcccagatggcacaggagcactgcatgcttgttttctagagcccagccagtcatgggtgctagcctagtctccacacaccagcaagtagaacccaagtgtattgtataaatatttcctgagtaccagtaagagaatgcattcttttctcatctaggccaggaatgttgaaaatgctcagccttacatagaaactcctagattttcactaacgcatttcacaaaagtaaataagtatttcatataattcagaggatgtttaaattgtcagcattttaataaatacttgcattataattttgtctcttttttaaagaaagtcatacttgaatataatttattaaacgttcaatggagtatatagtctatttg

SEQ ID NO: 13667 - DNA, 1669 bp, Homo sapiens
ttttttttttgaaaaagacagaagcagcttttactatatttacatccaacaaaacttcgcagggaacaatccttattgcacaggtcaggacctgggtgggtgaggcattccccaaggcggggcaggcaagaaaaattaggactggagggggcaccagttcttcctaaggggagcttgagactcctctagctcccagtgcctgactttgaaggaactacaaaccaccggaccatggtgccctatttcccttccctttctcactctccataagaacctcataagcaagggggctgtggctccagaataaataatttaaaataaaatacaaacacttaggtagaaaggcatggagagccttgggctccttcagcaacgtcagggaagagggaccattattggtggagaatgacatccctacctcccattcagggcaaaggctcagtagctctgcatctttccagttgttttttaaaacaaaaacttctaaaatgaccagggcaatgcagatctgtgggtaccctggaggggagttcccggtataggacaagggaagaacagagctgtaccaactccccccagatctcccccaacatcagcacgaacaaactgggtaggttggtgatgggggaatcaggacttttggtaacagtggatccctcttcctgttgtcctcgcttggagcctttgactgggcatccttcccagcctgttcccaactccatgaaggcaacagggaagcagtttaactctagaatcccttcttcctcacttccccaccctaggctggagagggaagcttaaggtctctagcattctggaggtgctccaaaacattttcggcagtcaatggccttgggagtgggcatctgcgcccgccggtgcctcagctcctccttgcccatgctgctggccagcttgttaaaggcagacttgtacttcttatcgaaggccactatgtccacgtggtccttgcccagagcagccattgtcaggaataatatctcacggtagattcccctctgcaggtgcaggccagtgggtgggggccctagagtttccagcaggagccccacagccttgtgcacttcattgagtccaacatggcgcagcactgactccaacagtgccaaactaagggatgcaggtacagggcctggccataccacccgctgggggatctggctgtggaccctccagagcacatagagaggtgggcagctattggggtcaggggtcagtacatcccacagcagccgtacctgaacagaggctggatcaggggttagccaaggagatggggcctgggagtgcgaaggcccatcacaggaggccagcaccaggcctggtagaatactgggcagccgtagccgttggaaataccacaaaaggttccagaagatgatggggtgggcagagggcagttcaggcaacgccagcacctcactgccctcgttctctaccagcgactccagctccttacgcagcaccagggggctcaggtatgcccatgccccactctcaacccgccgggaggctccccccatgtgcccgttgcagagctggggctcatccagagcaaggcagagccttcggtcactgagcacagggccaggaccaccagggacaggagcatctttgctgccactggcaccagcagatttggggctgg

SEQ ID NO: 13668 - DNA, 430 bp, Homo sapiens
tgaatttgtccgtctccgacttctggagagtgatgatgcgggtgtgctggttggtgagacaggacagccggcaccagcgaatcagacttccacatttggaagcagttgtgattgggcgtggcccagagaccaagatcactgataagaaatgttctcgacagcaagtacagttgaaagcagagtgtaacaagggatatgtcaaggtaaagcaggtaggagtcaatcccaccagcattgactcagtcgtaattgggaaggaccaagaggtgaagctgcagcctggccaggttctccacatggtgaatgaactttatccatatattgtagagtttgaggaagaggcaaagaaccctggcctggaaacacacaggaagagaaagagatcaggcaacagtgattctatagaaagggatgctgcttcaggaagctg

SEQ ID NO: 13669 - DNA, 2665 bp, Homo sapiens
  misc_feature (1)...(2665): n = a,t,c or g
cccgccgcccatggagcgcgccgcgccgtcgcgccgggtcccgcttccgctgctgctgctcggcggccttgcgctgctggcggccggagtggacgcggatgtcctcctggaggcctgctgtgcggacggacaccggatggccactcatcagaaggactgctcgctgccatatgctacggaatccaaagaatgcaggatggtgcaggagcagtgctgccacagccagctggaggagctgcactgtgccacgggcatcagcctggccaacgagcaggaccgctgtgccacgccccacggtgacaacgccagcctggaggccacatttgtgaagaggtgctgccattgctgtctgctggggagggcggcccaggcccagggccagagctgcgagtacagcctcatggttggctaccagtgtggacaggtcttccgggcatgctgtgtcaagagccaggagaccggagatttggatgtcgggggcctccaagaaacggataagatcattgaggttgaggaggaacaagaggacccatatctgaatgaccgctgccgaggaggcgggccctgcaagcagcagtgccgagacacgggtgacgaggtggtctgctcctgcttcgtgggctaccagctgctgtctgatggtgtctcctgtgaagatgtcaatgaatgcatcacgggcagccacagctgccggcttggagaatcctgcatcaacacagtgggctctttccgctgccagcgggacagcagctgcgggactggctatgagctcacagaggacaatagctgcaaagatattgacgagtgtgagagtggtattcataactgcctccccgattttatctgtcagaatactctgggatccttccgctgccgacccaagctacagtgcaagagtggctttatacaagatgctctaggcaactgtattgatatcaatgagtgtttgagtatcagtgccccgtgccctattgggcatacatgcatcaacacagagggctcctacacgtgccagaagaacgtgcccaactgtggccgtggctaccatctcaacgaggagggaacgcgctgtgttgatgtggacgagtgcgcgccacctgctgagccctgtgggaagggacatcgctgcgtgaactctcccggcagtttccgctgcgaatgcaagacgggttactattttgacggcatcagcaggatgtgtgtcgatgtcaacgagtgccagcgctaccccggggcgcctgtgtggccacaagtgcgagaacacgctggggttcctacctctgcagctgttccgtgggcttccggctctctgtggatggcaggtcatgtgaagacatcaatgagtgcagcagcagcccctgtagccagggagtgtgccaacgtctacggctcctaccagtgttactggccgggcgaggctaccagctcagcgatgtggatggagtcacctgtgaaggacatcgacgagtgcggccctgccccaccgggggccacatctgctcctaccgctgcatcaacatccctggaaggtttccagtggcagctgcccctcgtctggctacagggtngggccccccaatggccgcaactgccaagacattgatgagtgtgtgactggcatccacaactgctccatcaacgagacctgcttcaacatccaggggcggcttccgctgcctggccttcgagtgccctgagaactaccgccgctccgcagccacatgatcgtaggggaactccccatgaggccatcggtgcaggctggagaagagaaggcaagttggcaggagtggagaccatgggcatttgagccacttcctcatgtaacttacttgtgccttcaggacctgctcaagccccgatcacgtatataccacttccatttgatgatggaatgctgctgtgcatgacccactttatggctagatgggtcagaaagcacccagttcatgataggcagttcaggtcatatggtgacttgatgacccatagtcaaacattcagtttccaccaaagcccagtaacaggccaagagctgtctctcaaaagaagagtagttatctgcagaagatggcagggccttgctccgaaagcctagagaccgccactgtgattcacctatgggggcctgccaaaggctgcagccagcatccttatctgccactgacacctcaagcaacattggatctgctgggtcatatggcccaagtggcagagcaacttgcacaacagcctggacctgtcatagagctttctcctgttctggaccccactcaaaactggcagcctttcaggtcactcgataaatgggccagagtaacacactcaaacgaggaatgtgttgcctccaaaatccaagtaggcccactaggcattgtgcctctttcttgattgtaggaggggccaaatgcagcaacttgtccgtcaccttagaaggaatatcttgacaggccccacaccactgtacccctagaaattttactgaggtagaagttccctgaattttaatcagatttatttcccatcctctggcacccaaacgtctcaccaataagtccagtgcgtttgctacttcttgctcactggatccaatcagcataatgtcatcaatgtaatggaccaatgtgatatcttgtggaagcaaaaagcgatcaaggtctctccg

SEQ ID NO: 13670 - DNA, 912 bp, Homo sapiens
ggtgcttagcatgagaaaattaccaaaataaaaacattttagaggttatttggttctagcaatgttaattattttgtgtttctggataatttaatgtttgtattttaaatgttatgtaaatttcctctttataacaagttttaaaaagcacacgaaaaatagttcaaactatatataatctgttatttttcatcctagttagctcatcacaagtaactcagcaaaacaatgcttgaacattcagttctactaaaaaacagtatttgagtagatcccatcaccttacccattgtttgctatgttagaccctaaaacaggctgccgacagatcggacaagtgcaattctctgagagccatcggtcaatacaatgaatgtgaaattcatgcatgcaaggtaattgcctgagcttgtttccagttatgtggtcactgatacaaacactacagattttacctagttcactatcaatactgttatgctcatagtgcctggtggaaagattgtcaatctgctctttggttaaaccacgtattcgatcatcatcatcactttcatttagtaaaaaaaagtgagcaaggcgaagaatgggtagtgttccagtttcaactaaattgtttggatttcgcaactgcctgccacccctactgtcactgtttcgagtatgaggctgggtggtctcgttttcaccatgcatttcagtgctgtctccttgggcctgcctgtcttgagaggaaccttccctggtgcctggctcctgttgttatctggtacctaagttactcagttctgagtgcatgtctgggtaaatgctggccatttctttgaagttctgactcagaatcggcctccattagagaactcagttctccaaacccagtcaatgatctgccttaaaattgaccgaagagcc

SEQ ID NO: 13671 - DNA, 1340 bp, Homo sapiens
tttttttttttccatttgaaaatgtgacccatttatttgaactgaaaggcatcattacaaagtgcaaacatttctttggtaatgaactgaatacaatggtcataaaaaaggcatttggctgttggagcagttagaaaagtaaataaatatgtacattccactcctgttacagcgatcccgcacagtggctgctagacacgttcacccagggcactgccccactgttctgattacagagagtatcaaactggtgattccgcagacattttggtttgaattacagaattttttttggtaaatcacagtcagcttccccctttggcttagacaacacaattccttgtgactggcccagaccgcacattacgcaggtgtgctacaggtgtgccgcctcagcactgaggaccatgaggcctccagggcatgtaagaggcacagaacactcccagaacccagaatctgctgtcatctgagtgcctgagcaacttacataaccatcagcttttagacgaacttacacatttcctatttgacagaaatctcttccacaatttggtcactacatttgacttgctatttcaaaagaagtccacatgtcatgaaacaccaaccaatttttatcaatcacttaccaatatgaggttaagaagttaagacaaccatttttacagataaaacacatgaatccaatgaccttcctcacagctgaaatgctgcctccgccgcagcaacttggccggcccgtgctggaagggtctgggtgtctccttgggaggatgtgcaacctggaacacgggttgtgcacaaatcacaccaggcactgtatgcgcccatcctgtcagaaggaagctggcctcccccaccccatggaagcctcgacgccataccccagtgctggacacctgccaccctgaaccgaaacggcccctgacctcaggggctccctccaccacctcagctgggccttgctgcgggcaggtggcccggaccttggtgcctcgtgtgcccagcacctgtgcctggcacatggtggatactcaggtcagcgtgctgcactgaagctgtgtgttcggggaaaggttgctcagaacacagatcgctttgtatttagagaaaaatggaaggttttggtcaattaaagagagaccatgaggtatgagagttgattttcactgacgtctaaaagaactttgcatagtggaaatggtttttctgccatatctaatacctaaaaaatggacacaatttcataaaacatcacgcattttaaaaatacaaatgaggtatagggattcttttttttttttttttttttaacgcactcacacaacctgaagtta

SEQ ID NO: 13672 - DNA, 1036 bp, Homo sapiens
gaatttgctgagtcagcagaggatgggcccaccaccagattctgtcagaagctggcgaagaaccatgacatggtggtggtgtctcccatcctggaacgagacagcgagcatggggatgttttgtggaatacagccgtggtgatctccaattccggagcagtcctgggaaagaccaggaaaaaccacatccccagagtgggtgatttcaacgagtcaacttactacatggagggaaacctggggccaccccgtgttccagacgcagtttcgggaaggatcgcggtgaacatttgctacgggcggcaccaccccctcaactggcttatgtacagcatcaacggggctgagatcatcttcaacccctcggccacgataggagcactcagcgagtccctgtggcccatcgaggccagaaaccgcagccattgccaatcactgcttcacctgcgccatcaatcgagtgggcaccgagcacttcccgaacgagtttacctcgggagatggaaagaaagctcaccaggactttggctacttttatggctcgagctatgtggcagcccctgacagcagccggactcctgggctgtcccgtagccgggatggactgctagttgctaagctcgacctaaacctctgccagcaggtgaatgatgtctggaacttcaagatgacgggcaggtatgagatgtacgcacgggagctcgccgaagctgtcaagtccaactacagccccaccatcgtgaaagagtagccggcttcagtgcctgccttggggtgaggaagacacctctgccccagtggattagcaagtgtggcaggcttaacatgtccaggttctccccaataacattgtccaggttggttttaaaattcccaggcagggggagagtggcatggggagtgacttcttaatgggtaaggggctgcttacttctggggtattggaaatgtttggggactaggtagaggtgaatgtactaaatgccactgaatttgtatacttcagaatgtttgttatgtaaattttacctcaact

SEQ ID NO: 13673 - DNA, 1694 bp, Homo sapiens
attctttgccttacctttcttagaactctttattgcttatcaaaagtttgagtacccgcttggtttttttttggtaattaaatattgtatgatttatctggttcaaggaagatgcactattcagttatctattgagaaattattttgcagtggttttagtgggtgaaaatgtcccatctgcaccagtacacaggcaggcattatcattcttcacctactttttaaatagtggcaacttgggattcattctggtgattctgaaccttgcctcatagcttaaagtataaaaaagattcaagagcagtgaggtttgttctttccagtgaatggtggactgagtggtgcgaggtggagggctaacaagaggaaagaactacattcttcagaatacagtgatgaaaattcattttgaaactcaaatattttcattttggatattctcctgtttttattaaaccagtgattacacctggccatccctctaaatgttctaggaaggcatgtctattgtgattttgatgaagacagaattatttttctctgtagaaacacagataccactttatcagggaagttagtcaaatgaaatgggaaattgggtaaatggacaaaagctaggctagtaaaaaggacgacccagcaacatgctttaaccccattgtatgtttgtggaaagagcatagtttaacatcttgagaaatttgggacataaagttttcatggtagacagttcatgcagtatatgaattgacataatggaaataatctgattttatttttacaactaacatccattccccttcatttaaacaccttttgtgttttacttcagtgaggagattggagtctgaatggatctgttttccaagagattctgagaaatttttgtattcagcagttggaaagctctctattctagttgataaaacttcccttttttgatgtagatgcagatattctatacagttctgttgtcttttactaggactgtaaacttttgtgataaaattcaaataagattttatttcttggtaattttggctttcacaatttatctttaaatccttgagcaatctgtatacaattaagagatttctgacatttattcttacactaaatggatcaactctaggatttaggcatgttaacttctgttgtgttttgaatctctccagagttgcatgtagatagcatttatttctgtgcccttaaacccatttagaaaataactacaaagtaaaaatgtagaggaaatagaaatgtattttttcatgaacattttgatacaaatttcatcatttaatgattcaccaatttcttgcattaatttgaatttaagcatttaattcaaagagaggggagcatccattattgatacatgtgggcttttaaaaactccatcctttataaatagtcaaggtttgggccacacaaagtatatttttatcatggaaaaatttcaactcctcaagccgtaatgttgaacagaattggagtattttctttataatttcttgaacaggcaaatgaaagcttattatagaatgcatgtattttcttttatctttggaacatcagcaccagtatattgctggcagctattgtattaaaaaataaagtatattttcactatcataaaggattcttttttcccccctcatgaaaataaacaacaacttggggtaaaagtgaaa

SEQ ID NO: 13674 - DNA, 858 bp, Homo sapiens
gatgaataaagaaactgtttatctgtctccttgtgaatacttagagtaggggagcgccgtaattgacacatctcttatttgagaagtgtctgttgccctcattaggtttaattacaaaatttgatcacgatcatattgtagtctctcaaagtgctctagaaattgtcagtggtttacatgaagtggccatgggtgtctggagcaccctgaaactgtatcaaagttgtacatatttccaaacatttttaaaatgaaaaggcactctcgtgttctcctcactctgtgcactttgctgttggtgtgacaaggcatttaaagatgtttctggcattttctttttatttgtaaggtggtggtaactatggttattggctagaaatcctgagttttcaactgtatatatctatagtttgtaaaaagaacaaaacaaccgagacaaacccttgatgctccttgctcggcgttgaggctgtggggaagatgccttttgggagaggctgtagctcagggcgtgcactgtgaggctggacctgttgactctgcagggggcatccatttagcttcaggttgtcttgtttctgtatatagtgacatagcattctgctgccatcttagctgtggacaaaggggggtcagctggcatgagaatattttttttttttaagtgcggtagtttttaaactgtttgtttttaaacaaactatagaactcttcattgtcagcaaagcaaagagtcactgcatcaatgaaagttcaagaacctcctgtacttaaacacgattcgcaacgttctgttatttttttgtatgtttagaatgctgaaatgtttttgaagttaaataaacagtattacatttt

SEQ ID NO: 13675 - DNA, 1123 bp, Homo sapiens
ggcccaagaacctgctcaggaagccttttgatggcaagatcaccaatccagatggtattgctccctcaggatggtctgggcctgccctaagggctgtgctgatggaatatgtcctccaggctttgctcagctgagctcctcttctgtaaggaaacccagtcatccctgaatcttgccacagagatccgggattcaggagctctcagtttcttagggatggactatggcccagtcccccatctaagtggtgctttgcaaatgtcttggaggagtataggacagaggaccaaaatacacagcaggtagtgttagctctctgctaggagctcaaagcaacacaacttgtatcaaaatcacaactggcagagaagctggtggatccaatcctttcttcatctgttgttatttagaactcacctctcacactctgttctttagtgtccttacctttatcttaccacacacatgggtgtttctattatccttggaagcacagacctcgggcatccccttattgcctgatgggccaacaccaacagttacggagtgcttgagaaggggcaagtttcacagaaatggccagatagggccttcctacagagcagcaagagtaggccaagcagaaagactgctgaggtaacacgggaccccagcccctgtcagggcctctgccaaggaaataatatggaccatttacctggcaggcagtctgctctctctcaggatcaccacgcatctcaggattggtctaaacttcaagtctcaaccaagtgtctgaagtgaactttgcattgaataaatttttgccatggaaagaacatcaaacaagccactcatctctacagagataagaaaacaagttttggcagagcaagagacagaagaccgtggagaaatcagaagggggaacagtcagtttagttaaggatggaacctgggaaaggccaccattcctgcttgatggggctctgatttgctcttgctcaagtggaataaaaccccatggtcttcttgacatgattcttgatcttttctccactgagacacacttaagtgatgatccttacaggactgacaccctaatgccaataaaagttgctcattatggactgctacaaagacc

SEQ ID NO: 13676 - DNA, 582 bp, Homo sapiens
atagaagatagtcaaatatttgtttatgctaagacctgtttttaattttcagctttgatgtaaattgctagcttagttgtctttagttcaagcatgttaggaaatcctctttattcttaaatatagatacatgtctgcatatatgattgaattttagagccagaaagcatgtagagcagttgtgattagtagaaaatacactgacaagaagatatttgcatttatttcccaaagctgccagtaactagattttgtgacttaagtcatttaacctctccttgattagagcttcctgagccatgcacactgggcactgcaaatcacagacaggcctagatacagatcccctcaccccttgctacatccaaaggtggcctgggtggctggagcctctgggccagaaccacctttgtccattttcctcagtgtgcctacagcatcgctttccatgtgtgccataacttgggaatagttgggatgtgttgcttaactcctttacaccattagttatctgtgaggaccatctattccacactcttcattttttaaaaagagacaataattattttaactcctgaagtt

SEQ ID NO: 13677 - DNA, 1168 bp, Homo sapiens
  misc_feature (1)...(1168): n = a,t,c or g
cggctgctctgggggattcgtgcgcggtaagaagctgcgcgttaggtnganggtaccactgatgaaattatgaccaggtgggcccgagttagtaccacatataacaagagacccttgcctgcaacatcatgggaggacatgaagaagggatcctttgagggaacaagccaaaacctaccaaagcgtaaacaacttgaagccaataggctatccctcaaaaatgatgcaccccaagcaaaacataaaaagaacaaaaagaaaaaagagtacttaaatgaagatgtgaatggattcatggaatacctaagacagaattcacagatggttcacaatgggcaaattatagcaacagacagtgaggaagtaagggaagaaattgcagttgctttaaagaaagacagtcgacgggaaggaagaagattaaaaagacaagcggcaaagaaaaatgcaatggtgtgtttccattgtagaaaacctggtcatggaattgcagattgccccgccgcccttgaaaatcaagacatgggcactgggatatgttacaggtgtgggtccacagagcacgaaataaccaagtgtaaggctaaagtagacccggctcttggcgaatttccttttgcaaaatgttttgtttgtggagaaatggggcacctgtctagatcttgtcctgataatcccaaaggactctatgctgatggtggcggttgcaaactttgtggctctgtggaacatttaaagaaagattgccctgaaagtcagaattcagagcgaatggtcacagttggtcgctgggcaaagggaatgagtgcagactatgaagaaattttggatgtacctaaaccgcaaaaacccaaaacaaaaatacctaaagttgttaatttttgataacagctagcactatcatgagttactacctcattgttactttctaaacccaggccccgcttcacaagttagagttgagctccccctgtagccaggactatgctgtagatatcagtatgatctgggtgtggccaaaaacaattttctttattctgtctatcaaatagtacttctaccactgtttggagaaaattgaagaaaagaataagatgattaaatgaattctctaaaagaacatattttcagagacagaacttagacataaccaagtagttgtatacct

SEQ ID NO: 13678 - DNA, 499 bp, Homo sapiens
gggatgctgttggcttcagagatcaaacacctgccccgaagactcctaataggtcaagagagagagacccagacaagcaaactcaaaataaagagaaaaggaaacgaagaagctccctctcaccaccctcttctgcctatgagcggggaacaaaaaggccagatgacagatatgatacaccaacttctaaaaagaaagtacgaattaaagaccgcaataaactttctacagaggaacgccggaagttgtttgagcaagaggtggctcaacgggaggctcagaaacaacagcaacagatgcagaacctgggaatgacatcaccactgccctatgactctcttggttataatgccccgcatcatccctttgctggttacccaccaggttatcccatgcaggcctatgtggatcccagcaaccctaatgctggaaaggtgctcctgcccacacccagcatggacccagtgtgttctcctgctccttatgatcatgctcagcc

SEQ ID NO: 13679 - DNA, 762 bp, Homo sapiens
tcgcgagcgtctgggcgggtggtaggtgagtgggtattgcgggctagtatccgagcaaaagatggtggcgcaggccgagttaagagctttaatcctgtgaagacatcttagtgaagagtttagagtgctgagagttgaaagcttgcacgtgggaaacgtgcggccggactgccacatgtactgaggttgagtcgtgacggccacaggctccgaattttggcgtgaggaaccgctgatcggccacgggcgccgaacttgctggcctccggcatgtgcctgagcggcggcggaaaaaccaccttaattggggcggagggttagttttaagagcaaagggcctttactaaaatggcgaaggccttccgtcggcgttgttttaaaatgggaagcctcgaccctgtattgaaactgagctgttcgaaggcggcgttgtgtgcaattcggattaatgaaggggaagggttttgtgtggaaaaacgccttggagtgtgacatttctgcgagaatgcttaaataccgatttcccgcaggaacaatggcgctgtcttcagtggcacagtggagcagctctgaagatgcaaagtgagggtcgctgtctgcccattgatagaggccagattgtcttggaagttccaaagttgcaacgatttctggctagtgccacgaggtttacttgactgttgtgtgaaaagctgataagaaaaccatccagaaaaaagctcttcgttttacaaacatgaaaataaaacatgtaattttgga

SEQ ID NO: 13680 - DNA, 712 bp, Homo sapiens
gaaagatggcggcggcagtactgggacagttgggtgcgttatggatacataacctgaggagccgggggaagctggccttgggtgttttacctcaatcatatatccacacaagtgcttctcttgacatttctcgaaaatgggagaagaagaataaaattgtttatcctccacaactgcctggagaacctcggagaccagcagaaatctaccactgtcgaagacaaataaaatatagcaaagacaagatgtggtatttggcaaaattgatacgaggaatgtctattgaccaggctttggctcagttggaattcaatgacaaaaaaggggccaaaataattaaagaggttctcttagaagcacaagatatggcagtgagagaccataacgtggaattcaggtccaatttatatatagctgagtccacctcaggacgaggccagtgcctgaaacgcatccgctaccatggcagaggtcgctttgggatcatggagaaggtttattgccattattttgtgaagttggtggaagggcccccacctccacctgagccaccaaagacggcagttgcccatgccaaagagtatattcagcagcttcgcagccggaccatcgttcacactctatgatgaggagattcagactccacagtgtatatattttgccatttattttctaaaaataaacaaaaattgaaggcaaaaaaaaaaaaaaa

SEQ ID NO: 13681 - DNA, 1188 bp, Homo sapiens
tttccacgtgggaggttttattatgttttacaaccatgaaaacataggaaggtggctgttacagcaaacatttcagatagacgaatcggccaagctccccaaaccccaccttcacagcctcttccacacgtctctcagagattgttgtccttcacttgcaaattcaaggatgttggaagtagacatttaaagtagcaggaacaccatcagtgaaacagaagcagaagtacgatgactttgagaaacaactgatgaaaaatacactacagaaaaccatttctattgtgttatgatgtcagggtggcagatgtgcccagggcttagtgtccatcctcccaggacactgggtcataccgggccttcggtgatcccctccagaggcaagctgggtgcactgtcagctgtgggcctctcctctttcttcagtgaggctgggactcgcagactaacgtagggtttatggcaagctgtgttggccagaggaggatagtgctgtctgtagcaaatgtatgcaaaaatgaggccgatgactccacccacaaaggaatcttgccagtgatgcttgtagtcgcacatgcgggacagggcaatcatcatggcgcagtacaagggcaggatggcagcacagagccgccagctctttccccgcccactctcggtgaagcagtgcagcttgcccgccaagtagaacgtcgtgaagccaaggcccgaaaaggcaaaggaggaatggatgctggggaagcttttgcggccctcggaacaccagatccggggtccacctgtgccaatgccatttcccgagttccatcaactccatctggaaaagcagccggtaaaaagaaatcgggggcgaggtcttcccactattaatttaatagtgtttgtgcagactccattcaaagcaagagccaaggacaccgctaagaaggcttccttaatttcagtcttgtctgttcgccggataattttcaccacacaaataacagccaggggtgtgaggaaagaaattgcaaacatgaggcgggtaggtatgttatctgattgcaccaaaggatttttatagagccagatctcttctggctggatgactctctggaacggatccaaaaactctgtaaaaacgaagactccgaagagcagggctcgcaccccgatctcaatggccagctccgcatggtgcggccggag

SEQ ID NO: 13682 - DNA, 582 bp, Homo sapiens
gtggagagcagcaggtaagtggtttcccgcactgccggtatccgccgccatccggactcccgggtcctctgtgcaggttggaggatggttggttgtggcgagcgaggctgaaggagccgggacgcggggctctgggcctcgggaactgagccggtactcacctccgccccttctccccgtcgctgtccgcagccatggccctacgctaccctatggccgtgggcctcaacaagggccacaaagtgaccaagaacgtgagcaagcccaggcacagcccgaccgcgggcgtctgaccaaacacaccaagttcgtgcgggacatgattcgggaggtgtgttgctttgccccgtacgagcggcgcgccatggagttactgaaggtctccaaggacaaacgggccctcaaatttatcaagaaaagggtggggacgcacatccgcgccaagaggaagcgggaggagctgagcaacgtactggccgccatgaggaaagctgctgccaagaaagactgagcccctcccctgccctctccctgaaataaagaacagcttgacagaaaaaaaaaaaaaaaaaaaagtcgacc

SEQ ID NO: 13683 - DNA, 1682 bp, Homo sapiens
tgaatgtttatacagtgttgaccctgccacgtttgacgcttacaaaaaaaatgataagaaaaatacagaagagaagaagaacagcaaacagatgagcacctctgaggagttggatgaaatgccagtgccggattctgaaagtgtattcattatccctggaagcgttcttctatggcgaatagcccacggcctccaaattctgcccagatgtataattttactagttttgcaatggttttgaatgaagtagacaaagacatggagagtgtgattcccaagacagactgcaggttacggcctgacatcagagccatggaaaatggagagatagatcaagctagtgaagaaaaaaaacgacttgaggaaaaacaaagagcagcccgcaaaaacaggtccaagtcagaagaggactggaagacgaggtggttccatcaaggtcctaatccctacaatggagcacaggactggatttactctggcagctactgggacagaaattacttcaatttgcctgacatttattaaaatgcatacaagtcagggtgtttggctaatctacaaataagtcttaaacctatgtttttaaatttttttcccttggtttctacttatcttttaaaaaaaaaatgaaaaaacactcatgagataactgcatttcacccaacaaaagcagggtataaggcgatattggtgatgaaagtcttaggaaaaatgcataattttgctataaaatgtacttatttggaatactattttatatagaggtaagaggaacactgctggggaatatgctttttatggttgctgttgccatatttactgaaggtttatacctaaatgtaactttaggctttatgggaactatataggtaatccccaaatcaagttattttggaatatttttatggctgtcatgcttggaatgttttagatgtaacctttgacatatttagaactctcctcctatacaatgtttattctcagatatagaggttatgtcattttataaagacttcattgataagatggcttttattcatactaatcctcccaatgttaccccttccatcttccaagaagaaaaaaaatgcctgaatattcagaatagatatttctgatttgaaaattctaaagaattaaactggaaaagtatttcatttacttagtgctctgaatttacttttacagttttctgcagtcagtatcattaaaatggttaagtttacatttgaactgaaaatatgtataaaatctagcaattcacaaaaatgccctagaaatatagattttaatcaccattacataatgacaaaccttgttaaatgcttcccacttccagtggcaaatgccactagggaaagtaagttgcactcatgtaagtatcaaactatataaaaggaggccttgtgcatttcaagtttgcaaagtacctgtgtacttaaaatatgtgtggagacctactgtacagtagttttgcccctttaattggggcacattcatcttaaatcttatagtatttatccacccaaaccccagactgagatactgctcccagggggcctaggtaggctgccagtccgtgattttaattgctgtgcttgaagttaacaagtgttataatgaaataatctacctgatgctaaataaaggctttagaatgttcaaaaaaaaaaaaaaaaaaa

SEQ ID NO: 13684 - DNA, 1612 bp, Homo sapiens
tttttttttttttcatacgattggtttaattttttttttcagcaggagaaaaaagaataaagttacaagattcttttaatattttcacaatgttaaaactaaaactgagctctaggctatgtgtgtaagtaaatctagaacacaaaagggttaaataagattttctcttttaaagatacaagaatttaagctttccttacatttaacaaacttcacagaacagatactgcaggggaacaagccccaccccccaccccccccagctctaagtcaggaagcgaacatggggcttcgctcccccagggccaggctcccctggggctccttcccatgggctgcctccacgcagcaggcagaggagggggcgggaggccctggggggagggccgggaagggctcgcacagcctcttcgggaccagagcttggcggaagcctatggggggctgcctcactgaggatggcccgtatggtggccaagggctgtggcttgacagcagtggtaaacgctgggcagacctggcccctctgccctgggttgccctagagcaagacaccggtctgggtcctgaagcaagaattaaggctggggattttgcagcgggttccactctggtgggtggagggtgggaagagcatgacttcctatttcagtacgtcggatcaaaaaacatttgcagttgcaggtgttcagctgttaatttgcagacagagttgaaccatttgttgttttataaaaaggaaagttgctgggttaaactattccagtagcctatgtgtgggcagatccacgctgcctccgcaggggcctcctgccctcacccacctggatctgatgcggcactaggaccactgggactgctcaccctgcctgggctttcaagggaatcctgatcctgtccacccagccccagccccacctgactggtagtgatttcctaacatggggcaaccaggcccacccccacccttccccacctggcgtgcgcagttgcagctgctgaaatcctctgtgaacatgagggggcacaggtggagaaatgtaccctcaggccctcacctaccagagcaaatatcactctcggagctgggccacagccacaaaccgctgttctagacagatccaaacccactgtccctgggacgtatgctgccttcccttactaaacttgctatatggtagatgtggaactgggtgtccttggactatggggctgcatagaaacgagaatggaggccacgacatcatcctcttggcccctggaggcacgggcggctccagctggaaagggcagagcccgtgggcggcagcttccccagctgctgctcccagcacttctactgattcttgttggctatgaaatgtctttttaaaaaactcccaatatagaaatctggctgcagaggccagtgtgcagacccagccaccgcgctgtgctgccattcgccacatctggtccgtgccagatccctgcactggcgaatggcagaccagagccggcggaggcggggcactctggctgcttctcgtgaccttggatcctgtgtagaaaaggcgggtctcgttcgtggactagtcttgagtggagctaattttcaaagtgaggttactgt

SEQ ID NO: 13685 - DNA, 715 bp, Homo sapiens
gcacggaaatgaaagtggaagcaaacagcctgcgagcagagcctcctgaggtgtatttcgggtcttgctggggctgagagagaccacagccctttggggggtacaaacaagagttcagttgctgtgaattctgccactgtgcccagctctgaagcctcagctcttgccaaacagacccgagacccatgtcagccccactggatgccgccctccacgcccttcaggaggagcaggccagactcaagatgaggctgtgggacctgcagcagctgagaaaggagctcgggggactcccccaaagacaaggtcccattttcagtgcccaagatccccctggtattccgaggacacacccagcaggacccggaagtgcctaagtctttagtttccaatttgcggatccactgccctctgcttgcgggctctgctctgatcacctttgatgaccccaaagtggctgagcaggtgctgcaacaaaaggagcacacgatcaacatggaggagtgccggctgcgggtgcaggtccagcccttggagctgcccatggtcaccaccatccaggtgatggtgtccagccagttgagtggccggagggtgttggtcactggatttcctgccagcctcaggctgagtgaggaggagcgctggacaagctagagatcttctttggcaagactaggaacggaggtggcgatgtggacgttcgggagctact

SEQ ID NO: 13686 - DNA, 406 bp, Homo sapiens
cgcacgtcctgattctcctggagtctccagcccgcccagtggccgcagtcacccaggtccagaggcggcggtatcacaggctctccgacatgtctatgctggctgaacgtcggcggaagcagaagtgggctgtggatcctcagaacactgcctggagtaatgacgattccaagtttggccagcggatgctagagaagatggggtggtctaaaggaaaggacaactggattgcccatcaggatgattttaaccagcttctggccgaactgaacacttgccatgggcaggaaaccacagattcctcggacaagaaggaaaagaaatcttttagccttgaggaaaagtccaaaatctccaaaaaccgtgttcactatatgaaattcacaaaagggaaggatctgtcatc

SEQ ID NO: 13687 - DNA, 528 bp, Homo sapiens
  misc_feature (1)...(528): n = a,t,c or g
gcggcacgagcgtcggcggaagcagaagtgggctgtggatcctcagaacactgcctggagtaatgacgattccaagtttggccagcggatgctagagaagatggggtggtctaaaggaaagggtttaggggctcaggagcaaggagccacagatcatattaaagttcaagtgaaaaataaccacctgggactcggagctaccatcaataatgaagacaactggattgcccatcaggatgattttaaccagcttctggccgaactgaacacttgccatgggcaggaaaccacagattcctcggacaagaaggaaaagaaatcttttagccttgaggaaaagtccaaaatctccaaaaaccgtgttcactatatgaaattcacaaaagggcgatgccagtccctccactccagaggagaacgaaaccacgacaaccancgccttcaccatccaggagtactttgccaagcggatggcagcactgaagaacaagcccaggttcaagttcaaggnctgcatttctgagacca

SEQ ID NO: 13688 - DNA, 1168 bp, Homo sapiens
gcgctgtagggagcctgtgctgtgccgcgcagttaggcagcagcagccgcggagcagtagccgccgtgggagggagccatgaagcattacgaggtggagattctggacgcaaagacaagggagaagctgtgtttcttggacaagagctgacgtccctgcgcctgtgcttcccccaggtggagccccacgccaccattgcggagatcaagaacctcttcactaagacccatccgcagtggtaccccgcccgccagtccctccgcctggaccccaagggcaagtccctgaaggatgaggatgttctgcagaagctgcccgtgggcaccaggcccacactgtacttccgggacctgggggcccagatcagctgggtgacggtcttcctaacagagtacgcggggcccccttttcatctacctgctcttctacttccgagtgcccttcatctatggccacaaatatgactttacgtccagtcggcatacagtggttgcacctcgcctgcatctgtcactcattccactacatcaagcgcctgctggagacgctcttcgtgcaccgcttctcccatggcactatgcctttgcgcaacatcttcaagaactgcacctactactggggcttcgccgcgtggatggcctattacatcaatcaccctctctacactccccctacctacggagctcagcaggtgaaactggcgctcgccatctttgtgatctgccagctcggcaacttctccatccacatgggccctgcgggacctgcggcccgctgggtccaagacgcggaagatcccataccccaccaagaaccccttcacgtggctcttcctgctggtgtcctgccccaactacacctacgaggtggggtcctggatcggtttcgccatcatgacgcagtgtctcccagtggccctgttctccctggtgggtttcacccagatgaccatctgggccaagggcaagcaccgcagctacctgaaggagttccgggactacccgcccctgcgcatgcccatcatccccttcctgctctgagcgctcacccctgctgaggctcagcccctcaacccggtggcattctgggggaggagtggggcccacagctctccagcacccggaataaagcccgcctgccccagtcggaaaaaaaaaaaaaaaaaaga

SEQ ID NO: 13689 - DNA, 1452 bp, Homo sapiens
tttttttttttatcaaagagaaccctaaaaattctaattgagcaactttattcacataatttctacaccaagaactcgaggttatctctgatggaaccaatttcactaatatttactttaagggcagagaagtcaaccaagtcctcacagtctcaagaatcaaaaacaaaacaaaaatacaaacagagagcaagtgggaagataaataacactccgaaataacctagctacacacttttagtttccaatttttctagcatgaaatcacttttctcttccatcctgtaagacgtgttctctcctctctcttctgagttgggctgtgaagagctgccctggtctcccggtctgacggtgttgtccaccccatctgaggcacccagggaattgccctggcgtccggagccctggggttctgatagcctgggtctttttgcagggaactgatggtccctcgtgccatccctcgtgatggcacgagcaacacatgtagatgaaggagcctcaattgcagttgagcccagtagactttttctgcaccccaggggtgatgatggcaacttctggaaaccctggaagtgagggtctggatttaattttcctaagaagccttctgtttgatatcgaacttccatacttgctttatctgtagacactccaatacataaaggcactgtcatctgcccaggagatttgaggcaatacttttgatgaagcttgtcaaattcttctttaatttcatcgtaacgattccttccgtggcctggcacttctttatctgggactgaaagagttttgctgggtgacactgactttctaaatattccagaactatttccctgaacgtgaaggtcagatgtctgctgcgggcgagttgcgctgtgtgtggggttggtctttggaagtgatgaagatgaatcgctcttgggcaggcacctacctgcttccagagatcttttgcctaggttttcaaaagcctcacttaaactttttgcttttgctttgctggaaggtaaactcagcctgcgggtttctaagccctgaaggccaccaggactcgcaggaccccctctgtacatgttcatggcccaggagtccgggaggcacatccggcgaggctggttcctgggactcaggcaatattcccgatgaagctgatcaaatcggatttcaatctccctctgacggttctctccatggccctgtcgtattgttggtctggaaactatttttacaggagaaattaaccattttaatgtcctaaatctattttcctcatcaagattatatgttgcactggagtcgaagtaaatcaaggaagaatacttcgagggtgtcactttgcgctccttccaacttggatctaacttatggatttggggtctgttgacttcaagaaaagctttttccaattttaaacctgtcttacggcaagaaacatctaatacgttc

SEQ ID NO: 13690 - DNA, 2082 bp, Homo sapiens
ccgttcgctcttctggaaggaagagatggagctgacgctcgtggggctgcagtactcgggcaagaccaccttcgtcaatgtcatcgcgtcaggtcaattcagtgaagatatgatacccacagtgggcttcaacatgaggaaggtaactaaaggtaacgtcacaataaagatctgggacataggaggacaaccccgatttcgaagcatgtgggagcggtattgcagaggagtcaatgctattgtttacatgatagatgctgcagatcgtgaaaagatagaagcttcccgaaatgagctacataatcttctagataaaccacagttacaaggaattccagtgctagtgcttggaaacaagagagatcttcctaatgccttggatgagaaacagctaattgaaaaaatgaatctgtctgctattcaggatagagaaatttgctgctattcaatttcttgcaaagaaaaggataatatagatatcacacttcagtggcttattcagcattcaaaatctagaagaagctgaagcatctcctgaagtcttccagtccttcttggctataatcctagaattattgtccgttcctctgaagtaattcccagaatacggtccttcctaaaccccagaaattgcctttttcagagtttatttctcatgtgcactgctgaagatgaatatccctaatccttcataaagaatcagctagagttgtcatgataaagtcagcacacacaaaaaggcttcttacacatacctgtcttaaaccatgtgtagagctttaaaaacagaaaaaaaaccccatatacttatgaccatcttaaatcaagaaaattgcatatttccattctggtctttctgggccagatttttatattggttttcagtaaatgtctatctataatatttcattatagagtccagtagcttaatactgacactgacttgatacagcatgaagtttctagtgccacacacagtatttagaaaacctttaggcgtgaatgactcatgtgggatatatgtaaacataatgtttattttatctcacaaatgcatgtgaaatgtataattacatcttaggaatccaaaatggtctgcagagagtgagcggaggcaccagatcaatgttggttctttgcactggtgagattctgcctgatgaatattaaagatatcctgctttctgagaactctatcaccagatggcagttgggatatgggaggaactaaagcatcctgttttgtatctgtccagatcattatttctgtctcttgttttttcttcctggttcaggatacttttttaaggggttgagaattgaagattttccaaaagcgttcatgaatttagagcattccacccaatataataaaacctgttaagaatgtcagtctttgttcaaacatctgtttgttctatctccagtcattaaatcagtgctgctgcatgacactcttaactcctgactttttatatccagtcataaagttgactttcagcacaaaagatacttataaacaaataaaaaatttttatttttctctcttactgatgtaagctttggcactcttttgactggtgccattagacatcttgattattgtgacaactctagacctgcctgctttatctaatgtaatcatgctcaatgtctacaggttgtttaataatcagtcacacagagaactgaggaactgatgctgtttgtttgcttctatgatacagagatgtctaaaaacttcaaatggacatgttttgtagtttagcgacttccgtatacataaagggacatattaatactggttcatttgtaaattattattcatatagaccactgtagtagataaaactcctatggtacaccctgccttatgtgttgcctcacacctgtgtgtgaatttttgtttccttttggttaagcagcacttatgtagactgcatttccaaatgtgttgagcactcagagtgtagtcaacagtaagttcttttaatgaatatcagttttaatttatagactgccatggccttaaaaatattctgtacaatatactgcactgtgttgcacagacactaaaaaaaa

SEQ ID NO: 13691 - DNA, 485 bp, Homo sapiens
ccgaggtccgaaaaaagccagatctggaaggtggctgcggaacggttttaagcggaagatggaggagccggaggaaccggcggacagtgggcagtcgctggtcccggtttatatctatagtcccgagtatgtcagtatgtgtgactccctggccaagatccccaaacgggccagtatggtgcattctttgattgaagcatatgcactgcataagcagatgaggatagttaagcctaaagtggcctccatggaggagatggccaccttccacactgatgcttatctgcagcatctccagaaggtcagccaagagggcgatgatgatcatccggactccatagaatatgggctaggttatgactgcccagccactgaagggatatttgagctatgcagcagctataggaggggctacgatcacagctgcccaatgcctgattgacggaatgtgcaaagtagcaattaactggtctggagggtggcat

SEQ ID NO: 13692 - DNA, 834 bp, Homo sapiens
gcgttgcacagtgagtgggagataactcgggggatttacaagtccagttgcttgaaagagtcaaattgattgtggccttttctttcgctgctcataaactattaccacccagttagctttatttatttgtggtgttaagaatcttgatgtgaccgaagaagtctgtggcatggtgccaaggcaggcccaacactgggaaaggactaattttttttgtatattgagagaaaagtttcacatagactggccagagttccgaagcacaactacagacagcgtcattgacagggggacttggcaggacaccttgatccaaggcgacagcattttggcaaggacacggaagttgggtcgttgcatccatcatcaggagttgacttgttctgagcaactgaacagaacacaccgcgatgctctcgacacttccgctcctgggacttcagtcacgagtgagttgatggtgacttgacctgagagatttcacagaagctctgtgacttggttgtggaagaaatctgaactgttcaagttaaccaacttggttcattttaaatcagggcaaaagccacagtgggttcccctgagaaggttagtcaaagacttctggtcaaggttatgaccgttctgaacactgaatatttctccgcaaggatgttccacaaacagctacttgaatgtatgatggtgtatgcttggtcctgggggaatccaccggcaaggaaaaaaaacctttagctctttcctgtgctgcagtcggctttcagaaatgacagaggtggcccggactgtattcacctacgtcctggggttgaagaccaaattcccccaaaggct

SEQ ID NO: 13693 - DNA, 1035 bp, Homo sapiens
tttttgcttacgtgggcacttttcagcttttaataatctgaaaaattctatttacccattgtcaatgtgtataaattaatctcagtcaattttatacaataaagggtgaacttttatccatcaaacaataatttaacaaaaaatgtaccggaagaagaatgttcattacaaatataggaaacataaatattaccaaatattggcaagcactaaaatgttcagaaatataagtctactacagttatagctctctcaagcaaaaaaatagcagagaaaaacttagtttaccttaggggctatttatttacttagggatttgttaaaaggtcaaatggggtcacacagaatactaagaagagctgttcacccaggcctcactaagaactcttcttcattcagtagctatatagtaacatgacaactgctcctacgacccaaagaggaactacagcaactactctttagcatctgttgctcccaactctgctttgcaattatatgactcaagcattctggctccgttaactattactgctgttactcccaagtaaattccctctaaaaaataaaaatttttaaagctgtaatttaagctctctgctgcctcatgacttcaattccatcagagttacgcattgtttcctctgtacatctttgctctgcttccattgctaattccctagtaaagtgttgtatattcaaagttccaaagaaacagaatatccaagacatcaccaatcatccaaaacacagtgtaggaggccacagttaagagaagcaagaccattagctctttttataggctcgagaacaacaggatgctttggtcctgtatcaggcaggacgctttttgggtagatcctactgccaccctacttttcggggtagatcctactgtcaccctagctatgggcacatgtcagagtcccatgtaataaaggagacaaaaggaaaccaccacgagtataaactaagaaaagtactccgaaggtttctaagaatggagctgtataactccactttgccccgtttgtt

SEQ ID NO: 13694 - DNA, 2266 bp, Homo sapiens
ggaaaggagagctaccatcactaagggctgaaaacacagttaaatcactttcaaagttaaaagactattaagaacacaagatggggactcctgcttctggaaggaaaagaacacctgtgaaagaccgattttctgcagaagatgaagctttgagtaacattgccagagaggcagaggcaaggctggcagcaaaacgggctgcccgggcagaagcaagagatatacgcatgagagaactggaacgacaacaaaaagagttggatgaaaaatctgacaaacagtatgctgaaaattatacaagaccttcatctcgaaattctgcctcagcaacaacccctctaagtggaaactcatccagacgaggaagtggggacaccagcagcttaatagatccagacacttcattaagtgaattgcgggatatctatgaccttaaggaccagatacaggatgtagaagggagatacatgcaggggcttaaagaactaaaggaatctttgtctgaagtggaagaaaaatacaagaaagccatggtttccaatgcacagttagacaatgagaagaacaatttgatctaccaagtagacacactcaaggatgttattgaagagcaggaggaacagatggcagaattttatagagaaaatgaagaaaaatcaaaggagttagaaaggcagaaacatatgtgtagtgtgctgcagcataagatggaagaacttaaagaaggcctgcggcaaagagatgagcttattgagaaacatggcttagttataatcccccgatggcactcccaatggtgatgtcagtcatgaaccagtggctggagccatcactgttgtgtctcaggaagctgctcaggtcttggagtcagcaggagaagggccattagatgtaaggctaccgaaaacttgctggagacaaggaacgaactactgtcacagattagaaaactgaagcttcagttagaggaggaacgacagaaatgctccaggaatgatggcacagtgggtgacctggcaggactgcagaatggctcagacttgcagttcatcgaaatgcagagagatgccaatagacaaattagcgaatacaaatttaagctttcaaaagcagaacaggatataactaccttggagcaaagtattagccggcttgagggacaggttctgagatataaaactgctgctgagaatgctgagaaagttgaagatgaattgaaagcagaaaaacggaagctacaacgagagttacgaacagcactggacaagattgaggagatggagatgaccaacagccacctggccaagcggctggagaagatgaaggccaataggacagcacttctggcccagcagtaggaaaaccacccttcaacctgggtgatgctccttggggccctacctagagggactgacttttgtccattgacacaaaccccttttagtactgttttgagttttgtcattaaaacagccacctttgtattttataatttatgacagaatgaagtcattttgaatctacatgaatgaacactttggattttgttgtagtttgattctagggtagaaccagtccatgctgtttttattttttatctccgtaattgtagaatcatgtttactcaacgtttttccccagctgcctcagtaactgggcactcggaggccttggcacgggttctggaggacagacagcaattctatgagtgctcactgagatacttgctggagacctcagaaaacacaagtgccttctccacggtgcaattcagacttcagtgatctccagtggtcaaaagacatttacccttaatatcagacaacatttatattttagtgaagaaacaagttctcgggtggggaatctatgtttcactcagatttatatgtttggaggaaaaaagcctttttttgtaaaatatttaaatttatataagaaaatgttagaaaaaaatatggggagtgtatataaaacttgctttattgcatggggcaggggaagtccaggcctaatactcctaaagtaagagttgggtcctttttttcttcaatacaactgtgctgtaccttgtaaagtattttatctgctgcttatttgtggaatgaaacctcaaacaaacccaaagggggagggtagggcagggcaggcagattggaaatctgcctgcaggattctattaaatacacccttttgccaaccacaattgggctactgacatgttcattttgttatagggagacttttaaaacaaatcatggcaacc

SEQ ID NO: 13695 - DNA, 858 bp, Homo sapiens
cgcggccgcgtcgacgttttgaagacgtggatggcgggaattctcgcttctggcctgggtgagctagaagggagaaggtgttttagctcacttggaaaggctagagacccaagtgagcagatcccgtaaacagtctgaagagctgcagagcgtgcaggcccaggaaggtgctcttggaaccaagattcataaactaaggcgtctgcgagatgagctgagggctgtggtgcggcaccggcgagccagcgtgaaagcatgtattgccaatgtagaacccaaccaaacagtggagatcaatgagcaagaagcattggaagagaaattggaaaatgtgaaagccattctgcaggcatatcattttacaggcctcagtggtaaactgaccagccgaggagtttgtgtctgcatcagtactgcttttgaggggaacctattggattcctattttgtggaccttgtcatacagaaaccactccggatacatcaccattcagtcccagtcttcattcccctggaagagatagctgcaaaatatttacagaccaacatccagcacttcctgttcagtctctgcgagtacctgaatgcttactctgggaggaagtaccaggcagaccggcttcagagtgactttgcagccctcctgactgggcccttgcagagaaacccactgtgtaacttgctgtcatttacttacaaactggatccagggggtcagtccttcccgttctgtgctagattgctgtataaggacctcacagcaactcttcccactgacgtcaccgtgacatgtcaaggagtggaagtattatccacttcatgggaggagcaacgagcatcttcatgaaactctgttct

SEQ ID NO: 13696 - DNA, 1317 bp, Homo sapiens
ggttaatcaaatactgcagtactgatttaatcagtataaaatcgaaagagctttagatctgtaataaaaatccaaatttggggaagggcaaactttaaaacagcagccaagtagagaagggttggggaagggagaggtgagtgaacaggcacattggaactgtggggacatgtaactgaccactgtcaaaccagtgtaagtttcttggtttctcatggaaaacattttatacacctatttttcttccttccatacttaagtccatcagtgtccaaatacgtctgttccattttttgtctgatttttgttgggatattacaacacagtattgcatttactccagttcctgctccatgtgaaaaaattagatgatttcaaatactttcttcagctccacaataagctgccagtcactcttctgcatttcatctctgaaccagtctttgagtgcatcaatggactgccggctgatcttactaacaagaatatctgtagcttcaaaatgtcttccaaacattttgggtgactcacccagggataggttctatttttacacaaacttcttgtcctttttttgcaacatccacttgtttatggtttatttcaatacttgttactattccgatggtcaacaaaatttttggcttgggacacacatgggtgtcccctgtttcacctgacctgcttccaccgtcacccccatcactatcggatctcgagaattaaaaatgtactgagggaggatttttatcttgcagggaaatactgctatgtgcttaaattcttcttgtttctgtttcttgtagtcttgtctatattttgtaaaggcatcaaataaatgataaataatttctgcactaaaaattctaactcctaaactatcagccatttcttgtgcatctcgttcaattctcacatcgaaggccaaaattactgcatactgagggtcatgttccaacatcactgaagccttcataacatcttttttatgcactgggccaatgttaattcctgcatagggcacttctgatgttttcagaaattccagtagagcttccaaagaacccagtgtagatgcctggacatagactcctttttcttctaatttgatagcatttagtgtctgctttaactcatggatcaattcatctttaagaacagggatttcatcttctttataagccacaaggaggggtaaaccagccaatgttttctccaggtcttttccaagaatctttaccccctgagctgcttctacttctttatgcttttcatactggttcttcactcgtaattccttcataggaggaggtaaca

SEQ ID NO: 13697 - DNA, 1049 bp, Homo sapiens
acacctgggcaacagagtgaaacctgtccctgttttcctgctcttactctcacctctgaggcctcctctgcctggaagagattacagggaaattccaggcagcccttgtcaattgtttttatgaattctttacctgttccttttaaagacaaggaaactgaggcccaaagttctaagttgtttggcaaatggagtctcctaccctcagctcctgcaaggacctggggggacccccaggtcaaggcagccacatgattctgcagcagacagggacctagagcacatctggatctcagccccacccctggcaacctgcctgcctagagaactcccaagatgacagactaagtaggattctgccatttagaataattctggtatcctgggcgttgcgttaagttgcttaactttcattctgtcttacgatagtcttcagaggtgggaacagatgaagaaaccatgccccagagaaggttaagtgacttcctctttatggagccagtgttccaacctaggtttgcctgataccagacctgtggccccacctcccatgcaggtctctgtggggtctttgggatggatctcctagggctgggctggaagcctcatgtactgttgtcttctaggtaaccaccctgaagagaaggggtggcatcaggaaccgcagggaacccaagcagcctttggtccagtgctgctccttggaacagttgagtgtggcctcaaaccattctcctgggtagctcagtcataaaacaccgaatgcctgcctcaaaatagcctctgagggaagggagctgttgacaagtgaagccctcaggttgtgtgggattccagcaggttattacagcttgtggggggagggagggtccattccaccagctttgaatcccagggtcccctcagcttcactgggccacagtgtctgtcccaggaagaagcaaatggacagtgaggatgatggagagactacagctgccttgtctaaaacctgggatcttaaaagtgttattttggcttttattttttaaaaaaagaaaaggaaaaaa

SEQ ID NO: 13698 - DNA, 1852 bp, Homo sapiens
ccgcgtcgactttttttttttttttttccaagtttatagtctaaattttattatctccaagtcacaatgctgatcacaaatgggcaccctttaaaacagtaacaaaaaacaccaccacacatggaaaaatccttgcaactaaacacagtggaccaacagagacaactctcacagtgtcttaaggtctgggaatctgggcatgctgcccacaggcttgaggagacatcttcaggtttaaggcaaagggaacagcctacaaaaggcacaaccaccagctacccctagaagaatctcttagttatttcctccttgggggttacagattaagtgcctctccccactctccatccccacacctgtgactcagagtgattaggccagctgctagatggaaggaataaaaacagtgacattaccggggagagacacagccaccatctttgccctcaggttctgtagaaggacagggacagtggccaggttacccctggcagacgtatgtactgcagtaataggaatctcttccacagaggcagcagagaagtggtttagtgccatggatagggaggaaagataggagcccttgcccagaaggtgactggcttccttaggccttaagccccaggagtttttatattctgtctgcaaggacaaaaatagaattcggggaaaataaggtagtaacatctaaaacacttgtagcaggaaagacgtggagaagagcaattgcaaaggacagggtagactgcttgctggataatatttgcctttaaagagatgcattggtccacagcaactggaaaaggggtgtagcaagaagaatggaaagaagagaagcaaggccctctaattccacttacctcaaaagactgagccctgaggactatgtgaatacacacccctaaaggcaaaggctctcactccaccatccctttctcacaaaagcatctggtgtgccatctctccccacagtagggtattggccctcagcagagaacagaagcccatcatagtacaggtattgatggatgctcagactcctaaaaacctaagtcaaagagaagggctcctacccacctactctgagcttttctgcacaatgggaccctctgtgcagacagcccatgccttccacagggttagagttaagggaatacaagtatacaagaggataacaaatgcccaactaaaagtgaaaggcccaggtctttttagacttggtggggaaggctggctgatacattctccattatctgggatgcacggaagagtcaaaagggaatccagaggggctagaaaaccagaagactagacttgtttcatttaaaggcagggagagagagcaagaaacagaaacaaagagaaaaaattaaaataatattaaggataagaagccaggctttaaaaatgaacatcttagaaaacaaaacaaacaggaaggagcttccttgggaacagaagacacttcaatttcccagaagtgaagaacagcagaagacatgggcttctgtatctagactcagaagcttggggctgtctggctctctctgctcccccgaacacagccaactcaagtgaagagtgaagatgggacgaggtcccacttgtttctccctctctctagagcctgtcctcagaggaaggcaggggtcctcctctttcagctgtttgctggtaggagccacaccctatatctttgaagcccttctggtagtagatagccagctgtatttctcttctgagttctcacctctgctgctttttatatgatgttaagatttaaaatattcagaaacttgtattaactggaacccctgcttacaacctcaggtggagggggcttgatggtgac

SEQ ID NO: 13699 - DNA, 687 bp, Homo sapiens
gacctgtctcccagtccccacccttagagaaggcttttagagaccagaatctgcactgcactttgtttttcttgtggaatttccttcaggaagcccagactctgagctgagaagacaaaagctccagttccatccttgtggaaagtcttgggactgaggggcaagaagagccccagagatgggttgctctgtgccttccagttactgagaacctggtcttcagaacagaagtcaatgcactgttagcttcaacgctattttaggggtgggaagaggagatcttgctgagaactgaggatgctggagtcagggaagcagagaaggttggcgggggtgacagataatgcctggcacaatgataccttgggatttgagatgatcaagctgagatccagctccctcttgtgtgtggactcctgcgagagcagagcaactgcccccacccctgcccccacctgtctgccttgctccttggacctgtgtctaagaccagaggcatctcacccagcccagtttcagaaggaggatgctaatacatctcatggtcatcttttccatcctttcttattatctaacttccctccttcagtttgtaacataaaaccttttttctctctacttttgaaaattttaaaggggaatccttttcatttggatggggtcgggggatggggataaggggggaga

SEQ ID NO: 13700 - DNA, 617 bp, Homo sapiens
ctgtgagagtaagcctgcaaaactcagtgtgcaggcaccagccactcagtggaaagtaaagaaaccctgctgatgagactctggacacccgctgagtcccagagccatttcctggctccatccctaagccccccaaaggaccctgcttgactacagagcacccccatgccatgctggcatatgaacatggggaatcctggaatgagaaagtctttgagctttcagggacctccatgaccaccttgtccagtttctccatttgtgtggagataatccaagcaagacaaggagggcttgggcaatcagaaggttttggagctcaggcctgccaaccctcatttcattcagactggtccactgtcacctgtttcagatatggtgcttctacgtaaacacttatttgaagactgaaaaaaaaagcatttgaaaaccattaaacttctccaaccactcatctttcagatgaggagactgaggtccagcagtgtccataaattattcattacctcctcagtcaatcattattcacccagtcattcacctggagggtggtgaaggcagggagaaccagccagtgcaagggcccctcatgtcctgcctggcctttgcttttccta

SEQ ID NO: 13701 - DNA, 1406 bp, Homo sapiens
tttttttttttttagcccaggtcaacacgcttttattgccacttctggctcccctcgtcccagcaagattcctacctcttaccctgtaggaatactgagctccgatgcaggggaatggggtgggggtgttaccacttctcctctgcacactgccaagttaaagaaaaccctgcttgctggagagggagggccagacagggaggaattcaagggcatgtatggctcagtcccacttctgactgcagagtatagggaccagggttccaaactttttttcgaagtaagggaggtggggaagaatttggctgctgttgtaccccgtgtcctagctgccatgtttccatggaaatgaaggcggggcaggatgtagctcactctgactacctgggaggatggcaggacaggcatttggtaaacatatctccctccactcctacctagcacatacggttgtccccagccgacccccaggctctctcctcactgcctgctccactcccttcccttctggagctggtatcatgccaagtggagtccaggcagggctgccagtgctactctccacagccaggtctcactggcacgttaggatctaagtatgtccgccaagctcaggagcatccctgctagagctggtggtggcagtgcctcggtgaaaaggcagcagcagtacccccaactctctgtgcaactgctgtttcccaaacaaaactgaaaacataaacccaaacacttaagggtatcactctggcacaatgctgagggctgggatgggggagaggaggcgcatcctcctgagactggagccacctgtgcaccctgccttctgcccatctggagtttgcttcttcccactgggctgtcactggggggctggaatccaaatctccatttggtgctgctttcagcacccactgctgttcgtttatgaggcttgccagtttccatggtgaggaggtgcaggatggattctcagtaccatgggtcagcccggtgctgctggttgtagagctgtagcttgatctgatctttgatctgattcactaggatctgggacagcagaattcccaccagctgggggatggccaggcctagagccacaccaccaagtaagaataggttgctgtgtatccagttgaccaacttgtcaatacagccattggtgtagatgactttgctagcttccaagtagtcaaaggcctgcataccttggccacacatagtgttgatcactgcctggtcaggagtaggcaagcaacaggagtaaggcacagagcagcgctctcgactggggttgtcttctgagcagttgaaatacatgttctgagaccagtccttgtaggaaatccctccacagcagctaaactttttctggccaaaatcaatgaggttctgcagatccaagc

SEQ ID NO: 13702 - DNA, 1800 bp, Homo sapiens
  misc_feature (1)...(1800): n = a,t,c or g
gtggagggccacatctgccagagcctgggagtctgcgaaggccgggacccggttccccggcccacagtgggggtgtgcaaacccgagagaactgggtaagttggggtcggcttgcagtttggggtaccccgagggcggtgtacgtcggtaagattgtaacagtattactggaagacttattcgactgtcctgatgatacttgtaataggaagtgccgtcagaagcgataactgacgacgtctaatgtctatctgaccgcagtcgctgaaacctctacaacttagttgaccgtaactgccagagccctgccctggaattcctgtccttactccctctttaagattgcgtacccactgcagagtgctgaagacggggtagccacgaggttgcaaattcgtgaagaatcagcatcatgtttggcagctgagtattggagccaggagcctgccatgaggttttgagaacagagtgctgttttagagctggcagcagcatctcagcccaagagaaggttatattcccagaggatgtcagtcccaaggaccagtagctgccatcagtttggattctgaaaactaactggcatcaacactgggtgtagaaacatgcttgccttatgtatcagaggacatgctcagcagatccaagagatatatttggcaactttttctagaaaaggcacattgggtatcattcattacattcttgagtgttttttcgggttttcatttttttttctgagacagtcttgctgtattgcccaggctggagtgtgggtggcacaatcacagctcattgcatcctcaatcacccagggcctaagcaatcctcccaccttgtagctgggactacagctcacagcacacctggctaaaattttttttttgttgagacggattctctatgttgccccaggctggtctcaggctcctgnnnnnnnnnnnnnnnnnnnnnnnnnnnnnnnnnnnnnnnnnnccaagttgtagctttgtcccttgccatcatgcccaacaagaggttctataccttttaatgaattgactttcataaattggttatgttggtgggcaagttctttaagctggaaattgtaaattcctcctgaaatgttttttcatgcagttaccatgaactaatactacaataaaggatggtcttgggtgtcaattcttgaaaatgtgtatttgaagaaaaagtaaatttcgcctactgttgtcagatattagcagtccagatattcgctctagcttgtaaacttccctgtggtcagcctaagctcttaaccccctattctacagctttagactgaaggcaaaagctcaaagcatttaaggcctcctcaatttcggcccctgctgctctgtgctctgttccttggtgtagctttgttccagctcctgcagcattgcaccattcctaaccacaaccttaacagcatgtagggccccatactctaggccccatcttgctgtcttcctgtgttggaatcttgcctaccaaggcctgtcaagagggtcctcccccatactgtttgcccacaaggttcaagagtgattggctcccagtcttcctggactgaactacttggatctaggggttgcctgttatttagaagagatcccttaactggtagggccctttcagtaggacagtatttgggtaaggggagggtataagatgagaacctttgctaagttaggttcctttgggagcctccagtttgtttctccctctccccagccatcttgttggatctgccaagggattggactccttcattgtcctaggtttttaaggttt

SEQ ID NO: 13703 - DNA, 1520 bp, Homo sapiens
  misc_feature (1)...(1520): n = a,t,c or g
ccagtgtaagaaaacttgtttttatttttaaatactttggaaagctctttcagagcaatataaatgagtgcctgggaggaggaggttttgtgccagagccttgccccctcactcactcttgggggtcctgatgaactcttggaccctgtggaagataagagttagagacctcggcctcctggtcagtggagccttggcctcatgcctggtgggctaagcgggcccagctggggtttgaggtaggggaggcccttggcttggccccagcagctccagggccctgagttcctccagaggctggagagcaggcagctgctgcttttcctggtccttggtaggggagggtcctcaggcttgcgtgccaaagcctgaaggattctgcttctgccagcgccagagatcctcacacatcctgtccagccctaaggctgctgttccaccccagctcctcttggggccaggctggggttggcgtaacaggctgccacatcaccttcccgccgtggccancaaccttgtacgggatcttcttcccagaggccttctccatagcctggaccatctgcagcactgaatagcctgtgcccgtgcccaggttgtagatccggcagccacactgttctttcagcttccttaaggctgcaatgtggcccttggccagatccacgacatggatgtaatcccggacacctgtgccatcctctgtgtcatagtcattgccaaagacattcagggcctcccgtcgcccgatcgccacctgggagacataaggcatgaggttgttgggtatgccctggggatcctcaccaatgcagccagaggcatgggcacctgtggggttgaaatagcgcagcagcactacgttccaagtcttgtctgccctggcacaggtcccggatcatttcctcgatgaagaacttggacttgccgtaagggttggtacaaccacccgtggggtgggcctcatcaaggggcaggtactgggggttcccgtacacagtggctgagctgctgaacaccaggttcttcaccccgtgggccttcatgatctccagaagctggatggtcccggtcaggttaactctgtaataatccagaggcttctgcaaccgaactcgcccacggccttgaaccccgcaaagtggatgaccgccataaagctgtactttttgaagagacgctgtagggctccctggtccaaaatgtccatctcctcaaactccacagagcggcctgtcagctcctggacccgccgcaggctctcaggcagggagccccctccacggaaggcattatggaagttatcgatgaccacaggcaagtagccagcctccagcagctccagcaccgtgtggctgccaatgtagccagccccacctgttaccagcaccttctctgccatggcaccttggagttggaaaagatggaatctgaggatccacacttctttgtccaaggtgactgaggactggagagtcctgctcgggttcccgcgccccacgcttgctgcagaggcaccg

SEQ ID NO: 13704 - DNA, 2098 bp, Homo sapiens
cgactttttttttttttggtagtgtagcttggttttatttatgtccacaaatatttcaaaaaaattacaaaatactcaaatggagagaacacagaagtcacgatttctgggtgtctactgtttacactgtgttatctcatggcaaactactcatatatacatttagcttcaagatatatagaaacgtagcaaatccgagtgtgcacgctgcctctgccgcagtggagtgaagctcaacctcgaggacaccgaacaagatacggacacacacagaggagccaaaccaaaccccgaacaaagggaggaaaatccgaaggaaaccgagtggttgggcttcaaagacaccatgaaggtcagggcctcctaaacaaactgtagtttatctggtgagggtttcgggtcgagggttttttagatggaagaatctcagcgcttcgccttgggatatggggagaaaagcaaagctaacaagaatgccttcggacggttttcaagcacagacctcagaggactcgactcttctttggaaaaatggatgccagaggaggagataaagaaggtttaactgaatggtagatgttgtgttctaccaaaaagaaagaaaaaccagaagccgagaaggtgggggcctggatgcaggagtctgggagcccagcaggaagaggcctcgctcagagccacgggaacaagcctgccatgagggcctgtccccaccccagaaggaaacgaatgccttcaagccaatgtggcctgaagtcccacgacaaaaggttcatgtcagctttgcctccctgtgaacaaactaaagttaaggcagaaatggaatgagagaaaaatgaaagaaaaaaaactagaaacattttcaacagacaaaacaagcctatcccaactgaaaccaaacacggtttttaagagaaactggaaatgtcgctatttgacgccagaacctgaatttgagccagtagctgctggtttctagatcaaactatcagcatctcttcctgctccctctgcggcctgggtcctggatggactttgtgtccgccgacccagtgtggtctctgtcctacaattcttgggatgggaccagcacaatggcagaagagacctccagtgtctgagagaaaaggatcggaagaggccacgtcctggcaggaagcagggccgacagagggcagacaccccagaacacccgccctcagcctgggagaaagtgcgttacggctgcagcctggaaacgagggcaggctctctccaggacggttccgctcagaagggcctggcctcctgagaagcagcccccacacagcatgctttctgaatgcactgtgggtgggactccaggttcccacttccaggatgaagagtgggactcaaatggtttaccagtgcgatgtggggtcaccatgcagacctgcccctagggtaaaatacaggctgcccccaacacctgtcttaactccaggatctcccttgctcaaaagtggcctcaatctgtggcaagaaagatggggccgtcctcaccacaagaaccaagtgacaatgcgcatgagaaggcagccttctaacacatccctttggcaggcatatgtcctgggtcacttgtgtgctgagttatttgtatggaatcattttcttagatgatgaaattttcggagtattaaaaaaaacattcatccagaacaatcaagtgtgtgtacacagaaatctagaaggaaatctacaatggacacaggcccatgcgctttccatcccgtggaaacagaaacagtgaacactggagaacagaaagtgaacattcacctccctgcactccctgtgcaaaatggaagaggtctgatggagcagatgtctgtgctgctggcagagcacaggctaggagcagacacaagtgaaacgccaggcagaaaacagagtctgtaacatcgtccctgcaaaccctggatgctcgctgctgtgaccaggcctcggtccaagcctctgtccatgtggaacgcccctttgctccctttaattaaagggataattatatataactttttattaaaaaatcaactctgtattctgtcaatagttggtaggaattcacaattagtga

SEQ ID NO: 13705 - DNA, 897 bp, Homo sapiens
gtgacaagtggaaaagagggagcgaaccagttccagaaaaaaaattggaacctgttgtttttgagaaggtgaaaatgccacagaaaaaagaagacccacagctacctcggaaaagctccccgaaatccacagcgcctgtcatggatttgttgggccttgatgctcctgtggcctgctccattgcaaatagtaagaccagcaataccctagagaaggatttagatctgttggcctctgttccatccccttcttcttccggttccagaaaggttgtaggttccatgccaactgcagggagtgccggctctgttcctgaaaatctgaacctgtttccggagccagggagcaaatcagaagaaataggcaagaaacagctctctaaagactccattctttcactgtatggatcccagacgcctcaaatgcctactcaagcaatgttcatggctcccgctcagatggcatatcccacagcctaccccagcttccccggggttacacctcctaacagcataatggggagcatgatgcctccaccagtaggcatggttgctcagccaggagcttctgggatggttgcccccatggccatgcctgcaggctatatgggtggcatgcaggcatcaatgatgggtgtgccgaatggaatgatgaccacccagcaggctggctacatggcaggcatggcagctatgccccagactgtgtatggggtccagccagctcagcagctgcaatggaaccttactcagatgacccagcagatggctgggatgaacttctatggagccaatggcatgatgaactatggacagtcaatgagtggcggaaatggacaggcagcaaatcagactctcagtcctcagatgtggaaataaaaacaaaacacctgtaaaa

SEQ ID NO: 13706 - DNA, 1185 bp, Homo sapiens
ctatgaggcccgccagaggaagtgccccaagtgcaagcggcctttggtgcccacgacttccatcgtatctacatcagctgaacctgaaacttaggggactctggaacaccatggaccctgggggctgtgcccccatctcctccccaccccaggtctagtggccccaccctccattccggaccccatgggcccagcccctgcccatctagttggtttggggaccctggtgcatgctagtgggcatgggatcagccaagcttcgttccatcttttcctaaaggtcagagctgcagcctagggggcactgccctacagaaaaggtctgcctgagaggcctgagggagcccagagcacttgactgagcttcccggaaactggccctaacctgtctgtctccgtggatgcatcctaaccctaaggaaaattccccaggctgtgatctaccctagagaaggctcgctccctgcctactggctcacaaatgaggaccagtgagccatgtccttgttccttgtttgagactgggctgcaggccccaggaagactttccttcacccaccatccccctaacctcggcagggcttctgtcctgtggagttcctggacaccttggtctggctcttgtgccaagggctgaaaggaggtaccctcttggcagatgggggcatcacttgcttcctttgggaagctctaaggttgctgcagtcaccttcctcatcttgcaggtgctgaaccaacatcatcagtttctattctaatcaggccccttcccaatctccatttctctgccaagcccatttacccccacctcatgcatcccaaggctctactgggtccctggacctaaccctgctttcatcctggtggccttaactacagtggaggtggaacttcccaggaggggaagggacagaccagccccagccgctgggccaacttccaatcattccagctagaagagcttccccctgacaccctgtgactgagcctgtgtcctgtctgcctgcccagccatgctccatcggctgtgcagggcagtgcccggagaggccagagggttggagctgcagggacccgtttggacccacagcctctgttctagagatgcttgtataggctgttaattgtgatgaataaacgttcaaccctcggcctgcagccagagtagccaggccgcgcacccca

SEQ ID NO: 13707 - DNA, 605 bp, Homo sapiens
gtgtgatacaaatgtaaatgacagcagtgatctcggggtggcccccggcattgctgccctcccccacgcccatgcctgtggaggcaaaccttgttcatcagtatagctttctttcctgtaacccaggatctaccttggggggcttctcaatactgcattctatgtagccagcctctttaacttggtaagtgagccaccccattctagaacctggaaattggagcccctcaaaaacagttcctgttcaaggaggactgacctgctggggcaatgttgggtgcagtgcagtccctgcttggggtggtcatgtctaggctgttgctctgggcaaagataagttgcaagattcacagaaatggggaaaatgtgaccaagtgtgatcttaacaacttgacaaagttttgtaaccaacccaagttagaatgtgttgttcaaacagggaggtagtttagatatgcttccaagaacatgtctgtgttataaccatagtgcctaagcagtgagctctggtttttgaagggcttttaagaaatatatacatgtctgtgtcagtctataacttgcctcctctgggcctgttaaagcatgaagactgcatgacacaa

SEQ ID NO: 13708 - DNA, 576 bp, Homo sapiens
ttttttttttttggggttgaggaggatgtatttattatttaggtgcaccagcccagtcagattaacatccaaaggactgagccctgaacaaagagtcaggttaccttttaagcatttcatggggtgagaggggagatctgtgcagggggaagcttactacagaagtgagaaacaaagacagttattcagttgagacatgtattacatcatttcttacttttcaaggaaaaacatgttttacaacttgagtttatctgtctagtgaccatgcagctgcacagctagggaaacagggtcttcacaatgtctgggaaaggaggagagataaggctcactagccacagaaaaacaggcagttaatttttaaaggactccagctctttctctttctcagggggaattgggttttcttacatacaactgagtttctccttacacattctttaatttcttttaattcctgttccatttcccccctttgttgctttttataacaaaggtgttaatagaaagcaccactatttgccacctcttcacagagctgagcttcttctactggcagtggctgatatttgg

SEQ ID NO: 13709 - DNA, 576 bp, Homo sapiens
tgtggtgcttggaaaatgtttttaaccttgaccatgtattatgtttataattaaaaacccaaagaaccagctcatgtttggaaaaggaatcttccactgaaacatttggatacccgacgttctccctggacacttggcccggcaatagttggggtctcctgggaagctgagtgctggcttctagcctctccagttccctcagactctgtcttcagctcgggcccctccgttctgtctccctcgactccaagtcaggaataccgtgggcttcctgccctcaccccacacctcaagaccatcccactgcctgcctgcttgccccctgccatctcgcactcagccctgggtgcctgtgaagcctggccccactgcctgccgggggttcctgcagcacccccctactccaggctccccatctccctgaagcttccagggtagcagctggtgggacactgatctgtgagctctggaatgtctgcttagaattctgagaggcaggaactgctctgtctttgtaactactcaaggccaactgtcacatgaaggaatgaataaagagtttttactgacttgtgc

SEQ ID NO: 13710 - DNA, 3263 bp, Homo sapiens
  misc_feature (1)...(3263): n = a,t,c or g
ccccccccccccccgaactcggctgcggctccatggtctgagttgtcagccgttgttttttcgtgctcgctagtcgccgccgccgctccgccatggggaagcgacagcaccaaaaggacaaaatgtacattacctgtgctgaatacactcacttttatggtggcaagaagccagatctcccacaaacaaattttcgtcgtttaccttttgaccactgcagtctctctctgcagccctttgtctacccagtctgcactcccgatggcatcgtctttgacttactgaacattgttccatggcttaagaagtacgggaccaaccccagcaatggagagaagctggacgggaggtccctgatcaagctgaacttttccaagaacagtgaggggaagtaccactgcccagtgctgtttaccgtgttcaccaacaacacccacatcgtggctgtgaggacgaccggcaacgtctacgcctatgaggcagtggaacagctaaatatcaaggccaagaacttccgggacctgctgaccgacgagcccttctcccggcaggacatcatcaccctccaggaccccaccaatttggacaagttcaatgtctctaacttctatcatgtgaagaataacatgaaaataatagacccagatgaagagaaggccaaacaggacccgtcttattatctgaaaaatacaaatgccgagacccgagagaccctgcaggagctctacaaggagttcaaaggggacgagattctggcagccaccatgaaggccccggagaagaagaaagtggacaagctgaatgctgcccactattccacagggaaggtcagcgcttccttcacctccaccgcgatggtcccggagaccacacatgaagcagctgccatcgacgaggatgtgctgcgctaccagtttgtgaagaagaagggctacgtgcggctgcacaccaacaagggcgacctcaacctggagctgcactgcgacctgacaccaaaaacctgcgaaaacttcatcaggctttgcaagaagcattattacgatggcaccatcttccacagatccatccggaactttgtgatccaagggggcgaccccacaggcacaggcacgggtggggagtcatactgggggaagcccttcaaagacgagttccggcccaacctctcgcacacgggccgcggcatcctcagcatggccaactccgggcccaacagcaacaggtctcaattcttcatcacgtttcgctcctgtgcctacctggacaagaagcataccatctttggacgggttgttgggggctttgacgtactgacagccatggagaatgtggagagtgaccccaaaactgaccgccctaaggaggagatccgcattgatgccactacagtgttcgtggacccctatgaggaggccgatgcccagattgcgcaggagcggaagacacagctcaaggtagccccggagaccaaagtgaagagcagccagccccaggcagggagccagggcccccagaccttccgccagggcgtgggcaagtacatcaacccagcagccacgaagcgagcagcagaggaagagccctcaaccagtgccactgtccccatgtccaagaagaagcccagtcggggttttggggacttcagctcctggtagcagcagcaacttgcaggctgtacctctgcccttccttttctcatcaatcactgatgctgaagctgcaggcctgagccctttgtctccctggatgctgggtggcgcctcatctggcatctctgcctcaccccatccactgccacaggctgcctgatgaccactagaggtatgtctgcccctcgtcaccctgctgcacaccaatctggtggcccttcatcatgctaagaacaagaactgcggccatggctggctccttctcttctccagcccatccctctgcagcctgtcatccctgtctgtgaccattggtcgggcccctgggttctgagagtgacttttgacgccctccatccctcccgccaggcactgttccttccggaaggcctggtgcagccctggcagtaactggcttgtaagaggctcagacaccaagctgggcctgcagaggaggggcacagtaggacacagtgactgcccaggtgtccacacacctgtaggcctctgagccagcgtccaggggtacagatgcgggtggtggggatgaaggcctgaccagggagggagaagcaggtttggagaggaccctgtgcccaccctgacagacaccctggctggccctgactgactgtattctctggccacattcaagtcccccattggtgggggcagagaagtaggaccaggccatccttggctccagagctcgaagaccccaagacagccctctgctctcagcggcgccacagagagcctgggctcagccttctgcatcaggacatggcctcgtccactgagggcacgatttaaacatttgacatcagaagctttatttgtaaacctcacacagataaggaccaagggctggcggtgtggccagaggacaggggaagctgaaggccccgtgcttgagctcggcagtcctgctccttgcagtgaagccaccatgggtgaccgtccagcctcacccggtggcctgcacagtgagggaagggcttcagggccatctgctcccagggcaggggacaggccaccaaggacctttggcaaatgaaggtttacatttctgtagtttgtttgttttagagcttaatttgtagttttttagctattaaaaccatttgaatttttaacgacctgatgagggcatcaggtaaattaaaggattttgggaagattcttattttcaattctaatatctgacagatgccatcaagaataagcattaaggtataaaaaatactgtgtgtataaaacaatgccaaaccacattcctacagcaaatgcactgtgccatttataaccctgacatcacctcccaaggctctcaaggaagatttattttaaataacttaaatagaagtcctagatgatattgtttaggaatttaagagggtggtggatatggtcctgtgaatagcacttcccctgaagccagctcatggtctgttcatttggtttaaaaatgagcttgtattttgcagaagcccaacaaaaaaaaaagtgataaaagtgttgttggtataaattacnnnnnnnnnnnnnnnnnnnnnnnnnnngtcataagactactagtaaaaaatgttcaatcaatgccgtcacaaaagacag

SEQ ID NO: 13711 - DNA, 937 bp, Homo sapiens
attcggaacgcggggcggtgctgaggagctgaagccgtggccagctcgacgccggacagtccagcgagcagcacggcgggaaccggcagccggagcagtcccggagcagaagcagcagcagcagcagcagccctcgccgttcgcggagccagccgagccggccatggcgttgtcgatgccgctgaatgggctgaaggaggaggacaaagagcccctcatcgagctcttcgtcaaggctggcagtgatggtgaaagcataggaaactgccccttttcccagaggctcttcatgattctttggctcaaaggagttgtatttagtgtgacgactgttgacctgaaaaggaagccagcagacctgcagaacttggctcccgggacccacccaccatttataactttcaacagtgaagtcaaaacggatgtaaataagattgaggaatttcttgaagaagtcttatgccctcccaagtacttaaagctttcaccaaaacacccagaatcaaataccgctggaatggacatctttgccaaattctctgcatatatcaagaattcaaggccagaggctaatgaagcactggagaggggtctcctgaaaaccctgcagaaactggatgaatatctgaattctcctctccctgatgaaattgatgaaaatagtatggaggacataaagttttctacacgtaaatttctggatggcaatgaaatgacattagctgattgcaacctgctgcccaaactgcatattgtcaaggtggtggccaaaaaatatcgcaactttgatattccaaaagaaatgactggcatctggagatacctaactaatgcatacagtagggacgagttcaccaatacctgtcccagtgataaggaggttgaaatagcatatagtgatgtagccaaaagactcaccaagtaaaatcgcgtttgt

SEQ ID NO: 13712 - DNA, 995 bp, Homo sapiens
ttcatgaggcaaatgctgtaataccttcccctttgacaggtttggattcttaacattactagtggtatttcaggaagtgacgttacagttactttccttatagcggctaagtgtattaagttgaatgtaatgatggtaatattaatttgtttgaactgaggcccactactgattctttgacaaattgaattcttatatttaaataattttatgggaatggtccaacctaaattctaaatcatttatatatcaaggtagccttaatttgtatatgtttcagtacaatgagattttattgcctctgggatgctgtttagtttgtattttgttgaacgtttttatcctaggaagagaaacctatgacttgtgtacctagatcatctggttacattagaaagcgggtctttcagcagtagagcgataaatggaggttaccttgtcgggaaacaatctaggttgtaggtgtatgaggtaggttgattatggtgctgatgttgagtagccacatttgactgatgtctggattctctgtgatgctgtggctagccagcagagctcgccagttcatgcctggacatactgtccaggctgggccctccagctagctcctttggggttgagtccgtatctttttgatgtggaagtataaagcaagtatcttgatttctaaacccagcaattttagaattgacctttatgagtgaagacttttggagcttttaaagaccttggcagtcatgatctcaaaccaattaggagctccaagctcccttcccaggtaactgttgggagcaatggcatcactgtatgcccttgtaatggctggaagggacatgatcttgtaagtaggaaagctgtaactaaaaattgtattgtttgcttattagccatgtatctcttaaaattttgttatgtttacaacgatgtaccttattggcaacaagttattagtttgatgtttaacaatagtgcctttagtaaattattttacaact

SEQ ID NO: 13713 - DNA, 616 bp, Homo sapiens
atttttgaacttcgaggaatgtttaaatgggtgagaagaacattaattgccctcgttcaggtcacttttggaagaaccatcaacaaacaaatccgggacacagtcagctggattttcagtgagcaaatgttggtttactacatcaatattttccgggatgctttttggccaaatgggaagttggcaccaccgaccacaatcagaagcaaagagcaaagtcaggaaacaaaacagagagcacagcaaaagctgcttgaaaacattccagatatgcttcagagccttgttggacagcaaaatgcccgccacggtataataaaaatattcaatgcactgcaagaaacaagagccaacaagcatctgttatatgcgctgatggaactgctgctaattgaactgtgtcctgagctgagagttcatttagatcaacttaaagctgggccaagtttgagactacacaaataaaccaccagaaaaatgtctgtgtaataatagacatgaaacattttcctcttttccacagagggcttaactgagaaccgtattgatttttattttagttacctccctctagttttatgtgaaattagtagaatcagggaggacgggacttatg

SEQ ID NO: 13714 - DNA, 1590 bp, Homo sapiens
tttttttttttttgatttaaaaatattttattctttagaaaatacagcattcaaccatcccaaactgcagtgacccctgccccagccctgactgaccccacttcttgtggccaaaggtttctgggctgtgctgggaccctagtctcagctccccgggaggccaggttcatgccaggcccctgacccagcccccttaagccagccaggcagggtccccggacaccctgggcacacagacgagatgcagggacagcaacagggaagggtcacaaaatgccagcccggtggccctcggacgctgcaagtgcgttcagctgccagccctcctgacctcccagaaacactttcctggagcccaggaaggaggatggtggcagggagcggaaggtgggcagccccacagtccacacgtggccggccctgctccagcctcctagctgtcatccccattttcacccgggccgcggatgaggcgcttatggccccgcttgccccctgggcccttgggcttggcgaaggcctgcttgaaggcgtgttgcttggggtgcacctcgtcgtagaggaactctgccgtcagctctgccccatcgccaatctcaattttcttggcgatctccagatggaagtcctgctccacggagtcgaggaggcggctcttgcagctggagtagagcattcgctccttgatgctgcacttgtaccccggcatggagtagatgaacactacagactcaagggggtcgccctcatgggtgtgcttgtagaggaagaagtggtagcgggcagcatctcggggcacccgggagggcagctgggccacatccgtgggctctgtgtgcaccagctcaatggtttcccgctctaggtccagcttcatctggatgtagttgaccattttctgcttgagctgctggagctccgctgggcctcaggctgcagggggaaggcgaggccctgcagggtctggtgcttgctttccacactgatctctgtcttcacctcgttaatgcggatctgctggagctctctctcagccgaggtcagcggggcaggtgccgcacaggacgacaggtgtttctggtacccagcaaaagagaggtcatccttcacagtcccgaagagctcatccttgatgtggccacctccaaactcctttttcactgtggcccccgtggccgcgtacagcatcttcagccgcacgggggagttatcaggcgaccaggcgaggaagagccattcgaagccctgagcattctgtgagtcgaggcggtagagcaggtagcagggctgctgggcgtccagcagtggcagcacggccctgtcatagtcctgatcccagcggcctactggctcctgcgaggcaccccagcacgagctgctcgtcctcaatcacaaccttgatgagccgcacagagccagcccgtgccttggcaaagaattccttcagctcttccgtggcgtggatgcccgtttggtgcgccatggctcggcgcttcgctccgtccgcgccgtcggagccctccgcttgaccctggcccggcaacgctcgctggaccaagagaggtggaggatgtggcggaggctgtcgac

SEQ ID NO: 13715 - DNA, 451 bp, Homo sapiens
tgaatttgtagctgatagtaggttttacttgtgtaccccatctgcactttgatgttgtgtagatcgttttgtgagttatttgaaccgtgtaactcagagaatagtatttcctcatacataaagtgacctcacttttaatcagctcctttatagtatgttgaaaatcactgcgtgtaatgagaggtattgagagtttcttgcacacatgagtgtaaaaggttgagaactagattatacaaagtagtaagtcacagtgcatggcaactttctacaggttggattataagacttatgtggaataggagaattatattgggaaaaaattattttctctaacttgaagactccagagacacttttcttagtcatgaccagtaatatttttcatatattttgggaaggaaataagctcctcactataccaccagttagtgatttatttatttatgta

SEQ ID NO: 13716 - DNA, 447 bp, Homo sapiens
gagccaggaccctgtggacataaagaagttggatgcctggtcccaagcctcttttgccatggtcagtgttcagattgccattagaatgccttagggttttctaattccccttatggatccaatccatctcctggccctgccccttgttggggaagttgcaggaggagaggtggatggcaatgtgattggtgctataactcaggcagcctgggagtcaggaacccagacaaggaatcccattccagcctcaccccaaccatgaccttggcaagtcagggggccactctgcctcatttatggcaaatggagaaaggcgccctccctggggtcccttgagctgctgtaaggctgggctgctgcgacacaggcagcgttttgtaaaactgtgaagccatattacgttgaaactggaagagtgcattggggcagtggaagttattttttttg

SEQ ID NO: 13717 - DNA, 650 bp, Homo sapiens
gccccagccagggctgtggctgaagaggctctgggtgctcttggaggtggctgtgcatgtggtcgtgggtaaagtgcttctgatattgtttccagacagagtcaagcggaacatcctggccatgggcgagaagacgggtatgaccaggaacccccatttcagccacgacaactggataccaacctttttcagcacccagtatttctggttcgtcttgaaggtccgttggcagcgactagaggacacgactgagctagggggtctggccccaaactgcccggtggtccgcctctcaggacagaggtgcaacatttgggagtttatgcaaggtaataggccactggtgctgaattttggaagttgtacctggaccttcatttatgttcaaatttgaccagttcaagaggcttattgaagactttagttccatagcagattttcttgtcatttacattgaagaagcacatgcatcagatggctggacttttaagaacaacatggacatcagaaatcaccagaaccttcaggatcgcctgcaggcagcccatctactgctggccaggagcccccagtgccctgtggtggtggacaccatgcagaaccagagcagccagctctacgcatcactgcctgagaggctctacataatc

SEQ ID NO: 13718 - DNA, 459 bp, Homo sapiens
gctcagaacttgtggcaatgaagattctgggcccctgcacttgaacactgcatcaggaactgtgagagcaggctcagcaatctgtggtgtaactagcatgccaggtaattctgatgggctagtttgagaaccactgccttataggatctagtattggtttacctcacagcgaacgaaaactcagctcactgactatttaatttgtagactatactaatcactgctgatttgtttctatctcatcacagctcccatttactgaatagctacactgggctaggcactgaactagggtgctgtcacatgcatttgtcccttatggatctcacagatactttgcagaagagggagtggcgcgttcccactttatattatatagagatgagagaggggaatctctgagggatgtagtaacttgccaaggctacacagcttggtaagtggcagccggagatttct

SEQ ID NO: 13719 - DNA, 1623 bp, Homo sapiens
cccaggcgcagccaatgggaagggtcggaggcatggcacagccaatgggaagggccggggcaccaaagccaatgggaagggccgggagcgcgcggcgcgggagatttaaaggctgctggagtgaggggtcgcccgtgcaccctgtcccagccgtcctgtcctggctgctcgctctgcttcgctgcgcctccactatgctctccctccgtgtcccgctcgcgcccatcacggacccgcagcagctgcagctctcgccgctgaaggggctcagcttggtcgacaaggagaacacgccgccggccctgagcgggacccgcgtcctggccagcaagaccgcgaggaggatcttccaggagcccacggagccgaaaactaaagcagctgcccccggcgtggaggatgagccgctgctgagagaaaacccccgccgctttgtcatcttccccatcgagtaccatgatatctggcagatgtataagaaggcagaggcttccttttggaccgccgaggaggtggacctctccaaggacattcagcactgggaatccctgaaacccgaggagagatattttatatcccatgttctggctttctttgcagcaagcgatggcatagtaaatgaaaacttggtggagcgatttagccaagaagttcagattacagaagcccgctgtttctatggcttccaaattgccatggaaaacatacattctgaaatgtatagtcttcttattgacacttacataaaagatcccaaagaaagggaatttctcttcaatgccattgaaacgatgccttgtgtcaagaagaaggcagactgggccttgcgctggattggggacaaagaggctacctatggtgaacgtgttgtagcctttgctgcagtggaaggcattttcttttccggttcttttgcgtcgatattctggctcaagaaacgaggactgatgcctggcctcacattttctaatgaacttattagcagagatgaggggtttacactgtgattttgcttgcctgatgttcaaacacctggtacacaaaccatcggaggagagagtaagagaaataattatcaatgctgttcggatagaacaggagttcctcactgaggccttgcctgtgaagctcattgggatgaattgcactctaatgaagcaatacattgagtttgtggcagacagacttatgctggaactgggttttagcaaggttttcagagtagagaacccatttgactttatggagaatatttcactggaaggaaagactaacttctttgagaagagagtaggcgagtatcagaggatgggagtgatgtcaagtccaacagagaattcttttaccttggatgctgacttctaaatgaactgaagatgtgcccttacttggctgattttttttttccatctcataagaaaaatcagctgaagtgttaccaactagccacaccatgaattgtccgtaatgttcattaacagcatctttaaaactgtgtagctacctcacaaccagtcctgtctgtttatagtgctggtagtatcaccttttgccagaaggcctggctggctgtgacttaccatagcagtgacaatggcagtcttggctttaaagtgaggggtg

SEQ ID NO: 13720 - DNA, 990 bp, Homo sapiens
ggccccgctgaaagatacagccacaggacgaaatcaacacggtaaatcctctgggggtctatgaagaaagaggaccagagaaagccagtctatgtttatttcaggtcctgctggtcaatctttgtgaaggaaccttcttaatgtcggttggtgatgaaaaagacatcctgccaccgaagcttcaggatgacatcttagactctcttggtcaggggctcaatgagttaaagactgcagaacaaatcaacgagcatgtttcaggcccctttgtgcagttctttgtcaagattgtgggccattatgcttcctatatcaagcgggaggcaaatgggcaaggccacttccaagaaagatccttctgtaaggctctgacctccaagaccaaccgccgatttgtgaagaagtttgtgaagacacagctcttctcacttttcatccaggaagccgagaagagcaagaatcctcctgcaggctatttccaacagaaaatacttgaatatgaggaacagaagaaacagaagaaaccaagggaaaaaactgtgaaataagagctgtggtgaataagaatgactagagctacacaccatttctggacttcagcccctgccagtgtggcaggatcagcaaaactgtcagctcccaaaatccatatcctcactctgagtcttggtatccaggtattgcttcaaactggtgtctgagatttggatccctggtattgatttctcaggactttggagggctctgacaccatgctcacagaactgggctcagagctccattttttgcagaggtgacacaggtaggaaacagtagtacatgtgttgtagacacttggttagaagctgctgcaactgccctctcccatcattataacatcttcaacacagaacacactttgtggtcgaaaggctcagcctctctacatgaagtctgtggacatgtaaggacgagagtaaagaggaaaatcttattttaaaaaaaaaaaaa

SEQ ID NO: 13721 - DNA, 3799 bp, Homo sapiens
  misc_feature (1)...(3799): n = a,t,c or g
ggtcgtctcgggtgaggaggtcgcgccggaagtggctctagccgtggcgcttcggcgtagtaaggagcctgcaacagagttttgttgtttagggggcgcggcaccgcaccgctcccttcaccttgcagcagccatggcgaaaggcagagtcgccgaacgatcgcagttgggcgctcaccacacgacccccgtgggggacggggcagcggggacgcggggtctcgcggcgcctggcagcagagaccaccagaaggaaaaatcctgggtagaagctggatcagcaagaatgtcactccttatattggtgtccattttcttatctgcagcttttgttatgtttttggtatataaaaattttcctcagcttagtgaagaagaaagagtgaatatgaaggttcccagagatatggatgatgccaaggctctaggaaaagttttatccaaatacaaggacaccttttatgttcaagtacttgtagcttattttgctacatatattttcttgcaaacatttgctattccaggctctatatttctcagtatactctcagggtttctttatccctttccactagccttatttcttgtttgtttgtgttctggacttggtgcctctttctgttatatgctttcctatttagttgggagaccagttgtatacaaatacctaacagagaaagcagtaaaatggtcacagcaggttgaacgtcatagagaacatctcattaactacattatatttttgagaataacaccatttctgcctaattggtttattaatatcacatctcctgtgataaacgtgccattgaaagttttttttattggtacttttctaggtgtcgcacctccttcttttgtagccattaaggcaggaacaacactgtatcaacttacaacagcaggagaagctgtttcctggaactcaatatttattctgatgatcttggctgttctttctattctgccagccatcttccaaaaaaaactaaagcagaaatttgagtaaaaataatcatctgatttttagttttgctgtcatcaccatctcaggattaacaggtgcatccatttatgttttaaaatcacctcttcagtaattaaacaaggaatttgtaaaataaaatttcctatcagatagttaaagtaatacatttaagtgacaaggggagaagaaagtaaaaatggaaattggtatactgtgaaaagtgctatcaatagttaaggtagacatcttagacatcttataaattattataccaagggtagctgtagataatagtagtgtggtaggaaattgttgatccagctaattcattcaatttaattgaatattttttatctttaataactaaaatagatatttttaaattctagattttttaaagtagtgttgcaggttttgttaatgttaggcttttttcagagcataaactggaaaacttaaaaagagatttacattttcttccnnnnnnnnnnnnnnnnnnnnnnnnnnnnnnnnnnnnnnnnnnnnnnnnnnnnnnnnnnnnnnnnnnnnnnnnnnnnnnnnnnnnnnnnnnnnnnnnnnnnnnnnnnnnnnnnnnnnnnnnnnnnnnnnnnnnnnnnnnnnnnnnnnnnnnnnnnnnnnnnnnnnnnnnnnnnnnnnnnnnnnnnnnnnnnnnnnnnnnnnnnnnnnnnnnnnnnnnnnnnnnnnnnnnnnnnnnnnnnnnnnnnnnnnnnnnnnnnnnnnnnnnnnnnnnnnnnnnnnnnnnnnnnnnnnnnnnnnnnnnnnnnnnnnnnnattttcttcctcttttgaggtaatggatttgtttggagatggcatgttagtagacgactgaatatggaaaggatatcgagttatctattttgttaattttatttttgttttttatcatctagatttttatcatggattagtctgaaatttaaagttctggccagtcggttttctttcatcttgtagtttttacagtatttccactgtgcatatgcaaaatgggtattacataactgtatcatatttggtattgataannnnnnnnnnnnnnnnnnnnnnnnnnnnnnnnnnnnnnnnnnnnnnnnnnnnncnnnnnnnnnnnnnnnnnnnnnnnnnnnnnnnnnnnnnnnnnnnnnnnnnnnnnnnnnnnnnnnnnnnnnnnnnnnnnnnnnnnnnnnnnnnnnnnnnnnnnnnnnnnnnnnnnnnnnnnnnnnnnnnnnnnnnnnnnnnnnnnnnnnnnnnnnnnnnnnnnnnnnnnnnnnnnnnnnnnnnnnnnnnnnnnnnnnnnnnnnnnnnnnnnnnnnnnnnnnnnnnnnnnnnnnnnnnnnnnnnnnnnnnnnnnnataatttatattcagataatttgttatggctctttaatatcccacaaggggctctaaaaagcaaacattcaagagtatgtagtttttagacattaagttaattattttaaacagtgacagcaaaacacaagtgattaaatatagtttatttgttccaatgactaaattttacctcatttattaatctggtcattaaggaatatatttaataatattatgtaattattctttttatgcatgatacacctaggaaaaatgccttttgtttctattgatggctttgttgtttggagctacttttgattacttattgcagtttcccaatttagtctttactttatctaactcacaaagtaaaattaactgatcacatggcaactactgtatttaaatagttctgggaaaaatgaaagtgctttttgctgcttgggtaaatggggtaatgcccttgattccttgactgtaggacatagctgatctaaagtactctgtcagttttaccttcacccatgactgtcattagttgtcaaagttgaaaagtactttagctgtgagaaatccttgtatgtttttattataagaggtataatcatcctcaaagcctgtttttattacatgatgtggactgattattttttctatcacagtgttaacagatggattttattgtaaatacaaagaaaacatattgattattgtagtattcttatgtcacctggccttttgcgtgagattatttattatttctagcaaggctttcttcctttcttattgcccagagactgactgatacatcttttgttatttttacacataaattaaacatagcctttttggacaaattcactaaatattaatgtataaaatgtaattgagtaaatttttatcagaattttaaaaataaaagagcttagactcagtagaactcagtagaagcttcactatttactccagcgtgtgtaaattgtacttactctattctcagagtatatttactgtccttaccattgattctttcccctttgctaatttttttttttgttaatggtagctgcgactttaggtggggtatattttcttctcctaagagaatagacagtttttccagattcatcatcattgactgtcaagaaaggacccttcagcaaggctgtaccctcaatgcagttgatggcctgtcttcacggatttacagacttggcctgatgcccatgtaaattcaagctttggcttgtggtaacaaccacaagaagacaagcatctgtggtgcggaggcaagcaggctaactaggagttgacaagctaagaaagtgaaactgttctttcttagttaactgtctttctctggagctctgttattttgagtataatatttccacgacacttagtaaatgcaagctaaaatgtaataataataaattgtattggagaaacctaaaaaaaaatttttttaaaa

SEQ ID NO: 13722 - DNA, 739 bp, Homo sapiens
ttttttttttctaatcttacatgtttaataccaaacacaaagcaaacacattcatcatctagagtactatattccaaccctatctcaaatgcaggaatgggcctctatctggtatctagaggatgatcataggaaacaaaatgaggacagaggcatctggtatcttctaaaagtggtacaaaactcccgcctgtcatgtcataaagctccccatctggtgctgcgacccacctccaagagaaagccaaaggaacagaccaataaaaggggtccggggtgctttctctatttcactcactcctcttatttgctaaggagctccaataaccaaaagaaatggttcctagaagaagagaactaaatctccagagagctgctggggcataccgataaaaactgggagaaacaaagactgacagcagagaagtccaatactgctgctgaagtttctcagcctaaatccggtgaaagagcctgggattctactgctctgtccagtaagaggagcttctgggtcctgtatgacccttccaactctgacttgaatgcaccatctaaaaacgtgtctatctctacccctaggcttcttagctcttcagtcatcctcatcatcctcaatctggtatcgtttcttcttttggattcctggagctcccaactctggtgctctgttcctgccctcatcttcttcctgttcctcgtcgctgtccagcaattgtcgtttcttgggtgctgcctt

SEQ ID NO: 13723 - DNA, 1930 bp, Homo sapiens
attacctttcacttgatttgccatgatgtttcttcctcattattgatctagaagtttgcctcttggatagtaactagcaacttagtatctactttaaaatttgtggcttttctcttcagggtcccaggccataaaacaacggagagctgtacttgcttgtcacttggaggaaccacatccttgagacagcctgctgtcttgtatgtcttcagtaggaaacttctgacacacacattcaagggagttcctgcccctgagaagtgttcccatagctttccagtcgcaggttactttcacactacgtcagcttctctggtgagatcagggatgttacatattacttgaaaatgatttcataggaagtgaggatggggcaagaaaggaggtagaagctgaattttgcttaacttcagaaggaaatctgatacttgccttggctagttctgatcaactaaagagcctgtgtctgtactggatgtgccaaagagtcaagttgtttctggaatatccagctcctctgaatgaacacagcttcctccctacctgtcttttatgggtgaaaagggaccgtctgatgagcatgatagacatccctgtacaggactcaagactgtttcattgcatttgaaagttggtgggaagtattttattctgctagagctcctaaccctcctagaaatatcttttcatgctctattaattcaattcattagtttaaaaagaaacagtgtgacataattttggtgtttacttcttaagttgtctccccaagggcatatatgtagcctctgaaaatgggatgatttcttctcaatcttccataaatttgaatatgcattttattcatttcttgacatgggctgtgtgactgttttccatcagcagttctggctttgtccacaagggagcaataaagtacgttagctttattctcaaccttctaaagaaagatcccacttttaaatctcttctggaatagcctcttagctcaaagcttattcatgtattttgattatttaagaaattttcccttattacaaagtccagtcgtcgttcatccctcatgatgccaagcaatgattgatgtgtgggtgtggagtccttgtgggtcaggcatcttaattaattagactttttacatattgatgatccccagattgaaagccaggaccttcccataggggcgcctttgtgtgctaaaggcagagcaggcaggcttctccactcctatctcctccgcaggccaccaccatcacatctataggaggaacaagagcactgggggaactctggagtatgagtaaggaaatgcttctcaccttctctgctccaaagagatatctgttacatcagggaacaagtcctctaggtcaggcacttcctcctgaccagtgcaacgggcactccaggttagaaactgtgtgctccctctctgtcagttacttgtctaagggctcctatccgtggtcatcagctctctggccatgagttctgtttgtgcttattgcagcagcatcttcacaacaaacaggtcagtaatcaacctgggaagggaaaagacgacagtaaatattaccccctgtagagccgggaggcatttacacctggaatggccttcttaactgatttctgcctggccacctcacccccagccaagtctgaacctgagcaataccaggcacagagaggtgtctacttgtaactccaacacttgacaaaaaacaaaactgaagctgtgattggtttaggcagcaagtggccaggtgcaacttgtttgtttttatttttgttttccccaacagtactgagatcacttgcacttttcctcatttcttaagaaaatccagtttgcttgccatgacttgtttagcgttaggtttacaaagcttgttgttgaatgttgaatatttgtccaaaggagtttgacaaa

SEQ ID NO: 13724 - DNA, 5819 bp, Homo sapiens
  misc_feature (1)...(5819): n = a,t,c or g
ttttttttttttttttttctcaaggtatttcttttgtaaaggagccagatttggcaactagactgaaaatcttccaaaattctgtacaaatgtgtaatatacaaatatacacaaggcttttgccaagaaaagacatcacaacaaatgacagaggtggctttggtgtcacataccacctacagcatctcaaacccctaggaatgtgaggggctgatggaccacaacataggctacacatgtaaacacgctacattacactatgtacactggagtataaacaatccactgtcctctccggtctgttcacaagccctctggcgggaaggaaggccattcaccaggcaacccacataaggggaacttctttaaggtgggagggagaaccctgcagaatgaagtggttcaccctaagatctattaacagcacaaggcatgcccttaaagagacaggcggtaacagcgaattcgggagatggaccacttcttgtgctccttgtcatctctctctctctctctctctcactccatctcagtgaaccgggcaaacatggctttccggacagcatctttgtaggaatcggcgcccgacaaaccatatgcgctcgctttggctcctaggccagctccctttagccgaacttgagcctgggaaagcacagagactgtcagctgggaggtagggtatgggctgctccacctctcaccatgcccactccttacccagcaggaccacccaccaggagacagaagagagaaaactgtatatgaagacaaggatttctccagaagagaccaggagcaagtataaggactggaggaataaaatgggctacggaacacaggcagatgaagcaaatcacccacccctcaatgcctgctcagcaagcatccacgcctaggaaagggccccaaagtattcctctgaaggtctgggaaaggtctggtaattacaggcacacattatacaggatagctcaatgtcagcagaactcacataaacaggatgaacatggtctacaagagtctgacctaagctgtgctcccaggacagagcaggggcaattacgggtggagctcctgcctagaaggccagtgggtaggggcctccgatcctgggatatgatgcctcaatgtgggctctgatcaatttaaagatttcttatcatgggtgaaaaccctactaaannnnnnnnnnnnnnnnnnnnnnnnnnnnnnnnnnnnnnnnnnnnnnnnnnnnnnnnnnnnnnnnnnnnnnnnnnnnnnnnnnnnnnnnnnnnnnnnnnnnnnnnnnnnnnnnnnnnnnnnnnnnnnnnnnnnnnnnnnnnnnnnnnnnnnnnnnnnnnnnnnnnnnnnnnnnnnnnnnnnnnnnnnnnnnnnnnnnnnnnnnnnnnnnnnnnnnnnnnnnnnnnnnnnnnnnnnnnnnnnnnnnnnnnnnnnnnnnnnnnnnnnnnnnnnnnnnnnnnnncatgcctgtaatctgccccttcatgctaaggtaaagctgctcctggctcccaggctctatgagtgctctgatctcatctctggaaccggcctgtaagcctggcaaacatcaagacctgaccccactgcttacctcaatgggagccgtaatgccttgacactttcgtcccaagccagagccttcccgccagcccatggcctgcagcatcttgttgccaatgttactgtggtcaatgccatctttggtgggttgctcgtaattcctgccagtggcaaacacacagttacttaaaacagccagggccccagcttacgaactggaaaatgtgcacatcacatacacagtgccggcatcaaactgcttcttgcgcttgggctctggaggttctggaatgccgtacttctcccgtctttctgcagctcggtctcggtatttcatctacatgggagaaaaaacactgctggaaatgttcacagacttcaacctgtaaccgtctaatgcacctattcaaaactatcccctcaagtatttttaaatctgaagaatgctttttttagactgctctgaaataccaaattcccttgttcccatcatcatacctagtcatatctgaaatgttaaatttgtaaatatgaattgtgtggaaccaggggcagaactatgtctccaacaagcagttttatttaattagccaccctctgtcaagctactcaaccagcccactgggcagtgggtacagcttgcgaagaggaaggcagagttgcccgttctcctcagcatttggacaggcatacctccaacatttggaaaggcatacctccaacatcaaggaggcttccagagacctgttcagcagtcgctggggaggtggaaccatagatagtagggcaggaagggtgtggggagaagaaaagcaaaagccttaactacaaacacttcagaaatatctcaggtgggagatttcaaacccacttgctcatttctaaaccacaggcctctatttgcatttaaatccctgcccacctggccgccaacctgccccaaccaccagcactaactgcttgcccattattgtgtcacaggcttctctcttgcctttgttcccagatctgcttgccatgccctgcccacccttcctttcatatcacctgcaataacctcacgtcctgctgtcccttgggattaatttgaagcgcacttctttgcccatgaaggcttccctggccaggccaaactagaccactctctccataacaaaatccagcgtatttaagcagcaagctctggcattgctgtgagagagtctcggcagtgtgcttctgccttgtgcacccttatgatgaagggacaatgtgaggctcacaaggcacacagaggctgggtctaggctacatgaactacaatggtcagatgacaagggtatgacaaatcctcctaccctgcccctgggatctggaactaaatgctacaaataaaagctaaaggcaattatcccaatatcctcttccttgtggcacagtttcccattcacctctctctcccttagctccaaggcttccagctcctgctcgctcagcctggatcgtcggtagatgtccatgttttgctacacaaaagatttgaaagacacagtaaggactcagaccatcttaatttgaaatgtcctaacattagtaacatctactgtactttaagagccaaagcccaaacaatacacaatcacataaaaactatagtttgatgtgtgtggagctgccagactccgtccactgtcatcgggaacagctttctgtaaggccatcattagatggcaggtatttttggaaccgtcaggactgttagggcactcaaattgtctcactgcctcccctcgccccctcagatcagctcagaagcatggccaccttgtgaaggtctgagagttgctggtgcctgactagggcatctttgttcgggaactggcgccggcagagcagacaggccatcttcttccagtcagctagcttctcttcctcactctcaagtctctccaccagctcctcctcattgtcactgtcaccactgtaagcagcaaccagacccctctggagacaaaaggaggacaggtcactggaaatgtacaataggaagatggcggtggctatgtacctggataaagtaatgcctcatccgaaatgttaacaaatccccattactgcatgtcacactttagtaatgaatcacattttgtcaactgcgtggagcagtcaggtccttgagtgctaggcctgacagcctcctggtaccaaccttcttggagcctaagaaatggattcctgggtgactacnnnnnnnnnnnnnnnnnnnnnnnnnnnnnnnnnnnnnnnnnnnnnnnnnnnnnnnnnnnnnnnnnnnnnnnnnnnnnnnnnnnnnnnnnnnnnnnnnnnnnnnnnnnnnnnnnnnnnnnnnnnnnnnnnnnnnnnnnnnnnnnnnnnnnnnnnnnnnnnnnnnnnnnnnnnnnnnnnnnnnnnnnnnnnnnnnnnnnnnnnnnnnnnnnnnnnnnnnnnnnnnnnnnnnnnnnnnnnnnnnnnnnnnnnnnnnnnnnnnnnnnnnnnnnnnnnnnnnnnnnnnnnnnnnnnnnnnaagactgnnnnnnnnnnnnnnnnnnnnnnnnnnnnnnnnnnnnnnnnnnnnnnnnnnnnnnnnnnnnnnnnnnnnnnnncccaaaaagtgcagnnnnnnnnnnnnnnnnnnnnnnnnnnnnnnnnnnnnnnnnnnnnnnnnnnnnnnnnnnnnnnnnnnnnnnnnnnnnnnnnnnnnnnnnnnnnnnnnnnnnnnnnnnnnnnnnnnnnnnnnnnnngaagtcttgcaatgttgcctagactgagtgactattttcaaaccactgaccacaaataaaaatcccaaatacaacatatcagaataatggcccacccagaccagtatctatctagtaaaacaagctttttcttgtcttaattttctctttccagaccattaaaactctccactcacagatgcaatgaaacttaattaactgagcttaggaattgaagcttctttcatcactccatctcatctgctctcacagaaaacaaagccccgacatggaatctatgtgcagaaactgctccaatacccatcaacagtgatcacattcagttttaagtaggaatcacattagccaagatgcagttgagccttaaagtgagacacaaaccacagatagggtctttaaaacactggtggtactcccttactttgaggggattctcctcatctccatttcgcaccaattctgggatgagctgctgcctttcagctaaggctccctgggaaacagaggacaagccatgagactcaagttttaggtaagttcccatcatgacatactggccattcctgctattaccttcttctcaaagagagcaaagccagcgtctgctgcagcagattctctcctttcttcttccctcaaggaattgacaggctgaaagctatttttaaagttttctttctgcttattcaaactcttagcccagcgttccatgtctttggcaatctaatgtcaaacaacaaacaccaacaaaaaaatatttaatcccctgtgccatgagaatgagccattaaggatcttatctcaactatatgccctgtaacaaaccccttttactcttacttccacctacaaatatttccattagatgttatcacatataaccaaagtcattcataaatactgcttgaaaagctttgagatttccagggcttttttccctaagtacacaggctgacagtcaagatatggtaacaataacaaattgcaaaatgctctaagaacttagtatgaataaaatgtgaagcccaatttttaagaatccaaataatactgacataaatgctacaaccccaaaactaagagttcagcccaatacctcaatgaaagaaatatgggtcatgttctaacctgctgggctgttttgctcttgggtttctccttcttctctttcccctcttttgcaggaggcaggcccgactgctggtgggagctagactctgcagctggcacgtaggtctctttttccccatcccagtaaaggtactgctgggtcaaggaattatagtagtactagaaaacaacaaacaaaaaacaattaatgcagactttctgctatgtcagtcgattacatattttgtcaaaaaaaagataaagtatgttgtggactagtgatatttcctgcccagaaaagaccctgggcacaccttggtataagtaaaggtgatgaaccacctagcaaagaggtgtgacactgctagagtaaaaatagaatatgatttctttaaaaagtttagt

SEQ ID NO: 13725 - DNA, 1001 bp, Homo sapiens
gaaagagacaggtggccctgggttttttttcctgccatccaaagggaaccagtcttacccaaaggcttaaggggtcaccttagcccagtctcaggacactcttctccaatcagatcgctgcttctagttgcactgctcctggattctgttcttggggaacagaaggtggcaggacaggccccacaatctgcaattccagctccctccagaggggacagtcccagcgtttgcaagagagcagcttgtggcctcccttaggcaagtttaaaagccagatgtcctttttcccagaatgcggagtggtgtgtactattcatcagcttgggctgccacagcaccatgccagactggatggcttaaacatcagggaatttattttcttgccagttctgggagggtgggaaagtccagattcaaggtgtttaagacttggtttctggtgaggcctctctccttgggttgcaggtggcaacttcttaatatgtcctcacatggccttttctctgtggagagggacagagagcatgagcaggctctggtgtctcctcctcttcttataaagacactaatatcaccatattagggcttaaacctatgacctcatttaaccttaaccccttaaaggtcccatctccaaaaacagtcacatagcaggctactgcttcaacatatgcatttgggggaggggacaccattcagttcttaacagggtggtcaccgcaaacatggaaagtcagagccttctcccttcagaattcccgcccccacccagggatggggaagaggagcagagaggtatgggaagcagacacggagagtggcaggtaccatgctggggtggctcaggagtgcttcggaggacatatggaactggcagggctcagtgcagggaggcggaggcactgggagagccgtgtcctgagaagggcctgggctacaaccctgggcaagttacttcacctctgagcctccgatgctctgtgaaatggaaggaatgtgct

SEQ ID NO: 13726 - DNA, 1729 bp, Homo sapiens
ctgcagggggacgagatttggaatgccctgacagataattatgggaatgtgatgcctgtagactggaagtcatcgcatactaggaccttgcacttgcttactctgaacctctcagaaaaaggggtaagtgacagtttgctctttgatacatcagatgatgaagagctgagagaacagctggatatgcactcaatcatcgtctcctgtgttaatgatgaacccctcttcacggcagaccaggttattgaagaaattgaagaaatgatgcaggaatcaccggacccagaagatgatgaaacccctacacagtcagatcggctttcaatgctttcccaggaaattcaaactctcaagaggtctagtaccggcagttatgaagagagagtgaaaaggctctcagtgtctgagttaaatgaaatcctggaagaaattgagactgccattaaggagtactctgaggagctggtgcagcagttggctttacgagatgaactggagtttgaaaaggaagtgaaaaacagctttatttctgttcttattgaagtgcaaaacaaacagaaagagcacaaagaaacagcaaaaaagaaaaagaaactaaaaaatggcagctctcagaatgggaagaatgagagaagtcatatgcccggcacatatttgactacagtcattccttatgagaaaaaaaacggaccaccgtctgttgaagatcttcaaatattaacaaaaattcttcgtgccatgaaggaggacagtgaaaaagttccgagcttgttaactgattatattctgaaagttctgtgtcctacatagagcagcaactttatctgcggtgggctccaagctagatttccgacagcattattctgagagctggctaccattacccttcttgctattggaaactcagcacatttgaacttgggtttgattcagtattaacagatcttgactacactaattctttatattatagaaccaacggaaatatgggcactattttgaattctagagatggtttttgttaaatctactaataaactgttctcttagtagattaagagagagtaatattaattgtgcatgtgcagttgtatttctcattaactgacagtatgcccatttgtttttatggctttcttatctaaactgcactgatgaactagattaaagccttgggagatttatactataaattcagtgatgggcaagaaccaacactgtttttttgtgagaattgtcagtgtaactattacctaccagtattgttcagagagattgaaacagaataaacgggctgttcttgaagaagcaaaaccagaatatgcattactttggtttaatacttagtgctaacattgaaactgttggtggtgatggattttgtagcttgctgcttgtttcaccactggtcaaattttaaccattaaattgccattcacttttagaatcttgtatttaagtaagttttgattttcaaatgttctgcttcatgtgtctgtgaagaattgtacttttttaaaagtgtgtgtcctctgaggtgcttgagaaagtgtacactgcagaactgcccattctcattactgtgtcctattttattcatgcctgtgtgtttttcttaagtatgaattctagatacagctacttatggattcatcaatatcatgagcacttttgctggttccagtcaaatcaatggcatttaataaattttttaagaagtaaaaataca

SEQ ID NO: 13727 - DNA, 802 bp, Homo sapiens
  misc_feature (1)...(802): n = a,t,c or g
tttttcaccgtgttcctggagctgcccgctgccctctgccctgtccgtccccggcagagctgggagccggccctcagcatgaccaccgaaactttatttacaacacgaggctggagtaagaggggtgggatggaggacagcagcagggccgacaggaccctacttctgctcccgcctccagacgatgaccatgccgctggcgtcactggaggccagtaggctctcgtcgcagttgaagctgacatcaagcacaggtgcactgtggccctgcagcttgttgacagcagccttggccgcccgctccacatcaaagaagtgcacgcacatgtcctcactgcccgtcaccacgcaggccccctggcggaaggacatgaggggacagaagatgctgcgcacaggatgtgagctctgctcgatggggaagcttctcttcagctgcagggtcccctcgttgtctaccaccctgtagagcagcaacttgttgaggcaagcattgatgagcagtgagggatcccgggcctcgcggctgacccaggaccgggctgagatgctggtcacagggctcccctcatgcaccaccaaacgcttggctttggtcagcttccctgtggccatatcaaagaggaaagagaagacactgccacggtcatcacccgcccagagcagccggccaggggcatcaaaggacagagcaaggacacggcctgtcagcttgctggagccccccttcactttcttgcctgtggagatgttcatnacantnacgttgtgcttggcgttccccaccacagtgaggttgttg

SEQ ID NO: 13728 - DNA, 1846 bp, Homo sapiens
cgcacggccgcgcagatctgtcttgctggaagctttttcctagaggttgagcggtttgcacaatgtcggaaatggctgagttgtccgagctgtatgaagagagcagtgacctgcagatggatgtgatgcctggcgagggtgaccttccgcagatggaggtaggcagcgggagccgggaggctatccctgcgtccctcccgcagcggggcccaacagctcgaggaggaaggcccaatggaggaggaggaggcccagccaatggcggcgccagaggggaaacggagccttgctaacgggcccaacgctggggagcagccaggccaggtggcgggcgcagacttcgagagcgaggacgagggcgaggaatttgatgactgggaggacgactacgactatcccgaagaggagcagctcagtggtgccggctacagagtatcagccgctcttgaagaagccgacaagatgtttctgagaacaagagaaccagccctggatggcgggtttcagatgcattatgagaagaccccgtttgatcagttagcttttatcgaagagctttttttcactgatggttgtcaatcgtctgaccgaagaactcggctgtgatgagattattgatagagagtagttagatgctgttaaaagaggaggaaactacttgaggagggacccaactttccgctatcttttgggttcattccaaatagttttgtgccattgaaaaacttgaccttcaaaaaaatttgtttttcagaatagaacacaataggacagtgactgcacagttgtgaaaaaggaagagaatcattaaagaaaaagaaaaaagattttaagaccgttgaaatcaattatcaaggaacgtccttaaaacacctatgggcttttgactttgttattgatccagattattttccttgcattggggaaaatatctttcatatttgtttgctgtaaagatggttttgcaagaataagtcatgaccaagacaaactgccaatacaaaagcccactgatactaattatataatgagaaaaaaatgtatccaactaggacacatatcttttgagttatttggactgaaagcttaagaaaacttggaaaattctattttgtgatctagtcaagccacagttatcaaaggctacattttcagtgtaagataaatggatgagtaaactcaaatatgtatcacgtgtgctttgtatcttaagatgtgtttccaagagcatctgaaattttgtttgtacatgtatcttgatcatttataaagccactgtgatctataaatcaagaaaatccattgtcataaccatttttaaaagtcaaaaattaagacatccttaattaaaaagtttcaaatctagacactaaatgtgtgtgaatgtacaaagaaaacaaaccattgcttatgctgttatatactagagaaattttgttttgcttgctgttttaacttgacagatgaaggactttagttgaacttcatattgtaagaactgttaataaaagttgtcaagtaaaaagcgctatatctaaaaagactttatgaacagttattctatcaacttttaaaggttttaaacctgcccagaaattaccttggtatctgaagtttccctctgtctcctcctctaattaagcttgttatttgtcatgcaccagcattggagataataaaatttcttgttctgtgtattttgtttggctaatagtattgcatacatactttctctgtatactactttctattgtatgtgttaaccagtattaagggaaaatgatccagcttcagctatctaattcacaaattaatttctggaaattaaactttgtaaattaagttt

SEQ ID NO: 13729 - DNA, 751 bp, Homo sapiens
ggaatcagggaccttgtctaagttttgtttgcccagagcccagcgaagtgtgtgatacaccttgggagtttaggagatcacaaaagggatgaaaacacctttagaaaacatttcattggtgaggcgtgagccactgcgcccggcatggagctgctattgatgggtgagctccacagcttttgcagaagcagaggatatgacttgagagcagtgctgtcacctctcagcatgtccccaagcccaactggggcctcctggagatgcctcagtcggcactggccccaagggaatcgtggggaacagttgcacaatttgcaagtttctgagtgcagcttttcccatccttgggatcagcagataagttgtaaacacagggaggtactgcttattggatatacttttcataagtaggacagaattcttttgggactctagagttgggaactaccacttactagcggcgtgggctgaggcagtcttcctcctctgtgggttcaggccccttccacctgtgaaatggggtccacagcatcctgcctctcagggtcactgtgaggtgtcgatgtgagcaaggcctgaggcttggcaagaagtcaatgtctgcaactcagcagggagcaatggcaggggcagtcaggggtcggctcggataggggtgggtgggctcctgaggttggaagggtaggaattacagagctcttgttactattgttgttactgtttttaaagatacgatatttcagataattca

SEQ ID NO: 13730 - DNA, 940 bp, Homo sapiens
ttttttttttttttttttctttgtggaaaacaacaccttatttattcagggtgtaatactgtctacttcctttcagaagacttgaaaaagatcaaaataggataaatggacagttactactaaacgattcaaatacttgggcagtatctttccctcttaaccctttcacacgtttttaaagtgtcaaaattgatgaatggtataaattcaaaaggaaaattcttttctactgaaaaggacatccagctcgcacaaacggtggttcagctgaaggcaaggcgtttctggttttcctctgcactcgggcggatcgttaacttccccaagttacaactgagttgctctttccaggcttttcgaagcatctttaagtttccccaccaagtcctgtaattgttccatgctgcaactaaaactaatctctggataggatgggggaatcagtgttctgtacacttaaggtcaccaaatatgcaggtctgtacatcctatgaagttgattggtctttatctgatattccaagcgccaagaaacatccgttatatgagggagagatctgcctatacttcccagtaggatttctagggaattcttattattctgatattccgtgcaaaacagttctattcgctctctgtcaaatttacagtcttctagataagtgcttagagttgacttgtcagctcggtgctttcctgcctctagtatgtaagttgcagctgctgcatgacaatgttttaaaaccactgggtcgatatgtttcaagtctggatgatctaacacggcctcggtccgcctgggcgtccagcagactctggaatgccgcccggaggagaagcgtgaaggcgttggagtcgaaggagcggggatccgccagcatctggaagcctttctgcacagactccgagagctccattgtgagcgcgccgtgaccttcga

SEQ ID NO: 13731 - DNA, 2298 bp, Homo sapiens
  misc_feature (1)...(2298): n = a,t,c or g
tttatatttcaagaatggtatttatttccgacattactgtagaggcacacattggactctgacgattccccttgcagcagacatttgtgaagctgctggtcggcacacccatcaatcagtgactcctgcactgcagaggggccacatgcacgatgctcacgtgtgcacaggggggaggacagcacccccaccaggcagacgggcccagaaacagcatctgcccagcactccagaccatgcctgccaccagggcttctcagttctctagcatttgaacctctgatttaacattcatctctctccaagactgggtgggggcactgcctgtggccagacgtctcccacagcagggacagcaccaggcaagaagggggcctggtctccaggcagagaggagtgcagcccacctcccctctggctgacccctgggcagtgagcctttccatcacccctacacacatcaggctcagagacaaaaggcaggaacttcttggtacatgattttataggaagcacatttgtgttcaagtgaaggcagaggcgtccaccccaagtcaccagagcgcaggtgcagagaggaaaagctgtcagctagtgccagcctccaagggccagcgctacccttcaacagctggaggcaccactgtgcgagggctttccacaccggcctccctcaggaacaagacatcctcaccaggcaggggtgaggtatgggctccaggactgggcttcagcagggcaccagggcttgggcaccacttgggggcctggggtacgcccagaaggtcacacagacggttgccgctgctctctcaccactgcaagctcccgcgttcccacgcagtttncaactgagcacagtcaccacctcgtcccaagcacatccgcgccccacgaacgtcactgtaggtgagcaatgtctcgtaacacctggctggccgtggtcttccggatcagcgggaaacggtggcagaggagcagacacagctgcaggagggcctgcctcctcacgtcgccggggaactgcaccatccccgcagaacactgcgatgcctgacaggagcttctggatatcttttgaattcttgatttctttcttacagagcgcaagcaacttcacagcaaaggggtggtcctcctccgtggtgaagatgtcgaagcagccgtgggtgagcacgtggtccagcgtcttcagcagcggcacggacaccctctcattcagaaggttgtcctcaaagatctgcagaagggtcccgctgaagctgcccagggcctgcgggtcgctctgaatgcccttcatgtactcaaagaggctctgggtggagtgccggatcgtcgactccgtcaagccgcccagggacacgactagccccagcaggacgtggtagcggtaggtgggcagcccaaggagctgggtgatgcgtgggaaggcctgggaaggtgcactccagttcacggaggccacatcggacctgggaaacagcttttccagttctcctcggtggggcacgtgggggatgggagggctgtcaaagtgcaggagcgtcaggaacacgctggcggcgtgagcacggaaacggtcaatcttctcactggcctgctgggccacacagcacatgatgcgctcacaggtatgggcctcgatcagctcagcgtggctccgagccagcagaagtgtcagatccatcagactggtcatggcggccttgcggacccaggtgcccacgtcccctctgctgtccgtggtgtagtcgtccatgcagcccagcagcgcacagtaaatctgggaaacattctctccgcacacagcttcgtctggggctcctgctttcacaccaacagtctggcaaatcctcgcaatggccttcaagccgtctctccctggactcagcaaaacttacgtcctcgggggaagtgtgggtaactgctcttaaacctgtgagaacctgctggagccggcctttcagaaggaagccctggaagggcgcccaaggccaacgagaagccacagcgagtcatctcctcggggttccgaagctcagcccaggtactgcgtgatcagctcctcctgaattgcgggatctgcctcccccggctccttcatgtaatattcactgcatagagcagccagggccgagactgctgcatccttcatctgctggcgggagtgacttgagatgagatggagatgtctcaaagtgtcatttatcagccattgccaaccatcaattacggtgtcacctctaaagggcattttggaaagtgacaacttttctattaaaacacacactgcttgtc

SEQ ID NO: 13732 - DNA, 504 bp, Homo sapiens
  misc_feature (1)...(504): n = a,t,c or g
gcagcaataaaggccaagaaggagaaagttgaggaccgctgacagccccgtgtgctgttgggagctgccctttctacttcaaaccttcctctagcagactgtgcagggaccccccaccaccaccatctgccgccatggttgtgcaaaacagcgcagatgccggggacatgagggcaggcgtgcagctggagcccttcctgcaccaggtcggggggcacatgagcgtgatgaagtatgacgagcatacggtgtgcaagcccctcgtctcccgggagcagaggttctatgaatccctgccacaggccactgaagcggttcaccccacagtacaaaggtaccgtcacagtgcacctctggaaagacagcacaggccatctcangcttggtttgccaacccagtgaaaggagaagccaggagccctttcaaggtctccacagagtcggcggcggttggccattatggcagacgctccagcagaccaccggcagcaatgggaagcgact

SEQ ID NO: 13733 - DNA, 351 bp, Homo sapiens
gaacacctactgcttcggccggaccgtggagacactgctgctccgctttggcaaggttctcttggccaacaccttctgcgtggaagcttacttgcagaatctcttcagcctctctcagctggacaagtatgctccagaaaacctagatgagcagattaagaaagtgtcccagcagatccttgagaagcgagcctatatctgtgcccaccctctggacaggacatgctgaggcaggggacagtgtcccctgctaccgcccgcccctacccatggcccgttgctggatgactgttactcttttttcagaaggtgttgggattatcacaggttaagccttttgttccccgtctg

SEQ ID NO: 13734 - DNA, 592 bp, Homo sapiens
ggtcgacgctcccgtccactctcgactgccggcgacgcgggtatgggcccgacgctccagcgccatccattttcagggctagttgattcggcaggtgagttgttacacactccttagcggattccgacttccatggccaccgtcctgctgtctatatcaaccaacaccttttctggggtctgatgagcgtcggcatcgggcgccttaacccggcgttcggttcatcccgcagcgccagttctgcttaccaaaagtggcccactaggcactcgcattccacgcccggctccacgccagcgagccgggcttcttacccatttaaagtttgagaataggttgagatcgtttcggccccaagacctctaatcattcgctttaccggataaaactgcgtggcgggggtgcgtcgggtctgcgagagcgccagctatcctgagggaaacttcggagggaaccagctactagatggttcgattagtctttcgcccctatacccaggtcggacgaccgatttgcacgtcaggaccgctacggacctccaccagagtttcctctggcttcgccctgcccaggcatagttcaccatgtcgac

SEQ ID NO: 13735 - DNA, 2268 bp, Homo sapiens
gcaagcacaagttgaccccggaatatctggagctcaaaaagtaccaggccattgcttctaacagtaagatctattttggcagcaacatccctaacatgttcgtggactcctcatgtgctttgaaatattcagatattaggactggaagagaaagctcactcccctctaaggaggctcttgaaccctctggagagaacgtcatccaaaacaaagagagcacaggttgatgcaagaggtggaaatgttctccatatcaagatgtggcccaaggggttaagtgggaacaatcattatacggactcttcagatttacagagaacttacacttcatctgttccacctctcctgcgatagtcctgggtgctccactgattggaggatagagccagctgtctgacacacaaatggtcttttcagccacagtcttatcaagtatcctatatgtattcctttctaaactgctactcatgaatgaggaaagtctgatgctaagatactgcctgcactggaatgttaaacactaaatatataacaagctgtgttttcctaagctgagatctgttgaataatgtttacattcgtcccccggggaaatgtatgctcagccaccattcaagagatgactgagaaggagatggtaagttcaagaagactgattgcacctggggacccaggccctttctttgggatccagtcccagccttcatccatgtgattaagatccaggccgctgaagttccccaggggaatgatcttccacttgagcaaccttttacttgatacgatttgcacctttcttttttcctgcagtcagggtggtggcctgcagggacctgagctttgctacccaaccagattcctcatagagattcctaatcactagtttcttgtattcataaactcagagatacagagggcttggtttgaagttggggtgagatgaaacctttgctctgaggccaaagctctgggggccttgcattccctgcattgggttgatgactgtcagcatcactgccgcagcatgcttgactaaggtacctggttttagccacagccacctccttgtatgttacctttcagctctggccaagagtgggacagggttttaaccacaaataggagcagcatgcaattcctagtgacttgctgcacagtattgtatcataattacaggaagtttttatttttaaaactggatctggggtatattcatttgccccatcacctctgtctaaaggcccaagtcctagggctgccatggtcacaaagcacactgatgctccttaagattgtttatctgggagcccacatagtgtggaacaaaaagtcacctagaaagcatccttggtcatcattgtctccttcccacctggcccagagatgcttaaatccaagttgtttctccagctgtcacctcccccaggagatcaggattccactgacgtcctgggcagccagtgaatttaattttccatgagaaacaacagagttaacctgtggcattaggagacctacttcatgtggaccctttttttccttcagtttaacttttctgggagcagtgtgctgcgtagttcggcctgagtttgtgcagcttgttaagacaactcttgtgtaacgctatgttgaagctcaacaaaaaagtcatgggaccacttctagaaatctttcagctgtcaggcctgtcagtctcatgacagtttgttggttgtgccaaacactttatttgggaaaggaaagcccagatttgaatgggtctttcccctgggccttatcctatagaggcatttgtaatatggagaaaataatttttcatttttgctcatttaattctataaattctctttataaatgaattttgtgttctttagttctccttaaaagaacttttgaattataaaaataaaatctttacctgtcgaattgttgctgcagatgattgttgtggaaaatctggatcattgacctctgtgctttcattcctagagatgttttatagttacatgagcaaaagctgttgccccaaagtgatggccctggaggcggggctgaggaacagggaaatgccgctgtgaagtcttaaagcacttctgcttaaactccatgtgtgaggagtgtgcctccctgtgccctctcagctctgaggctggccgtctttcggggtgttccttttggcaaatatacactgtaatcttgagtctaaatttatatgttgaaatgctaccttttttaaaataagaaactaaataaaattattttactatc

SEQ ID NO: 13736 - DNA, 1832 bp, Homo sapiens
gtggcgctctccgttcggcggcgctcccatggcgcacattaccattaaccagtacctgcagcaggtgtacgaagccatcgacagcagagatggagcatcttgtgcagagttggtgtcttttaaacatcctcatgttgcaaacccacgacttcaaatggcctctccagaggagaagtgtcaacaagtcttggaacccccttatgatgaaatgtttgcagctcatttaaggtgcacttatgcagtggggaatcatgacttcatagaggcatacaagtgccagaccgtgatagtccaatcattcttgcgagcattccaggcccacaaagaagaaaactgggctctgcctgtcatgtatgcagtagcgcttgacctttcgagtgtttgccaataatgcagatcaacagttggtaaagaaaggaaaaagcaaagttggggacatgttggaaaaagcagcagagttactgatgagctgtttccgggtctgtgccagcgacacccgtgctggtatagaggactctaagaagtggggcatgctgtttctggtgaaccagctgtttaaaatctacttcaagatcaacaaactccatttatgtaaacccctaattagagcaattgacagctcaaacctgaaagacgattacagcactgcacagagagtaacatacaaatactacgttggacgcaaggctatgtttgacagcgattttaagcaagctgaggagtacctgtcatttgcctttgagcattgtcaccgttctagtcagaagaacaaaaggatgattctgatctatttgcttcccagtaaaaatgctattgggtcacatgcccactgtgggagctcctgaaaaagtatcacctgatgcagtttgcggaagtaaccagagctgtgagcgacgggcaacctgctgctgctgcacgaggcgctggcgaagcaccgaggccttcttcattcgctgcggaatcttcctcatcctggagaagctgaagatcatcacctacaggaacctctttaagaaagtgtatttgttactgaaaacacaccagctgtctctggatgcttttctggttgccttgaagttcatgcaggtggaggacgtggacattgacgaagttcagtgtattctggctaacttgatatacatgggacacgtcaaaggctacatatcgcatcagcatcagaagctggtggtcagcaagcagaacccatttcctcccctgtccacggtgtgttgaaagtacacggagccccgaggacgggtgagcagttgtttctttccactttggttgtgctgatgagaccggtccggtactgcaacaaggctccctgaagccggaactcttggaggcgcttttcccagggatgctgaggctgagattttcagcacacccgagttaatctccttcatttgtaactaatttcagcctgatgaaaacctggaattcctttttcacagactcggctggttctggagtctttgtgagacttctttgaaggaggctttgcgtgaaggctgctcggctcacttttcctaagtgtggttcctgaaggctgtctttgtaactttttgtagttctttgtgtaaaaagcgtattctgaatttatacacatggcatgttcttcattatatcttccaggatacatctatttttatatattaaatttgaatgtgttatcaaaatgcttggttaacttaaggcacctttttaaaagcagaatttaatttgatttaaattttccagattttatagcttgcctgtatggatgctcctcaatttatgatggggttacatcccaataaacttattttatttgcctttgaaaaaaaaaaaaa

SEQ ID NO: 13737 - DNA, 1328 bp, Homo sapiens
cccagaaattggtcgtctgagagctttacgtcatcttcgattagctaataaccaactgcaattcctacctccagaggttggcgatttgaaggagctgcagacactagacatttctaccaatcgtttgctaactttacccgagaggcttcacatgtgcctttctctgcagtacctcactgtggaccgaaatcgtctatggtatgtgccgcgccatctctgccagctgcccagcctcaatgaggctctccatggctggaaaccgtcttgcatttttgccacttgatttaggtcgatctcgagaactacagtatgtatacgtggataacaacattcacctgaaaggcttgccatcttatctgtacaataaagtcatcgggtgcagtggctgtggtgctcccattcaagtttccgaggtgaagctgctttccttttcatcagggcagcgaaccgttttcctcccagctgaggtgaaggccatagggacggagcatgatcacgtcctccctctgcaggaattggctatgagagggctgtatcatacctaccacagcttgctgaaagatttgaactttctgtctccaatctcattacccagaagtttcctagagctgctgcactgccctctggggcactgtcatcggtgtagtgagcctatgtttaccatcgtctaccccaagctctttcccttgagagagacgccaatggcagggctgcaccagtggaagacaactgttagttttgtggcttactgctgctccacccagtgtctgcagacttttgacctgctgagttgataaacactcaagaacctcaggagcgctgccagcttgacactggggaatccagccagtccagcacactcttccatcctgtcctgtccaatgcgggggcactgcagaactctctagaaatgtcatgattgagcttcagagctaaaatgccttcacccttcccccaagttggaatatatcctcccccaaattaaggacccatttgtcttctgtgtttttcctttttatgtgagtgtgtcttttacagaaaccatttagattgatgggcctccccaaatctaatttaaagcaagtttccggtccttggagaacagtgacttgatcatctagccagattcccttttgaacacacataccttcagtgatgcttcctctcctctcccctcccttgctttccccagagagttatttccctgagaccatgttctccacagtgtctccagtggaaacttgtcagtttttgaggagtttcagcaaaccccgtggcctcaaatggtcttgaagtagcagggtggggcgcctgagttggcagcaaag

SEQ ID NO: 13738 - DNA, 1369 bp, Homo sapiens
cctgattataggttaaaatatttattttgtcaaaatattttcttgggaatgtgtttaaccctttctgcgttcattgttgctgagatgtgaaaactaaccattccctcctgcctacctttttggccactgggcggcagagaatggcgctatgtgcagttgggcccccggcaccatgggcctttggcctgcctgctgcagagtagccctgcctgggcagtctccaggcactgagcaggccatctgtggccaggctgagagaatgactggctcgcttaccagcgtgcatgggacaaggagctttggagcctcaaggggttgttgctggcctgggctagagggaaaggtgaccatccgtctgtcctcctgtctttctattagcgcctccatgtgagtgatggtgccttggttcactagccttcccccaccaccccaccatgccacctggtggtcttggggcctgtgctgtcactccagcccctggggaaggagaggacccagcccggagagttggggcaagggctccacatggcccaagggcaacagatgctcgcagggcagctgctgccgatgctcacgctcctgcccccctccttcccgctgccacaccccaccctgggcccccgcagacacgcatctctaactcagttgggcccagccttctggatagcttggggtaggccatgggcccacctggggccaggccagcccctggggcagctctggaagagcagtgtggaggagcacttgcttgcagcctggcttcagcctctggcactgctggagtggtccctgggagcttctgcactgtcggctttggggacgtctcacccacttgggttacagtaggccttccccacccagagagaagtgtttccaccccagagacattgtctgtcagcccctgaagtgctcgccttcccccagtgcccgtcaaccagcccttcctatctgtggggtccaagtcaggcttcccctgcggccaccagccataggggagcagccatcagcccccgagtcagaactgcttctgtctgtccatacctccaggctctcccggagaggggggacggatatttatttcctaaagtttgcacttaattgtgaggattctcaggattgttgggggctactgaaaagaggaatgtgttgaatgtcgcgtttgctgtccactcggtcctagaagtttaagtgtttttggtaactgtcaatgtgtttctgtgggcagagctggttctgggagggtgggtcagtgcacccgaggctcagagcatccatccaccccactggccctccttccagataccctctctctaattgggttcttgcatgtaaaatactccacaataaataaataattgaacaacaaaaa

SEQ ID NO: 13739 - DNA, 1491 bp, Homo sapiens
ttcaaagcgtgaatttttacactggctttttcatttttttaaagtaattgaagcttgtggctttacaacttagcgttttttgctatccagataacaaggttcattgtttagaacccagtgacacttaataggtagataaattgtcctttaaaatatcccagatgatatacacaatatggtacatttgtgctctctctctctgtttttctctctttctctttctagttagatcaagataacgatgacttgtaccctccctgattctgttacagtagggcccgggcagatctgtgtttgttaaacaggccttgtttgtgcatgctttgctatgaatgaagttcctttaaggacaaagaaaagcacacttttcttcttttgagcatatctgcttttactttaaatctgctaatttctaaaatgtagagtccttcaccaatcccagagactcaatttggaaatgaactgatttcaagccgttactgtgaataaagcaccccagcattttgtataagctcttaattaaacctgtacagcttctttacctgatttaagaaagggagacaagcaataggggggaataagcttcttcaaaattcattccaagcacaaaagaaattttttccctttgcatataaacttgacatcagttgattctgttggggtcggggtgggtatgcagggattgccttttattatcaagtgatttatttcaagagcctttgaggggattcaggtgaaggaacccccatctgtgctggagagttggatactcctttaaatagcccccaccacagtcataacaataatgataatgctggattatttgttaagccaaggttgtctgcctcatatccatcatgctgtttgcaatattcttgctttcaatcaatttatactgagtgtaactttaggatttctgctattaaatggcatgctctctatcctgcttcagtttctgggctttgctttgtctgtttcaaaatatgtagcttcctcttttgtacaacaaaaaactcattctcacttttactaaatatactgtaggagtcatcattgatgttatttttctcttatgtatctgtaaagatttttggcatatgaatgtaatattaaagtcaatgatgctataacttgcgatgtttgcatcatgtcaacctttttgaaggagtgaaaaagccctactatgtttttaaatagcaagtgtaagctcagtgctagagtggatatacacaccgcatgttttcatatgtggcacttttatgtatcatgttgggttattgttctagactggactgttaaatactatgtttgaggctgggttgtcatttttataactgtcttggtgttttatggccattatttattacttttgatacacagaatgagctgcatgcatttatagagcaataagaggatgtatttaatgtgccttgtttttaactgaataagaactggaagcatgaatcaataaaactgattaaaatggtcaaa

SEQ ID NO: 13740 - DNA, 1331 bp, Homo sapiens
gcgaggttcgggctggttgttccgttgcgagctgcagctgcgatctctgtggtaggcccagatattttttaccgtcatttgctttcttaagtgtatgctgacttgtaaagtgaagaagccagtggtgctgcgggtgttcttttggggtagtgtctgggatccagtacgagttgaatcattgttcaaataaggtgtaattgaaaagtgatcctctcttcagagatgtcaaaaacaaacaaatccaagtctggatctcgctcttctcgctcaagatctgcatcaagatctcgttctcgttcattttcgaagtctcggtcccgaagccgatctctctctcgttcaaggaagcgcaggctgagttctaggtctcgttccagatcatattctccagctcataacagagaaagaaaccacccaagagtatatcagaatcgggatttccgaggtcacaacagaggctatagaaggccctattatttccgtgggcgtaacagaggcttttatccatggggccaatataaccgaggaggctatggaaactaccgctcaaattggcagaattaccggcaagcatacagtcctcgtcgaggccgttcaagatcccggtccccaaagagaaggtccccttcaccaaggtccaggagccattctagaaactctgataagtcgtcttctgaccggtcaaggcgctcctcatcctcccgttcttcctccaaccatagccgagttgaatcttctaagcgcaagtctgcaaaggagaaaaagtcctcttctaaggatagccggccatctcaggctgccggggataaccagggagatgaggcccaaggagcagacattctctggaggcacctctcaagatacaaaagcatctgagagctcgaagccatggccagatgccacctacggcactggttctgcatcacgggcctcagcagtttctgagctgagtcctcgggagcgaagcccagctctcaaaagccccctccagtctgtggtggtgaggcggcggtcaccccgtcctagccccgtgccaaaacctagtcctccactttccagcacatcccagatgggctcaactctgccgagtggtgccgggtatcagtctgggacacaccaaggtcagttcgaccatggttctgggtccctgagtccatccaaaaagagccctgtgggtaagagtccaccatccactggctccacatatggctcatctcagaaggaggagagtgctgcttcaggaggagcagcctatacaaagaggtatctagaagagcagaagacagagaatggaaaagataaggaacagaaacaaacaaataccgataaag

SEQ ID NO: 13741 - DNA, 645 bp, Homo sapiens
gcaccagctttcagtgtgcatgttccttggacacctgcctcagtgtgcatgttcactgggcatcttcccttcgacccctttgcccacgtggtgaccgctggggagctgtgagagtgtgaggggcacgttccagccgtctggactctttctctccctactgagacgcagcctataggtccgcaggccagtcctcccaggaactgaaatagtgaaatatgagttggcgaggaagatcaacatataggcctaggccaagaagaagtttacagcctcctgagctgattggggctatgcttgaacccactgatgaagagcctaaagaagagaaaccacccactaaaagtcggaatcctacacctgatcagaagagagaagatgatcagggtgcagctgagattcaagtgcctgacctggaagccgatctccaggagctgtctcagtcaaagactgggggtgaatgtggaaatggtcctgatgaccaggggaagattctgccaaaatcagaacaatttaaaatgccagaaggaggtgacaggcaaccacaggtttaaatgaagacaagctgaaacaacacaaaactgtttttatctaagatatttgactttaaaatatcttaataaagttttaagcttttctccaaaaaaa

SEQ ID NO: 13742 - DNA, 971 bp, Homo sapiens
agacacatatccccccagcatgcgcagtctctggatggcaccacgagcagctctatccccctgtaccgatcctcagaggaagagaagagagtgacagtcatcaaagccccgcattacccagggatcgggccagtggatgaatccggaatccccacagcaattagaacgacagtcgaccggcccaaggactggtacaagacgatgtttaagcaaattcacatggtgcacaagccggatgatgacacagacatgtataatactccttatacatacaatgcaggtctgtacaacccaccctacagtgctcagtcacaccctgctgcaaagacccaaacctacagacctctttccaaaagccactccgacaacagccccaatgcctttaaggatgcgtcctccccagtgcctcccccacatgttccacctccagtcccgccgcttcgaccaagagatcggtcttcaacagaaaagcatgactgggatcctccagacagaaaagtggacacaagaaaatttcggtctgagccaaggagtatttttgaatatgaacctggcaagtcatcaattcttcagcatgaaagaccagtaagcacttgtcattaaacagaatatgccagctcgctgggctcccagggctccccaataaacctgaatttcagacccattagcaatttttgtcacaaaggtaatcacttagaaatcatgtttattttgtataatgatttgtacatctcatctcagaattgaaagatacatgttctaatatattgtctttactgaccaaatacaagtgtatgtgtgtgtgtgtgtgtgtatttatatatatatatatacacacacacatgcaggtgtatatacatacacatatatacacatgtgtatgcacacacatatatatatttatatgcaagattcatttgcatgtaactctaactgtggcctaatcattaatcagagtttaacttttaaaa

SEQ ID NO: 13743 - DNA, 416 bp, Homo sapiens
  misc_feature (1)...(416): n = a,t,c or g
gccaaatcttagcaggtaaaagcaatattcttatacatttcataataaaattagctctatgtattttctactgcacctgagcaggcaggtcccagatttcttaaggctttgtttgaccatgtgtctagttacttgctgaaaagtgaatatattttccagcatgtcttgacaacctgtactcttccaatgtcatttatcagttgtaaaatatatcagattgtgtcctcttctgtacaattgacaaaaaaaaaaatttttttttcgnggctcacatcaanattcttcctgatattttacctcatgctgtacaaagccttaangttgtaatcatatcttacgtgttgaanacctgactggagaaacaaaatgngcaataacgngaattttatcttaaanatctgngcagcctatttctg

SEQ ID NO: 13744 - DNA, 1872 bp, Homo sapiens
actctgataaatttattaaaataagaacaagcatcagttgttcatagatattatcatttgcactatgcatggtactagagcagaagtgcagttttaaatgtattttttaagtcacaaaatatatcggttaaggctctataatcctgtctcatgttttcaataaatatgctggttttttttttttaaaggcagtagtgagtaaccgattacatgagtataggcactatactattaaagacaaactgctgtggccattgtgtgtaacttattctcaaaagaacttttgttagttaagattagtgttttttaagaatgagaatatgaaaattgtcacagttttctctttctaatttaggtctcttccagagagacctatatattaaaaggtgctgtttcttcactttattccttggcaacaatgaattatgcataaagtaaaaacattgcctctcaggaagtaaagccatcagaagatgtctcagaacagcttgaaatctttggaatagcttttttttttcaactgcaataaaatcagtgcagttcagaaaactcgacctttcagtatccgagaaggcagctttgtaagcactttctgttcgaggaactttgttaagcagctgaggggaatctgacccagctcctgtgttgtctggtgtagacagggcaccagactgggagtcaagtggcctgggtgcttcttcactgccaccagcacttcctaataatggcaaatttacattttgttacggtgctcacagcttacaaaacacatacatgtgcatcatcacagtttgttcacctgtaagatgaaagggttggattctttgttttctgtggtcttttccagttctagtgccttgctagtctgatagtgtgaattattttttattacagctggcgctgctgctgcatcagggccatcctttctgcaagacacaatgaccacagcaaagagcgggaaagataactttccacgacatcgccacattgtttgacgtcctttcatcaaatcactgtatgctattaaaagtcaccgtgtaactggagttacattattcacagaggccattaagacttctcttattagacaatataacttttgtgacagaaataggctgcacagatctctaagataaaattcacgttattgcacattttgtttctccagtcaggtcttcaacacgtaagatatgattacaacattaaggctttgtacagcatgaggtaaaatatcaggaagaatcttgatgtgagccacacctcttttagagtgagaaaaaaaaatttttttttttgtcaattgtacagaagaggacacaatctgatatattttacaactgataaatgacattggaagagtacaggttgtcaagacatgctggaaaatatattcacttttcagcaagtaactagacacatggtcaaacaaagccttaagaaatctgggacctgcctgctcaggtgcagtagaaaatacatagagctaattttattatgaaatgtataagaatattgcttttacctgctaagatttggtcttcagtttgactttgtatgtatatgtgtgtgtgtatatatatatatatttttttaattatagacacaacttttacttcattataaaagattaaaatgcatcattgagaagcaatttaatacaaagcatctaatcataaaaatagaaaaggtaatcaaagagcacttcagaaagaaactctggaaccaaaggcttagttcttctcccagggacctgtaataatctgtcaggaccttccatgctttgggggccatgaagccatctgggggattctctccttcccgggcgagcttcctcattcgagttcctgagatgaagtcaaactcattgtgcct

SEQ ID NO: 13745 - DNA, 991 bp, Homo sapiens
  misc_feature (1)...(991): n = a,t,c or g
ttttttttaatatgtcagccctcagtatgggcaattttgcatctgcaaccaacttggatcaaaaatatggtattgtgggacacgaaagctgcaaaaataggccagctttttgtatccacaagttctcaacaggcaactgtggggcttgagtggattttggaatccacaggtggtcctgggaactggtccccagcagacagtgagggatactacacacagacatatataggcacacaaaagataaggagggcagagagtgatcatccattaaatcccaatgaaaaccaatctactaaattctgagataaattttcctatcctggctaagttccagaccgaaaataagtggacaacataaaataatgctacagaactacagtgaggattcctacatatataagaacattaaaaaaaaggagtattatactgtgttcaggggcaaccctgtccctcacccagaaattaggttgcagctgaagtagctgctattcccttgagaatatggatctgttctggacagaataagaacacactggaaataacagtgttaactatacagataccctcttgtttcccagaccgactataaacaattcaaaggcagaaactttgtgctctactttttgattctctcacatgcatagcagttataaacacatggtaggtgtgtaaatatttactcaatggatgaggtcagcacagtagaaaaaaatgagaaagttaaaacaccacagaatcatgggattttagagctaggaaggtccttagagatattgtttcaagtacctttagtataattgaacaaactgaggcataaaaattaaccagcttgcctgtctaacataccatatgtcttatttattctctctctttccacaagattgtaagttccatgagggtacagannnnnnnnnnnnnnnnnnnnnnnnnnnnnnnnnnnnnnnnnnnnnnnnnnnnnnnnnnnntatggtgaatatctgttaaatgaatg

SEQ ID NO: 13746 - DNA, 912 bp, Homo sapiens
ccctttttctttttttaaaattttatttaaaaaaccttcggtgcaatattaaaaagcaatacagccagctggagcgacaatcaacagaaagaaaagagggaggagagaaaaggcccgaggaaccccaacccagctagtcccctaggggctggaggccaggggcagactgagaaggggggcatgggtggtaggggagggaggaaagaccacccaccaaaataaacaggcagatccaaacatttatacaggaaacatctggctgaacggaagaggatcttggggagatgagaagccccccacatttcattttttttttcctaaaatgtcctggactgggtggggagggtcagccacctggggtttaaggagcaatcccctccccacaccgacgtgctgaggagcagatgtgtgtgagacagacacaaggggcaaagataaggacaagagggtgccctctccttggaatctgttatgagggctgagggtgtccccgtccagctcctggactctgggggatcttgggtgagatgggggccggaatgggctggggcaggggtgaggctgggcgctcagcctaagaagccatcggggtcatcatcctcaaagtggccttgctgaagcaccttgatgtggtgctcgtagattttcagggctggcccgaggcggatggacaggccggtgagcacatctgtgcgctgcatgagcagcaaagatttgccatcaatttcctgctcttggaaagctgtcgcctgctccgggaatccagcctcagtaaaatattcgacgacatccatcacggtccactcgacgggatcagatggcttctctttgcgcccgggaggacagccaaagggggtcccgtcggccccaggtagggctggctttcctgggggcaaaggcacgggggacggg

SEQ ID NO: 13747 - DNA, 1522 bp, Homo sapiens
  misc_feature (1)...(1522): n = a,t,c or g
ggacagcgaaatggaggggtgtgtgtctaacctaatggtctgcaacctggcctacagcgggaagctggaagagttgaaggagagtattctggccgataaatccctggctactagaactgaccaggacagcagaactgcattgcactgggcatgctcagcctggacatacagaaattgttgaatttttgttgcaacttggagtgccagtgaatgataaagacgatgcaggttggtctcctcttcatattgcggcttctgctggccgggatgagattgtaaaagcccttctgggaaaaggtgctcaagtgaatgctgttcaatcaaaatggctgtactcccttacattatgcagcttccgaaaaacaggcatgagatcgctgtcatgttactgggaaggccggggctaatccagatgctaaggaccattatgaggctacagcaatgcaccggggcagcagccaagggtaacttgaagatgattcatatccttctgtactacaaagcatccacaaacatccaagacactgagggtaacactcctctacacttagcctgtgatgaggagagagtggaagaagcaaaactgcttggtgtcccaaggagcaagtatttacattgagaataaagaagaaaagacacccctgcaagtgggccaaaggtggcctgggtttaatactcaagagaatggtggaaggttaaacagcttggatttattcttactttgtatgttgtgttgttgtccccagtgtcctacaaactaatgtatttgtgcacaagacatcatctatgaatgatgaagttttctcaccttcaaagtcttataaacatgttgactcttgttcctgctgagttacttgttcgaagcttacagcttgttttccaggcatcgaataactgttgagattgttctactgttgtcgtatattcttctatattgaattctggttaatttggagtaactaattctgtggctgttgtgagtcttcagcaccctcccatgtaccttatatccctctctgaaacagaacagctccaatagcaacaagctagttgttctgccagatgtttctatgtggattctgtaatgttcctccatacagttaaaacatcctaacctggtttttcaagctcactcaggcctacgcccaaacgtttctgttttttttaaccatgaggtttaatttatttttgtgataggagggatatttacatattttagtggaccacattttaagttggatggtgtgctctaaaatactgaaaaacaatagcccatataccctatgtatttgtttttgatggggttgtttactcctggaaataaaatggtatgggttttccttaaaagggaagtttttaaaggtaccctattttggtggtccatccctggtaattgaaaaaggaatggtccaagccttggtttaaaaatggacatggtaaccaaaaaatggtaattttggantttgggaanttcccgganaccccnaaaaattaaaatgggttggaaaagggnaaaaaaaaa

SEQ ID NO: 13748 - DNA, 568 bp, Homo sapiens
tgttgttgttccccttacagacaaaatgaagactatcatgtgcaatcttttacagtggggttgatgatacatttggaaggatttgcttgtttaatatgtacattttttgtgttaacagctttttgacacaattactgggtaatttctaatataggcagcagactgttttacgggttgctgttttaacatgggtttttgtcagatccatggtcttaggacttgactgatgagctttcagtgaagaatcctctaagataaaacttctatttaaagactttaactagaaagtgtttattttggctacattgttcaccttctgctgtattggtatttgtctgttgggatttcaagggagtgtagagaagacagaaggaaagctgagagctgggcccgacatggtctgggacacagagttggagctggcactgaagatctccagggacttcagagaccaataaaagcccatagggaagagagagaggatatagggaaacagaatcagatgtgtaatatacttgggcacagcgaaaaaatggatttaaaagacaaaaatggaggtccaggtaat

SEQ ID NO: 13749 - DNA, 1478 bp, Homo sapiens
gagtctcttgtaagttaattagtttccctctttggcatgtggcatggaagggataagaagtatagaatttgttttgaggttaacaggctcagacaacaccaagggaaacaactgcaaaatagcagtagatttttactagtttcatcccagattctaactttcattctctaacattttattttaaaaactaggtcagaaaaagagtgcacgccagtatcacgtacagttctttggtgacgccccagaaagagcttggatatttgagaagagcctcgtagcttttgaaggagaaggacagtttgaaaaattatgccaggaaagtgccaagcaggcacccacgaaagctgagaaaattaagctattgaaaccaatttcagggaaattgagggcccagtgggaaatgggcattgttcaagcagaagaagctgcaagcatgtcagtggaggagcggaaagccaagttcacctttctctatgtgggggaccagcttcatctcaaccctcaagtagccaaggaggctggcattgctgcagagtctttgggagaaatggcagaatcctcaggagtcagtgaagaagctgctgaaaaccccaagtctgtgagagaagagtgcattcccatgaagagaaggcggagggccaaactgtgtagctctgcagagaccctggagagtcaccccgacatagggaagagtactcctcaaaagacggcagaggctgaccccagaagaggagtagggtctcctcctgggaggaagaagaccacagtctccatgccacgaagcaggaagggagatgcagcatcccagtttttggtcttctgtcaaaaacacagggatgaggtggtagctgagcacccagatgcttcaggtgaggagattgaagagctgctcaggtcacagtggagtctgctgagtgagaagcagagagcacgctacaacaccaagtttgccctggtggcccctgtccaggctgaagaagactctggtaatgtaaatgggaaaaaaagaaaccacacaaagaggatacaggaccctacagaagatgctgaagctgaggacacacccaggaaaagactcaggacggacaagcacagtcttcggaagagagacacaatcactgacaaaacggccagaacaagctcttacaaggccatggaggcagcctcctcgctcaagagccaggcaggtaatgtggtcagcgccctttccttcttggcttctgggtgcccaggctgggctgggtgggtgggctgagagtgtgaaaggggaaggctggggctggtgaaggggaacagggcaggggaggaatccacaattaagctaggagtgaaaaagaaggaaaggaggttctcctgtggttgaaaactaaactgttttaatgtgtatgttattttgaagggtttggctaaattttattgaagttactttttacttggctctattatttgcaatttaaaattttactagaaaagtgatt

SEQ ID NO: 13750 - DNA, 1783 bp, Homo sapiens
  misc_feature (1)...(1783): n = a,t,c or g
cggccacaaggatggcaggcttcgcggacgtcgggctgtcatcgtggctcgtggnaacaatgtcggcagctgggtttgaagcagcccacgcccgtgcagctcggctgcatccccgccatcctggagggtcgagactgcttggggctgtgctaagacaggcagtgggaagacagcagcgtttgtccttcccatcttgcagaagctgtctgaggatccctatggcatcttctgcctcgtcctgacacccaccagggagctggcctaccagatcgcagagcagttccgggtcctggggaagcctctagggctgaaagactgcatcatcgtcggtggcatggacatgggtggcccaggcgctggaagctctctcggaaaccacacgtggtcatcgccacgccggggcgcctgggcagatcacctgcgcagttccaacacttttagtataaagaagatccgcttcctggtgatggatgaggcagaccggctgctggaacagggctgcactgacttcaccgtggacctggaggccatcctggcggctgtgccggcccgcaggcagacactgctgttcagcgccacgctgaccgacacactccgggagctgcagggtctggccaccaaccagcccttcttctgggaagcacaggccccggtgagcaccgtggagcagctggaccagcgctacctgctggtgcctgagaaggtcaaggacgcctacctggtccacctgatccagcgcttccaggatgagcacgaggactggtccattatcatcttcaccaacacgtgcaagacctgccagattctgtgcatgatgctgcgcaaattcagcttccccaccgtggctctgcactccatgatgaagcagaaagaacgctttgccgccctagccaagttcaagtccagcatctaccggatcctgatcgcaacagacgtggcctcccggggcctggacatccctacggtacaggtggtcatcaaccacaacacccccgggctccccaagatctacatccaccgagtcggccggacggcccgtgcagggcggcagggtcaggccatcacgctggtgacacagtacgacatccacctggtgcacggccatcgaggagcagatcaagaagaagctggaggagttctccgtggaagaggccgaggtgctacagatcctcacacaggtcaacgtggtgcgaagagagtgtgagatcaaactggaggcggcccactttgacgaaaagaaggagatcaacaaacggaagcagctgatcctggaggggaaggaccctgacctggaggccaagcgcaaggctgagctggccaagatcaagcagaagaaccggcgcttcaaggagaaggtggaggagacgctgaagcgacagaaggctggcagggctggccacaaggggcgtccacccaggacaccgtctgggtcccactcaggcccagtcccctcccagggcctggtttgagccccacacggccatctgcccagtccttgactcgtccatggagctgagggtcggaggaaccttccttgggggcagcaagcccttcccgggggcctacccagtgccccacagcagaacccgtgggcgctcgtgttgtgcgggccctgctcctctgccccgaaaccactggctggtcccttccctgagccctggccaagattcaggctgcaggggaagaaagaacatgaccgggaggttgtgaccccaacccaaggtcaccccccaggggtgccgcatacaggaggtgcttaataaacgggtcttttgacttcctc

SEQ ID NO: 13751 - DNA, 1116 bp, Homo sapiens
gaaagttgatctgtaatgttcaggccatggaagaaatgatgatggaaatgaagtataataccaagaaagccccacttggttaccagtctcttaagaagattgaggattgtattcgggctggccagcatggacgagctctcatggaagcatgcaatgaattctacaccaggattccgcatgactttggactccgtactcctccactaatccggacacagaaggaactgtcagaaaaaatacaattactagaggctttgggagacattgaaattgctattaagctggtgaaaacagagctacaaagcccagaacacccattggaccaacactatagaaacctacattgtgccttgcgcccccttgaccatgaaagttatgagttcaaagtgatttcccagtacctacaatctacccatgctcccacacacagcgactataccatgaccttgctggatttgtttgaagtggagaaggatggtgagaaagaagccttcagagaggaccttcataacaggatgcttctatggcatggttccaggatgagtaactgggtgggaatcttgagccatgggcttcgaattgccccacctgaagctcccatcacaggttacatgtttggggaaaggaatctactttgctgacatgtcttccaagagtgccaattactgctttgcctctcgcctaaagaatacaggactgctgctcttatcagaggtagctctaggtcagtgtaatgaactactagaggccaatcctaaggccgaaggattgcttcaaggtaaacatagcaccaaggggctgggcaagatggctcccagttctgcccacttcgtcaccctgaatgggagtacagtgccattaggaccagcaagtgacacaggaattctgaatccagatggttataccctcaactacaatgaatatattgtatataaccccaaccaggtccgtatgcggtaccttttaaaggttcagtttaatttccttcagctgtggtgaatgttgatcttaaataaaccagagatctgatcttcaagcaagaaaataagcagtgttgtacttgtgaattttgtgatattttatgtaataaaaactgtacaggtctaaaaaaaaaaa

SEQ ID NO: 13752 - DNA, 2570 bp, Homo sapiens
tttttttttcaagtatatttactctttattgcattccttcatttgcattaaacaatattttttcaatacagttttggacaaaacacaaagacattaagctcatttaacaagagacataagttaacacaatgtgtgctgctttcatgaggaggaaagaggcaagatcttagaggaatccaggatactggccaccaggaatcacaggatctcacaatacaatccacttctttaaaagccacaaaataagctagggaagaaaacccaaaacaaagaagatatgacatccaagtctccaccaaaagtatacaaatggcaagatttggagatgatctgctttctcacatgaggacaaataacagaggagccacacccaagtgccactgtggccacaagcctcatgggtggcgtgtgaggtaagcaccttaggatggcttctaattgcttgtccttgcattttaagcagcagttgggagagagaggcacactccataagtctcatcaccaaatatgacctaattaaattcctgctaagtcagtcagttgtaagacaaatcaccctcaaaaggactcaacgggtgcttccttttggaagaagtgtgtggagggtaaaggaaatgtgttcaatgtattggaatggacaataaaggactgagggagagggctagaaaatgattgatttttctggagaatagtgttttagacactagatagtacagatcatttaaaataaaggataaattctaagtaagtcattaagctaaggaaaaagcagtgatactagtaagccttaatattatactaaggaattgacccacttggagttggacactaattagtgctgagaggtttgtaaattactttaataactcctttctgtttgggggtgtatgctttttccatacctatctttcacatgtttttaacaacatcttctaagtggtaataatgagcatatctcttaccacagagcaaattagttatacttaaggggaagtcacaaccaacacggtagtcatctgactttctattaagaaagatcttctgactgcaacttgaaaacatctctgacaatgattgagaacagcattttagagattcaatgccttgtttcttcaggcaaagagaataccagtcttgtgggagacctttaaccaaatacccagtgacttttagtgttagctcaggacagctgtccagaggatctctggcccacacctcgatttactaagccagatttgcatgtagaaagtctgccttctaatcggccaactgttgtcatgcaacattcatgacactgactgagagttttcaagggtgatggtgctagtagagaggttgaaacgtgtagtgtccacaagtactggatggttcccacccagagggactgagcaagaaggaatcactttagcctgcatgggaaggtaagcgcagcattctaaaccaaattgacaccttcccacgagacactaagctatctcagtatgcataaggaagggagttttattgcactaatcatgcagagcgagcacatgttgaaggtagagaaacgttccacttagtccagtatcttgagtaagacagtgaagatcctaggccatcttcaccttggtcacttcccttgggtcactgtgtgtttcaaatagttcattttcaatcaaaaatcaagggggctagctccttcttctcttaagagggccaagaattttctcacacggtattcaggatccatctgtagggacatctcgatcagcattagtaacttcttgattcctatccagaccttcttccctttgacttgctgtgcaattgtggtgcgttccttatccttgaagttgcccaaaagctccaaagcttccaacagctgctctcctgtggcaatgttgggcacgtggatggtggtgctgaaagcgttaagcatttccatctcctgaaggacatctttgcggctagtggtcccaatgataagaagcttgcggccctgaggaggtgcctttttcagtaaaacgagaagagcctgtaatacaagatttgaaaatcgagggccaatagggacgtaatcaagcaatctctcaatgtcatccacaaccacacaactgagctgggatttgtacgcatcatcaaagatcttcttcatggcctgacatttggctgtttcagaaaagccaatcattttatcaggagaacagatcttgatgaacgggaagttggattcctctgcaatttttgcagctaaagcagtcttcccactgtgaggagggccttccagaagcacgctgaccaatggtgtgcggtcactgttcttagtctgctgcaccagcagctccccatcatctagaactcgagtaactgggtcaccccatttgatgataccgttcataatgtaacttgcataatcttcttggtttgtgccaaaggctggtttgatatcattctccaaagaagcaaggaagtctcctctcgtcacttgcaggctttctgctttctccatgtccacttccactttagtactggcctttatgtgtctattcatagcagtggactgggctgctcgcaccagaccctccaattcc

SEQ ID NO: 13753 - DNA, 810 bp, Homo sapiens
gaatgcttaatgcagataactcttctaatcagtgtccatggcaatatgaacgcttgaagaaaactcagtgacataccttgctcagtagtttcttattcctgaagaaccacaagcataaagtgaggcctcagtgctggtgctcttggagtatggggaatgtgcaaatatttaactgttttgtatgctgcacattgcaggtctgctcatgtgcattctccctttgtcttcctttgtcatatgtgtttttgcttttttgaaagtgcagtctttattgtaccctcctccagcttgtagcaaattagaatgcttagcatttatgttcattcattattgtatttgccatgtaaaatttttattaccttagacaagcttataagctgttactacataacttatcttactgtaactcttttatttcccccgacgttgtaatttgtttgtgatgtatattgtgaaattgtattctatgttaatttaatcagcacaattcactgacatgctggactgacatgctggctgctgtttcaaagtgtaaagtttgtgtagggctgttgggacaactgcaactctgttgtcaaggtactgtgctttggttcctatagcaacactgggtgtggcccttgaattgctaagggcatttaatacatcctggagcaaattttaactgcagattttctttgtagaaattctatgtataatgcaggtacctacttggcccatggctggtaactatttgggcaattagaaaaaaagaaaaaaacataaaaactagtgtctattgctgctttgaatatgtttgaaagtctgaaa

SEQ ID NO: 13754 - DNA, 475 bp, Homo sapiens
tgactttctgaagttctgttttctaactacaggatagcagtcgtcctaatgtagcaccagatggtctctctctaaaatctatatccagtgtaaatgttgatgagcttagagtgagaaatgaggaacgaatgcgaagactgaatgaatttcacaataaacctattaatacagatgatgagagttcactggttgaccctgatgacatcatgaaacacataggggatgacggatcaaactctgtagcaactgagccctggctccgccctggcacttcagaaacgctgaaacgtttcatggcagagcagctgaaccaggagcagcagcagattcctggaaaaccaggcactttcacttggcagggcctgtcgactgcacatggttaaaataaacctgtactggacccagtagtgccttttaaggtgaaaggaatggtaaatctgtacctttaatatgtcctacttttggcccctacctg

SEQ ID NO: 13755 - DNA, 424 bp, Homo sapiens
  misc_feature (1)...(424): n = a,t,c or g
ggggacttcctgacaactgcacaaactcacgtgggggatttcaatatcccaaagcatgcagattcctggtgtggctggaattggtgctggggtgctgcgaaagccaggtttgaagcaggaagagaaaaaaaccactcacctgtgtcagcctcgagtgctgaagaacaaccgtgtgtgggccttcaaccctgtctgggtgggttctggacagtgggtggggacccggcgggagaagggaaaggtcgttgagggggcagggcatgaaaactgtcgctggagctgggcaagagggtggaggctgctttggaagctgggcctggttagagggtggaggtggaggtagggcctggagtttcaagcttcagccatgcatagactagtcagcttctggtgtgtgactagaacaggcttgtcctnaagcttc

SEQ ID NO: 13756 - DNA, 505 bp, Homo sapiens
ttttcttactgctgaacagtttatgtagtgacttttgttgcaggggtgggtttagagttctttttatgcaggtttttaaatgattttattttgaactgaatctccatttgcacagcacagcagacacacaagaactacagcgcattaaaaacagcatgtgtgctggcgggggcctggctttctcattagaaaaaaatatgtttgacaggttatgaagggtaaaacaaaaataattgcaagaactaccgtgcccttctgcacccatgggggccttccctatcccatgattccattttggggagtagaggtagggagggggcagcagttacaagtgctttgagctgtcaactcacattttactttgacctggttgggcaagaaaggagagacaaacttccctagtcaggtatctaggaagaagcctcagctactgtttctgtttaaggtctctggggtagctcttggagccaacagagaatagatggggtaggaatagggatcgctg

SEQ ID NO: 13757 - DNA, 531 bp, Homo sapiens
gccatggacaactgtttggcggccgcagcgctgaatggggtggaccgacgttccctgcagcgttcagcaaggctggctctagaagtgctggagagggccaagaggagggcggtggactggcatgccctggagcgtcccaaaggctgcatgggggtccttgcccgggaggcgccccacctagagaaacagccgggcagccgggcccgcagcgcgttctcccgggagagaaatattattcatctgtgccagaggaaggaggggcaacccatgtctatcgttatcacagaggcgagtcgaagctgcacatgtgcttggacatagggaatggtcaggctgagaacatctctaaggacctctacatagaagtatatccagggacctattctgtcactgtgggctcaaatgacttaaccaagaagactcatgtggtagcagttgattctggacaaagcgtggacctggtcttccctgtgtgatgttgaccatcactgccatcacatcacctttttttaagtagtaagaataaagcca

SEQ ID NO: 13758 - DNA, 765 bp, Homo sapiens
ccacatactggagcatagatatacactttgggatgctcatcttttctaacacctcctcaagaatttggccaaacaagttaggagaatctgtaaatccttggggtaagactgtccagcagtattgttgttttcacccagagtgagaatcttcccattcaaaagtgaatatatcctgactatcttcagctaaaggacatgcccagaaggcatctttcaggtctatttctgtaaaccactgatggtcatatggaattttgctgagaatagtatatggattgggaacaacaggatgagtggtttgaacagtttgactaatggcttgaagatcttctacaagtcagtatcaccaatctgactactttacaagtaatattggagtagtatagggagacatgcacagttcaagtagcccatctcagataaggctctcaattagaggttttaaacctaatctaccttctaagggaattggatattggtttcttttcactgtttccctgggagtttttaactttatgtgaattggaggaacttgtagcttccttcaatttccctcccttgaccactcattagcattgatgtagctttcttctgctgtagtaaacaggtttaatgaagtgaagaatccttctgggcttacacgcaagcctatacctaactttgccattaggccacttcctaacaagtttgtcccagccttaggaagtagcaaaaatttaacattggttgatcgggtttcaaatctgacttctgttttttctgagg

SEQ ID NO: 13759 - DNA, 1871 bp, Homo sapiens
ttttttttttttcgtttttggggcaaaaaagctttttattttcccccacattccagctcttcactttttctaaaaccttttccaactcagagccaaggcccaagaagttgattcacacctggggagaaagaaaataaaacaacaaaacaggtcgaagagctgctagaggaagctctgagatgtgtgcagaaattgaggaaggagcagagggagtgacagctagagaccaatacgggcatttaatcccaactaaggtagcctcaggaccccagggtctgtcaggggccaggaagccctcctttcccagtccaaggttgagagggtcctgtcatttcctgtcccaagtaggtggttggggcatttaggccagccatcagcaaaataagcacagttgatcttgagcttccacttcctctggcctgatcagttccctgggcctcaactatttccacttttcccatagtaacttccctagggcactgcagccagctgaagctgagaccagttcaagagctggatgcataacacatggctctcaaatttcatgcacccccctctgacaagtgaagattttttgcagaaatattttttcctttagtgagctgatgtgtgaactggttaaccaacatgacccccacccactgctacgtttgtgaagctgattccctccaaagatcttgttaacggaatcagctttttctaaaggtaacgatgactaaatggaagacagaaggtgcatgtcaagttcttgggcacatactatgtccccagtaaatgagtatcatcagttagactcttctgagcggttcaagttgaattttacaaaatttccatcataaaactgggtattggaatttcaggacaaaagcaagacaaacatggttcatattcaggacaaatcatcaaatgtgaaccctcttaactcaccattgttacccaaatgcttggatgtgaactagttatgagtcttaaaatcacaatgttgcttgaaagaagtcagccacaaaagaatgtgtatgattctgtctgagaaacaagtcgggaactaggccagtgccctcagagccgggttctagaccagtgggactcccggcgcgggtggaagcacatagcagtgacacagcagagaaggccacagaagagaagcaggaaggagcccaagaccagcagcctggagccacacagagccagctcctccgaggtgagcagcttggtcagcacaaggccttcatggctccagacactaacacattcctcacccattctagggctcagggtggcatttccagccccctcctctgagcaggatatgggtggctggctggagggtaggattcctggaacagcactaaaatataggcaggttcctgcagtcctttctgtggtcaccctggctgtgataaggaccagttgtcctgcagaagatcctttcaatcccatctgacttcccaggactgtggcctggaatgtccgggtcttgttcctgtctggaccgtctccgaagttcaaggtggtcagcaagcccacgacgtgagaccctcgccacttccctgtgacgtgtcccattcctgggacacagggtcagctggccaaaagatctcaaaaaagagacccagtcctgggggatgtcagggctgcgcaggccagtcctgtgggtgaggaggaagctgccaaggcccaggccagagaggccaaggagcagcaggatcaaagtggcacagaccagaggtgggtggtgggccagacacaggtgcaggttgtgccctgcctggcagttgcccatggggagcagagggggctgagcctccggggagagcctgagcaccccctccccggaaagcccccgccccgaacgattgcaacgccctcgc

SEQ ID NO: 13760 - DNA, 1022 bp, Homo sapiens
  misc_feature (1)...(1022): n = a,t,c or g
acacaattgttttcagtaatccttcttcagaatgtagtatgaaggagggaatacagacatgtatgtttcctaaggaaactgacattaaaacttcagagaacacagctgagttcaaggaacgggagctctgtccactgaagacctccaagaaactacctgaaaaccatttaccaagaaactcacctcagtaccaccagccagacttggcnaaaaatttccaggaaaaataatgggaataaccagcaagtacctgtcaagaatgaagtagatcattgtgaaaatttgaagaaggtggacacaaagccttcttcagaaaagaagattcacaaaacatctagagaagacatgttttctgagaaacaggacatacctttcgtagagcaagaagatccttataggaagaaaaagcttcaggagaaaagagaaggaaatttacaaaatttaaattggagtaaaagtcgaacatgtagaaagaacaagaaaaggggtgttgctccagtctcaaggcctcctgaacagagtgatctaaagcttgtgtgcagtgactttgagaggtctgagctgagcagtgacatcaatgtaagaagctggtgtatacaggaaagcactagggaggtttgtaaagcagatgccgaaattgcaagcagtttacctgctgcccagagagaggcagaaggttactaccagaagcctgagaagaaatgtgtggacaagttctgctccgattccagctctgactgtgggagctcctctggcagcgtgcgtgccagccggggcagctgggggagctggagcagcaccagcagctccgacggggataagaagcccatggtggacgcccagcacttcctgccggccggagacagtgtttcacaaaatgattttccttctgaagctcccatctccttgaatctttctcataacatctgcaatcccatgaccgtgaatagtctcccacaatacgcagagccttcctgtcccagccttcctgccgggcccacaggtgttgaagaagataaagg

SEQ ID NO: 13761 - DNA, 743 bp, Homo sapiens
ttttctcagttcactctttccttgtttattaaatatcaacttttcctgcctaatgggctgaggttcattttcccattcctcaaggtaagggtagactacctaggaacttattgcatctttaggccagctggcttagtgctacccatctgaacccccagattactacccaagtcttccttttgccccttcctgccctaacagcaagtaccaggccagtcccttccccagcaaatgccaggggcttcatgtgaagaggaactggccacaaggctgaggggaggaggagaaactgtttctgcaggaaggacagcagtgcctcccaggctcttgggcatcttcacatgtttctagataaaggacaagctcaactctggagcctctggtaggcagaagaaaggaggcagggagtatggcctgggcttcagataccgctgttctggatggatccacagatgacgaaggcaaggttcctgggacctggagtcacacagggccatagccaagccttttcactagaagggcaggcagtgcccattcatcttgtcagaggcaacctcagctgtggacccgaatggagtgagcaaagggagtccaggcctccactctgctctagagatggcagtgtccaggctcctgattcccaggaagcagggaagctaaaggaaacctggaaaggcactctggagcagcaggatggtcacaataataagcccgacacacagcaggagcaggagccacacagc

SEQ ID NO: 13762 - DNA, 756 bp, Homo sapiens
ttttttttttttacactaaaaagagtaaattttattgtttataaattatgcttcaataaacctgcctttaaaaaattttttatcagtaattacaattttcaaaagtggagatacttggtaggcccctgctttcttggcccctaaggtccctctctctgttaaactgtagagctccttagaaccaaaaccaaaccacctttcattttaatgaaaatgaaatgcaaaaactggggctccaagcaaggaagaaacgtctacctgcagttcatctgggggttggtgggagaggtggtggagagagtaagggctaagcgcccccagcaggcccaagttctctgtaccacacttggaggcaggtatatgggactgaaagtggatgttctcagccacaagcctgggcctggataggaaacaaaggataagactggaaggatgtcaggtagggtagacccagagcaccagctgggctcacttttcacgccctccatccattcgtcatgagtatccggatacagcaccacacggttcaactcctgagcacagcagtaacctttacacagacagcctgatttcccagaatgaattctcgtgtttacttccagatttaatgactttgactttagtagtcatctgaactatttattttactttgccagtaatatttagaccttatatatctttcattatgccatcttatcttctaatgtcaagtgaacagttgctaaactgtcttctgcatttatcacattaaaaatc

SEQ ID NO: 13763 - DNA, 1452 bp, Homo sapiens
agatcatctccctttgtaaaaggtacccaggctttatgcgggtggcgctctcagagccccagccagagaggaggtttttccgtcgtggctgggtgaccttcgaccgcagtgttaacattaaagagatctgttggaacctgcagaacatccgtctccgggagtgtgagctgagccctggtgtgaacagggacctgacccggcgcgttcgcaacatcaacggcatcacccagcacaagcagattgtgcgcaacgacatcaagctggcggccaagctgatccacacgctggatgacaggacacagctttgggcctcagaaccagggacgcctccccttgcccacgagcctgccctcgcaaaacccgatcttgaagaatatcaccgactacctgatcgaggaagtaagcgccgaggaggaggagctgctggggagcagcgggggccgctcctcctgaggagcctcctaaggaagggaacccggcagagatcaacgtggagcgggatgagaagttgattaaggtcttggacaagctcctcctttacctgcgcatcgtgcattccttggattattacaacacctgtgagtaccccaacgaggacgagatgcccaatcgctgtgggatcatccacgttcgggggcccatgccacccaaccgcatcagtcacggggaagtgctggagtggcagaagacttttgaggagaagctcacgccgttgctgagtgtgcgggagtcactctcagaggaagaggcccagaagatggggcgcaaagacccagagcaggaagtggagaagttcgtcacctccaacacgcaggaactgggcaaggataagtggctgtgtcctctcagtggcaagaaattcaagggtcctgagtttgtgcgcaaacatatcttcaacaagcatgcagagaaaattgaggaagtgaaaaaggaagtcgcgttttttaacaacttcctcactgatgctaagcgcccagctctgcctgagatcaagccagcccagccacctggccccgcccagatactccccccaggtttgaccccaggactcccctacccacaccagactccccagggcctgatgccctatggtcagccccggcccccgatcttgggctatggagctggtgctgtccgccctgcagtccccacaggaggccctccatacccccatgccccgtatggtgctggtcgagggaactatgatgccttccgaggccagggaggttatcctgggaaacctcgcaacaggatggttcgtggagacccaagggccattgtggaatatcgggacctggatgccccagacgatgttgatttcttttgagccgtcccccgttcctcagtcctgtatcatccatacttgtactaccttgtcctatgaagctctgagaattttttgtacgatcagccttactgctaataaaagcacttccacagggaaaaaaaaaa

SEQ ID NO: 13764 - DNA, 1147 bp, Homo sapiens
tttttttttaagaatcacagcaatccaagcaaagtacctcactgagtaggtatcaagacccttcaggcagaattccatcattctcgcaattagtgacagggacgctggttgtggaggagtatttggagtggtggcagaaaattgcatcggcatttccagcttgagtaggtcttatcttcttagcggatgctcagaagccaaggtctggatgcagtcggtcagttgcaaataacagctcaggaatgttaagtggcttcaggagtcgtgtggacagcacgattacctggattcctggcttcaacgatgccacaagatctttgaccattttcacttcagagactgtgaccccacctaccacaaagaggatcaggagggggtagtcactaggatgaggcccgggttcaccttcatgaacatgctaaatccagttttaaggagatcagtgaggcctgaagacatgtgttcaatatcaacggaatctggcctctcgggatgaaatatttcctccacaacttgcttcaacaatggcttataagatgcctggtgggtatgatttccaggaacatatacagacttaaactgtttcaggagactccgagctccagcaatatcccgaagtgaagtaaagagttcatccacggcaattttggatttgtgaaatgtcagattaattgaagagtcccagtccgtaattttttgcagcaaaggtgacaatccagattcctcacagaagacctgagccaatgctttcttgactttttcttctgcttcacacaggtctttgtctaccgtgagctctccagtgacagaataaatatatatgagaaggatcagcagttcctcagggctgtagtcctcgttggttctctgggttacaggcttaatcatgggcagcagctgatttaacacaacggacattgctgactccccaatgctctgaagaaggagcctttcaaaagccagaaagttgtcccacttggcagtctgtgggtgtttcaacgtttgagctgtggccagtccaagctggaggaggccacaatgattcattagagctttgaggttgttcttgaagagctgaatataggacatgagctgtcccggtgtgactctccccatactcatcttgattggcaggttttctctgctc

SEQ ID NO: 13765 - DNA, 1969 bp, Homo sapiens
  misc_feature (1)...(1969): n = a,t,c or g
caacgtagaaaagttttaatgagacaaatgtcaaacaagcacatcaacttcttaaaaaacaaagaaaatctgaaagtttaattacaaaaacacttatacagaaaacttggcatttcaacagttccaaacacatgtacacaagttttttctaaaatcagtcagaaataaaataccttgtctccctttcctcagctgcttcttgtattttaattaaaaagaaacaaagaaatctgtaacactgaataggcaacaacttatttcttgagaacataaaagtacagtaatatctacaggtgtactgggaaaccatgagttaggtattgtgctaggcctgtaacttcatttactgcctcctcactggagcacagaggagagaggaggtggcacagacctggtctatagatactgacagttttgtggcatctgaatcccagccaccagaggcaggtgagtagctactgggaaagacagcatttcagaagccaagctgcttattttgtgaaaatgatttcatactgtaggctctcttgaaatctcatgcattcctgaatatgccaatggttcaagtcactgtcaagtgtcccatctagagtcagaagaatgatgatcctggaccatgttatggccttttctggtcacaaaagcagtgcctagcaatgcctgcacaaaactgaacacaaatgagaaacagaaatatgaggaggaaggaagacaggacacaaagcatctggcagaaggaaaaaacaaaactcccagaatgggctctggatgtccttctgccatagacagtgagttctagcttgggctttgcagacaaggagtctaagagaagtggcagaaatagcagatgatggcagggaaataggaaaatacagaagagcaagagaactggctaggtttatagcaatagataataatggggtcttattctaaaaaattgccaagtgatggtatgtgggtttcagcgcatggatatttgatatatgttcatataagacattttaaaaacagattttgttgctgttgttttcctttggactaataaagaaaacaggcaaggagatgctgagaagacaggatggtgtagcaacatgacaggtagttctgccctatgccctgacttatgggcatactatgagaggggccgcacttctatccacctgcctgcagtggtgtggggcccagacaacgggctctgcttgctctgcctttggttccaaagatctcagctgtaacctttagccttgtgctctgcagtgtcaaaacaaaaacaaaaacaaaaacaatgaacaaccaaaaaaccctgaggtaagaatcagaacctctctttccttttgctgttaaaggaaccagaaactgctaggcgtgatgnnnnnnnnnnnnnnnnnnnnnnnnnnnnnnnnnnnnnnnnnnnnnnnnnnnnnnnnnnnnnnnnnnnnnnnnnnnnnnnnnnnnnnnnnnnnnnnnnnnnnnnnnnnnnnnnnnnnnacaaacaaaaatgaaccagaaagtcctctttacttatgctgttaaagaaaaaatcactaaggagggggaaggaagggaagcctgtcttcctcacatggattcagcagttaatggctacagaaggaagacaaaggacatgagaattcttccttgctttttttgtgagctcaagtgactattttgaatgatatttccacctatctagatctatgaatcattactcctaaagaagacaggaattccctcagttttcacttacaataaacttagggctttgtactctttccctttctcctctgtttacaagtgaccttttcctcagcaaaaatgctccacaagacattgtcaacagatgggaacagaagagccttgctggggctgggactccatgtctgtgcaggagcaatgcttagaaaacagcaggcagtaccagtgaggaaggaaagagcattctcctttagggcagcaatcacctcgtgcc

SEQ ID NO: 13766 - DNA, 840 bp, Homo sapiens
gaattcccgctacagggggggcctgaggcactgcagaaagtgggcctgagcctcgaggatgacggtgctgcaggaacccgtccaggctgctatatggcaagcactaaaccactatgcttaccgagatgcggttttcctcgcagaacgcctttatgcagaagtacactcagaagaagccttgtttttactggcaacctgttattaccgctcaggaaaggcatataaagcatatagactcttgaaaggacacagttgtactacaccgcaatgcaaatacctgccttgcaaaatgttgtgttgatctcagcaagcttgcagaaggggaacaaatcttatctggtggagtgtttaataagcagaaaagccatgatgatattgttactgagtttggtgattcagcttgctttactctttcattgttgggacatgtatattgcaagacagatcggcttgccaaaggatcagaatgttaccaaaagagccttagtttaaatcctttcctctggtctccctttgaatcattatgtgaaataggtgaaaagccagatcctggaccaaacatttaaattcacatctttacagaactttagcaactgtctgcccaactcttgcacaacacaagtacctaatcatagtttatctcacagacagcctgagacagttcttacggaaacaccccaggacacaattgaattaaacagattggatttagaatcttccaattcaaagtactccttgaatacagattcctcagtgtcttatattgattcagctgtaatttcaccggatactgtcccactggggacagggaactttcctattttctaaaccggttcaaaa

SEQ ID NO: 13767 - DNA, 847 bp, Homo sapiens
aattcggcacgcgagtccatctggtagtaatgagactcctgagtgtcttcatgtcccgcaccaaatctggatccaagtcttccatatgtgagtcatcttccctcatctccagtgccacagcagcagctctactgagctctggggctgtggactactgcctgcacgtgctcaaatcactgctggaatattggaagagccaacagaatgacgaggagcctgtggctaccagccagttgctgaaaccacatactacctcctccccacctgacatgagcccattctttctccgccagtatgtgaaggccaaagagttctggaggacccagccacctgcttgactctagctttgtcacctataacaccctacacgcagccctgccagcctgcacatttcccaagggtcatgctgctgatgtgtttgaggcctatactcagcttctaacagaaatggtactgaggcttccttaccaaatcaaaaagattactgacacgaattctcgaatccgactcctgtctttgacactcgtggtttacttctctcgagtactcatgatccagagactcatttgtggcgtaagtcgcaactctgtctcactgtggatcaaagagtacgcagtcgggattgacactggctctagtcgtggatagagtgtacaacaggaatctcggagttgtcacaatagtcgctgattgcatatactatggcataactgagatgcagactcagagattgtaagccgcggattgccagaatcttgggggcgcagctttttcgagggtgctgtttttctctggggtgaactgaaaaattggtgtttggggagacctgtgctgtggcgcctacttc

SEQ ID NO: 13768 - DNA, 1731 bp, Homo sapiens
gtgccacagaacaaactggagttaagaaatgtcgttcttaagatttaaaaagaaaacctttactgaatcagctgagtgttaataatacgaatttccttttcttgtgttatccaagataaattctgtgggattataaacatttcagtagaaggcctgcatgatgtcatgacggaagatcctgaaacaggaacttataaagactgtatgttgatgtctcatcttgaggaaccaaaagtaacagaagatgaagaaccacccacagaacaagataagaggaaaaagatgctggccctgaaggaccctgttcatacagtgtcactgcagcagttcatctacgagaagctcaaggcacagcaggagatgctaggagaacaaggtttccagtccctcatggaaacagtggatacggagattgtcacccagctacaggagtttttgcaaggattctaagagcacatgacatgtggctgcctcccctttcagaaacaagctgagtaacccagcctgccgtttgtatgtgagagcctgctgagatgaagaaatcacttcatgaaaataagcaaagaccccacattttttactaccaaatgtaaaggataaatgtaaatcctgcataactaaaatcacaaacctattcctccaaaaaggattttattttatatttatgagggggggcccttcactaaaaagtacatgtaaaagtacatttgatgacaatagctgcttagtttcctgttaagagaagaaactttatcttttaattatgtgctcttaatatttgaagatgagagttaatacctgagatgtttttctgcaaccaaaattcattaaatttggctgccttatcctttttttaagctaatgaaactacaggtttgaaaaatgacaaagctgttcagatgatgctattaaagaaatgtgtgtactaagcaaaaatatataaatagtgacaaatacacattaccaagcttatcttgcaagggagttattttcatctaacatagaaagtgtgttttatcagacaaatgcttttattttcattctaataatttgatacagaaattagtaaaggcatttttttctttttttttccagtaaatacattgggtctataaatgtgcatttgtaagggccacaaaagtgaaacgtgtggtactgtagtaccacgtgggagacctctggttatggtttagtcctagttcctttgttactcctgtgagcaccgagaagaactgggcgactcccagttcccacctgtgctgtgacagttcccacgtggctatgacagactgtttagtacttacccttctcaggttcctcagtgcaggggtgcatcagggcctcaataataggggtatacctgggaggatccagcagtaatccccaggggtacctaggattactagtactctgatggaactagtcttccttccttattcctcgaacatgcagtacataaaaaggggaaaaggagaaaaaaaaagccttactttgttttacttgccatttattgtaaggaaactttaaagcattttttaggaaatactcaaaagcaaggttggaaaatgttttatctttctatagaaagttgggtacagtatgtaactgcgggaaacccactgcccctttgtaagctgtggaacccaaactgtatggggatatttgatgttttcagaaagaggaagaaaatatggtccaaattaaattttccaaagatacctcaaaaaaaaa

SEQ ID NO: 13769 - DNA, 1059 bp, Homo sapiens
ttctctgggaaaactggagatgagaatctgcccagtgctctgctgtccagtcaccgccttttgaattttagttttggcaccaggagtaccgttagctttccccttcttctggcccatttgactcatcagcacaatagggtcaccaccttaacttttaatttctaatctgctttactgtctttagggtgtgtatgaaataaacattgacaggctttctgggagccctcaaggtgcctactttgctgggttccctttccagcagctcccccacctcccttagcccccctcctctggcagcctctcctgcctctgctgagctcccctccacgtgttccacccccttaccctgctgttgtttacatccaacctgcctgagaatttcctctggggaggaatctattcctgtcatggtctagtgcctgggagggagagaactttctgggggtagggtgccctccatctgaaacaggccaggtgagcatcatgcataaggcctccattctgtccgctcagattctgggtggggccacaggcaaatctcctgacttatggggagttggcttgtggttcctcccttggatagcctccatggaaccactataggctttcccaacagctgcctctgaaatagctgctgcttcgagatcctccctttttaaagcactttctaaagccctcaggatggcgggagcgaacagcactggtatattctaggagtaagtgcaggaattcagcagtgagagcatgtctgggaccacctggactgccatccatttaacctcaaatctctttgggatactcgccctccctgggaaccagagttctggctctaacattgagcagctatgcactagttccagagaagccactaacaggctgccatgtgtagatgtaggttcttaagagatcacaggctgggtcatctgatcactggatggatagctcagcctggggcatttagtgttttccctggtgataaatccccaaggcagctggatttggagctggtggcaagttgaaattattaaaaattgatttgtgtgggactgtcaaaaaaaa

SEQ ID NO: 13770 - DNA, 1084 bp, Homo sapiens
gcccgtggtgctccgtcgcccccgccacctcacgtcctcccgtgcgtcgggagcgtctcggctacaacatgttgggcatgatcaagaactcgctgttcggaagcgtagagacgtggccttggcaggtcctaagcaaaggggacaaggaagaagttgcctatgaagaaagggcctgtgaaggcgggcaaatttgccacagtagaagtgacagataagcctgtggatgaggctctacgggaagcaatgcccaaggtcgcaaagtatgcggggggcaccaatgacaagggaattgggatggggatgacagtccctatttcctttgctgtgttccccaatgaagatggctctctgcagaagaaattaaaagtctggttccggattccaaaccaatttcaaagcgacccaccagctcccagttgacaaaagcgttaagattgaggaacgggaaggcatcactgtctattccatgcagtttggtggttatgccaaggaagcagactacgtaggcacaagccacccgtctgcgtgctgccctggagggcacagccacctaccggggggacatctacttctgcacgggttatgaccctcccatgaagccctacggacggcgcaatgagatctggctgttgaagacatgagtgacccactgaaccaagaacttactggaagtgtgcctctgtgtctccttcctcgggggtaaggaggggacagtgcttcccaagttccagctgcaagtccaacttaaccaactttccttcaaagtcagttactgccaattttctgaaaaaagcatgttccatatactaagtctcttttctcacggtaggaaataatacagccaagatatgcagcatccttctcattgatgtagaaaattctgcgatagaccagaaaaatcctggcagcttttctcccaggcatctgggtcactaaaaactgattttctaaaattattggatttgtattttgttattaagggggaaaatgtgatttgtgcctgatctttcatctgtgattcttataagagctttgtcttcagaaaaactaaaaataaaaggcattgacttaaacagctgagaca

SEQ ID NO: 13771 - DNA, 460 bp, Homo sapiens
ggggaaaagaatggaactgtcccagctactcaatgagatcagggcaaactatgaaaagatcctcaccagaaatcagatagagacggtgctctcaacaaggatccagctagaagaagacataagcaaaaaaatggacaaagatgaagaggctttgaaggcagctcaagcagaactcaaggaggcccgacgccagtggcaccacctgcaagtggaaattgaatctctccatgctgtggaaaggggccttgaaaactccctacatgccagcgagcagcattaccagatgcagctgcaagacctagagactgtgattgaaggactagaaaaagagctacaggaagtaaggcgcggcatcgaaaagcagcttcaagagcacgagatgcttctcaacacgaagatgaggctggaacaagaaaatagcaacttattcgccacctcctaaaaaaagaagaaatcagat

SEQ ID NO: 13772 - DNA, 563 bp, Homo sapiens
ggcgctgctgtggttggtcagtccagtaagaagccagcagggctgggtgctggggcttcttctcctgaaggggctgcaagagggaaggcttagccatgtcgtccttgatcagaagggtgatcagcaccgcgaaagccccagggccattggaccctacagtcaagctgtattagtcgacaggaccatttacatttcaggacagataggcatggacccttcaagtggacagcttgtgtcaggaggggtagcagaagaagctaaacaagctcttaaaaacatgggtgaaattctgaaagctgcaggctgtgacttcactaacgtggtgaaaacaactgttcttctggctgacataaatgacttcaatactgtcaatgaaatctacaaacagtatttcaagagtaattttcctgctagagctgcttaccaagttgctgctttacccaaaggcagccgaattgaaattgaagcagtagctatccaaggaccactgacaacggcatcactataagtgggcccagtgctgtgtagtctggaattgttaacattttaatttttacaattga

SEQ ID NO: 13773 - DNA, 1159 bp, Homo sapiens
gaactcatgagccaacagctgaagaaacccattgctacagcttccagttgaatgccggggagaaacctgtccaattttagcaggtttgaagggaggatcttcttcagttgtagtttggaaggttccttggtgtggctcatgaaatcacagagctcagagataccatcttgagaaatcctccttggtatcatgaaactggagcagaggaattgcaatttagcaggaggtcctctactggtgataccctcaccttggggtaatggtcctaacccagacccagggtctggaagcttaatgttgagttggtgactccagcctctttctcctgggaggtcacaagatgatgattgcgtagatgttgcctgggtgcaaagtgccccaaacagcaatagaaaggcatatgtataaccaaactccaagtgataaccagacccatctctcctccaccttgacaaaagcagattatagtatacaaggtaggaattcctgtcctatttgagatgaactatatcctgtacctctgtgctctgtgtctgcatgaaggctcagcctttagaggcactccttctagttgcattagtactgtctttctgtggagtttggtttgaagactggctcagcaagtggaggtttcaatgtatttttcagttggctcatcagccagcattggtgaatattcagtttaggggaacagttctagggagtgagacatttttgggagcagaggaaaactctgctgatgttcggtcctggcaaacattgagttattttgagctgtgaaggcagtcgtctctgtttacacagtggcagctcttgagttatgcactgtgaagaatgagaagggaaaagcaaaaattatccttgtgaaatatctgctgattgtgccctactctttgcacctgacttttcctagttgtcctggtgctaacacaggagctacaccttgatcctctcctggcatgaaaataaaacaaaggttttcgttgttgttgttccattgcccatttcccccatgttgtctttcccttgggctgatgcctcctctgggtcacattgcttcttatcctgaacacttgacaccttgagggtagaatttagcgtttggtttttacctcctagcatatgctgtttggtatgtgagggtttcagtacaaatgct

SEQ ID NO: 13774 - DNA, 972 bp, Homo sapiens
  misc_feature (1)...(972): n = a,t,c or g
ccgtgaggggccggggcattcagctcagctctgaaccggggaagctggcacggcaaggactgcctcaggtgacgggccgtgagaggggacgggtcaggagccttcccaagccttctcctcagcccgacacccatggccatcggaggctaggatgccagacacagccatttgcagaaatcaggcacagtgactgcagctcacgtccagccaaccaagcatggggccgcagctcaggaagtcccttcccgccacaccacagcctaattcttactgggacggaggcaactcggctacgctgggcaggacgacaaacacgagacgccactgtggaatgagcaacttcggagcacggggtgacttgcttgggaccgtgcccacgtgacagccccttatgcagaggaggaaagagaagccccgagtgggaggggaacctgtccaaagtcacacggtgtgtgggttgacacagctggggtgagtcgaggctggcccctgaaggcccaatgctccctgaacgctggagaccactgtcggcttagcagcggctctcagggaaggcctggtctccaccctcccagcctagcctcgcggaccctcgtcctccccacatcggacctgctcacctgcctggaccctgggctgccagatgcaggaagcatcaaaccccccagcctcgtgggtgcggggcagggcgcaggcagcacagcttagatgccctggtttgtccctcttgtctcctgggaagagcttgctcccgcccagctctcctgccactggcctttcagggttgggctgggcccagagtgccttttagtcgcttctttctcacggtggcctgatggctcaacccagtcccaaacgggcccagtgacactgccgactgcgccccagctcaggcccccactgcaccagcaatgctagaaaaccaagccaataaaagtgatttcttttttcattaaaaaaantaantatagt

SEQ ID NO: 13775 - DNA, 500 bp, Homo sapiens
ccctggctggcctgcacctatcgccagtcctgctcgggacatttgccctcagtggtggggttactgctgtttcggaggtattcctctgctgtgagcagggctggccagccagactggcacacattgctgtgggggccttctgtctgggagcaactctcgggacagcattcctcacagagaccaagctgatccatttcctcaggactcagttaggtgtgcccagacgcactgacaaaatgacgtgacttcagggaagcctggacacccgaggcacctggaccagctatgggtagttctgtgggtggaacacattctgtgtaagagccccactgagggctctgcagcggagtgacagcaaccccagagatgaggcaccagagagtgccactgcatgagacacctgtgaccattcgaagtctgaaatgcggggggggagtttcatttttaagtgaagaccaaaagccctttaaaaataatagttttttatcattttatagtaa

SEQ ID NO: 13776 - DNA, 3383 bp, Homo sapiens
gtccccgacgtcaccgcgacccccgcgaggctgcttttcttcgcgcccacccgccgcgcgcgcacgctatgaggagatggaagccccggccgctgacgcccatcatgtcgcccgaagaggagctggacgggtacgagccggagcctctcgggaagcggcccggctgtcctgccgctgctggagttggtcggggaatctggtaataacaccagtacggacgggtcactaccctcgacgccgccgccagcagaggaggaggaggacgagttgtaccggcagtcgctggagattatctctcggtaccttcgggagcaggccacctggcgcccaaaggacacaaagccaatgggcaaggtctggggccaccagcaggaaggcgctggagaccttacgacgggttggggatggcgtgcagcgcaaccacgagacggccttccaaggatgggtttgtggagttcttccatgtagaggacctagaaggtggcatcaggaatgtgctgctggcttttgcaggtgttgctggagtaggagctggtttggcatatctaataagatagccttactgtaagtgcaatagttgacttttaaccaaccaccaccaccaccaaaaccagtttatgcagttggactccaagctgtaacttcctagagttgcaccctagcaacctagccagaaaagcaagtggcaagaggattatggctaacaagaataaatacatgggaagagtgctccccattgattgaagagtcactgtctgaaagaagcaaagttcagtttcagcaacaaacaaactttgtttgggaagctatggaggaggacttttagatttagtgaagatggtagggtggaaagacttaatttccttgttgagaacaggaaagtggccagtagccaggcaagtcatagaattgattacccgccgaattcattaatttactgtagtgttaagagaagcactaagaatgccagtgacctgtgtaaaagttacaagtaatagaactatgactgtaagcctcagtactgtacaagggaagcttttcctctctctaattagctttcccagtatacttcttagaaagtccaagtgttcaggacttttatacctgttatactttggcttggtttccatgattcttactttattagcctagtttatcaccaataatacttgacggaaggctcagtaattagttatgaatatggatatcctcaattcttaagacagcttgtaaatgtatttgtaaaaattgtatatatttttacagaaagtctatttctttgaaacgaaggaagtatcgaatttacattagtttttttcatacccttttgaactttgcaacttccgtaattaggaacctgtttcttacagcttttctatgctaaactttgttctgttcagttctagagtgtatacagaacgaattgatgtgtaactgtatgcagactggttgtagtggaacaaatctgataactatgcaggtttaaattttcttatctgattttggtaagtattccttagataggtttttctttgaaaacctgggattgagaggttgatgaatggaaattctttcacttcattatatgcaagttttcaataattaggtctaagtggagttttaaggttactgatgacttacaaataatgggctctgattgggcaatactcatttgagttccttccatttgacctaatttaactggtgaaatttaaagtgaattcatgggctcatctttaaagcttttactaaaagattttcagctgaatggaactcattagctgtgtgcatataaaaagatcacatcaggtggatggagagacatttgatcccttgtttgcttaataaattataaaatgatggcttggaaaagcaggctagtctaaccatggtgctattattaggcttgcttgttacacacacaggtctaagcctagtatgtcaataaagcaaatacttactgttttgtttctattaatgattcccaaaccttgttgcaagtttttgcattggcatctttggatttcagtcttgatgtttgttctatcagacttaaccttttatttcctgtccttccttgaaattgctgattgttctgctccctctacagatatttatatcaattcctacagctttcccctgccatccctgaactctttctagcccttttagattttggcactgtgaaacccctgctggaaacctgagtgaccctccctccccaccaagagtccacagacctttcatctttcacgaacttgatcctgttagcaggtggtaataccatgggtgctgtgacactaacagtcattgagaggtgggaggaagtcccttttccttggactggtatcttttcaactattgttttatcctgtctttgggggcaatgtgtcaaaagtcccctcaggaattttcagaggaaagaacattttatgaggctttctctaaagtttcctttgtataggagtatgctcacttaaatttacagaaagaggtgagctgtgttaaacctcagagtttaaaagctactgataaactgaagaaagtgtctatattggaactagggtcatttgaaagcttcagtctcggaacatgacctttagtctgtggactccatttaaaaataggtatgaataagatgactaagaatgtaatggggaagaactgccctgcctgcccatctcagagccataaggtcatctttgctagagctatttttacctatgtatttatcgttcttgatcataagccgcttatttatatcatgtatctctaaggacctaaaagcactttatgtagtttttaattaatcttaagatctggttacggtaactaaaaaagcctgtctgccaaatccagtggaaacaagtgcatagatgtgaattggtttttaggggccccacttcccaattcattaggtatgactgtggaaatacagacaaggatcttagttgatattttgggcttggggcagtgagggcttaggacaccccaagtggtttgggaaaggaggaggggagtggtgggtttatagggggaggaggaggcaggtggtctaagtgctgactggctacgtagttcgggcaaatcctccaaaagggaaagggaggatttgcttagaaggatggcgctcccagtgactactttttgacttctgttttgtcttacgcttctctcagggaaaaacatgcagtcctctagtgtttcatgtacattctgtggggggtgaacaccttggttctggttaaacagctgtacttttgatagctgtgccaggaagggttaggaccaactacaaattaatgttggttgtcaaatgtagtgtgtttccctaactttctgtttttcctgagaaaaaaaaataaatcttttattcaaataaa

SEQ ID NO: 13777 - DNA, 1558 bp, Homo sapiens
ttttttttttttttttttgaaagctataattatttatttccaaagagtttaaagattaaacttccctcaaaacaaacaaaaggcaaggtaacatcccaagctgtgaggggctgagtctctcctaggtgcagggcagcacaggaactggctgcacaaggccagagaggttacgtggcggctctcttcaaattagaccacacagagcgcttcattccctgtgcagtcttcacatcttcccagtccagtttgacgtctggaacctcatcttctggctctggatccttcctcaagggcccccggggggacgcaaccacaatgggcagagggccacattcctcccggatttccacaacatggaggcccttcttatcagccagctgttgatgggtttcctgtctggagagcccacggaagaggccctgggtgaggctgagcatattaatggacccagagaccttggcatacatgtctttgatgccaatgagccggcagatggtgatgatggccctgtggcagcggaggccgtaacctttgggttgtttcttcatcttgatatgcgtccttttaaatcttaatgaaatatcatggaatattgtatggtcttcatatcgttctatataatgcaaatggtgaactgctctgttctttgctttcctgaaagcatccatccgatcagtagctttcccgaatagaaaaacctgcagctccttttccgttccccacagccaccaagacacggatcgatttctttcttccctctttcgcagtcatagtgaaaacgtttcttacctcaagtatcctggtatcaaaatcctcatatgtttctccacagggaccagggtcaggggggccaagactgatgcctccccatgagtttccaactccaatcctcggttcccggttaaccttcatcttcttctttcggtcccactcttatctctgctggatcatgtctgcctccaaccttctcctgctcttcccttgcttctttgggcaatggtctggcactgctccatttttcattaaggagggacattcagtccgggccatagaaaaccataacgcccttcacccaatgatctgacccctgttcagatcctttcttttcttctttttagttcttttgcctcttcctttttttgctccagcaccagtctctgctaaagcgcctttccacagctcatctgcagtcaatttagtgaagaaactatatggtctatactgctggctcatcaggtgactgggagaagaaatacagcattgtgtctgcagtgcacggctcaagctggcgtagggatgggtgtctctggttcccagtgatgacaaatggccattgccgagaacactcttccatgccaaaatggaagctgctggtaaggtgtttagggaacactgcctccccaataaatgacctgccgtcccgctacacagcacggggaggcagcccacagcgcgcaccgggtttcgccatgctggagtccgagccgcgcctcggccttccggcccagggcagccttgcccaccgcctaccgcgactgctcctcgtcaaacggcaagc

SEQ ID NO: 13778 - DNA, 1031 bp, Homo sapiens
gcgagggtgacaggaaaccctgtgcagggagcgccgccatcttggaccagcccgaggaagatactgagggagcacaggagcagtcaccgctgccactgctactgccgctactgctgccggcgcgtctgcacctctcggcctgccagtgtacctgccggcgcctcggtcgaccgcccccgccccctctcccgctgcgtccgcactcctgttcctggtcctgacgcccccctcccgcccggaaagctgcccagccaccagcaaccccccagtgccaccatggcaactgcaccatacaactactcttacatctttaaatatattattattggggacatgggagtaggaaaatcttgcttgcttcatcaatttacagaaaaaaaatttatggctgattgtcctcacacaattggtgttgaatttggtacaagaataatcgaagttagtggccaaaaaataaaactgcagatttgggatacggcaggacaggagcgatttagggctgttacacggagctactacagaggagctgcgggagctcttatggtctatgatatcactagaagaagtacatataaccacttaagcagctggttgacagatgcaaggaatctcaccaatccaaatactgtaataattctcataggaaataaagcagatttggaggcacagagagatgttacatatgaagaagccaaacagtttgctgaagaaaatggcttattgttcctcgaagcgagtgcaaaaacgggagagaatgtagaagatgccttccttgaggctgccaagaaaatctatcagaacattcaggatggaagcttggatctgaatgctgctgagtctggtgtacaacacaaaccttcagccccgcagggaggccggctaaccagtgaaccccaaccccagagagaaggctgtggctgctagtgacctctttgctgtggcccctcatttgacctttcacctctgtctgttggaagcagtactttttactgcctcattgtcttctgtacatcttactgggtttaattaaa

SEQ ID NO: 13779 - DNA, 1072 bp, Homo sapiens
ttattttttattttgctatagctgcaatgttcacagtaatccaagttccaatggcagggtggcagagtggaaccaaaagaggccaagttttgttggtgaagtataattattttttaagatcagggattcagaattgtagtatcagtgttcagttaggaagttcttatgatagtgcatggcacatgtcctttccatcatctgcattttctgctttttttgtctggctcacttctactcactctctaatcctcaccttagtggtcacttctccccggaatgtccctgaccccttatgatagcagtagtgcaaacaccaaaggctgaacttacaaccagactcgcaggcaacaccttgccttgtgccatgcttcaatcatgaagaggatgtgagaaagagtaggagaaaggagacacaaaaaatggcatttccatagcagagacccccaagggccagtccatttgattctctggatttcttttctgtacaacagtgatggaaggtagcctgggaaagccattcgtctcaggcttcaccttggatacctttctactcactgaactgattccattctttagtgtaccattgcctcataaatccagaaatagcagggacattcatttttgataaagtatccatacagattaggtttattctattgaaaattttattaaaatccttcatttatcttccagatagtagattctattaaccaagttgcataaagagttctgattcccagaggtaagaactgagcctggctttctagttacatgtttactggtaaccccgtctttccctataacacttaagcatatttaaagaatataccctcccctgcctccagccaggattgtaagctcctcaagagcatggctgtgtcttttaacatcaaggctccaggtgagaagagttcctgctgtattataagtgcccaatatgcatttgtaagtgaagaaatctattctgtggtgtctgctttaatattaagagatggcttggcagagattactaagcagcttcattgtctaaaatggaactagattctgtgggtagcaagtccctgtgccgaat

SEQ ID NO: 13780 - DNA, 3837 bp, Homo sapiens
ggcggcggtagcggcagtggcggcgcgtaggaggcggtcttgggcgtctttggtactggcttttttaggggtctgcctggggattacccttgctgtggatagaagcaactttaagacctgtgaagagagttctttctgcaagcgacagagaagcatacggccaggcctctctccataccgagccttgctggactctctacagcttggtcctgattccctcacggtccatctgatccatgaggtcaccaaggtgttgctggtgctagagcttcaggggcttcaaaagaacatgactcggttcaggattgatgagctggagcctcggcgaccccgataccgtgtaccagatgttttggtggctgatccaccaatagcccggctttctgtctctggtcgtgatgagaacagtgtggagttaaccatggctgagggaccctacaagatcatcttgacagcacggccattccgccttgacctactagaggaccgaagtcttttgcttagtgtcaatgcccgaggactcttggagtttgagcatcagagggcccctagggtctcgcaaggatcaaaagacccagctgagggcgatggggcccagcctgaggaaacacccagggatggcgacaagccagaggagactcaggggaaggcagagaaagatgagccaggagcctgggaggagacattcaaaactcactctgacagcaagccgtatggccccatgtctgtgggtttggacttctctctgccaggcatggagcatgtctatgggatccctgagcatgcagacaacctgaggctgaaggtcactgagggtggggagccatatcgcctctacaatttggatgtgttccagtatgagctgtacaacccaatggccttgtatgggtctgtgcctgtgctcctggcacacaaccctcatcgcgacttgggcatcttctggctcaatgctgcagagacctgggttgatatatcttccaacactgccgggaagaccctgtttgggaagatgatggactacctgcagggctctggggagaccccacagacagatgttcgctggatgtcagagactggcatcattgacgtcttcctgctgctggggccctccatctctgatgttttccggcaatatgctagtctcacaggaacccaggcgttgcccccactcttctccctcggctaccaccagagccgttggaactaccgggacgaggctgatgtgctggaagtggatcagggctttgatgatcacaacctgccctgtgatgtcatctggctagacattgaacatgctgatggcaagcggtatttcacctgggaccccagtcgcttccctcagccccgcaccatgcttgagcgcttggcttctaagaggcggaagctggtggccatcgtagacccccacatcaaggtggactccggctaccgagttcacgaggagctgcggaacctggggctgtatgttaaaacccgggatggctctgactatgagggctggtgctggccaggctcagctggttaccctgacttcactaatcccacgatgagggcctggtgggctaacatgttcagctatgacaattatgagggctcagctcccaacctctttgtctggaatgacatgaacgaaccatctgtgttcaatggtcctgaggtcaccatgctcaaggatgcccagcattatgggggctgggagcaccgggatgtgcataacatctatggcctttatgtgcacatggcgactgctgatgggctgagacagcgctctgggggcatggaacgcccctttgtcctggccagggccttcttcgctggctcccagcgctttggagccgtgtggacaggggacaacactgccgagtgggaccatttgaagatctctattcctatgtgtctcagcttggggctggtgggactttccttctgtggggcggatgtgggtggcttcttcaaaaacccagagccagagctgcttgtgcgctggtaccagatgggtgcttaccagccattcttccgggcacatgcccacttggacactgggcgacgagagccatggctgttaccatctcagcacaatgatataatccgagatgccttgggccagcgatattctttgctgcccttctggtacaccctcttatatcaggcccatcgggaaggcattcctgtcatgaggcccctgtgggtgcagtaccctcaggatgtgactaccttcaatatagatgatcagtacttgcttggggatgcgttgctggttcaccctgtatcagactctgggagcccatgggtgtccaggtctatctgcctggccaaggggaggtgtggtatgacattcaaagctaccagaagcatcatggtccccagaccctgtacctgcctgtaactctaagcagtatccctgtgttccagcgtggagggacaatcgtgcctcgatggatgcgagtgcggcggtcttcagaatgtatgaaggatgaccccatcactctctttgttgcacttagccctcagggtacagctcaaggagagctctttctggatgatgggcacacgttcaactatcagactcgccaagagttcctgctgcgtcgattctcattctctgggcaacacccttgtctccagctcagcagaccctgaaggacactttgagacaccaatctggattgagcgggtggtgataataggggctggaaagccagcagctgtggtactccagacaaaaggatctccagaaagccgcctgtccttccagcatgaccctgagacctctgtgttggtcctgcgcaagcctggcatcaatgtggcatctgattggagtattcacctgcgataacccaagggatgttctgggttagggggagggaaggggagcattagtgctgagagatattctttcttctgccttggagttcggccctccccagacttcacttatgctagtctaagacccagattctgccaacatttgggcaggatgagagggctgaccctgggctccaaattcctcttgtgatctcctcacctctcccactccattgataccaactctttcccttcattcccccaacatcctgttgctctaactggagcacattcacttacgaacaccaggaaaccacagggcccttgtcgccccttctctttcccttatttaggagccctgaactcccccagagtctatccattcatgcctcttgtatgttgatgccacttcttggaagaagatgagggcaatgagttagggctccttttccccttccctcccaccagattgctctcccacctttcatttcttcctccaggctttactcccctttttatgccccaccgatacactgggaccaccccttaccccggacaggatgaatggatcaaaggagtgaggttgctaaagaacatcctttttccctctcattctacccttttcctctccccgattccttgtagagctgctgcaattcttagaggggcagttctacctcctctgtccctcggcagaaaagacgtttccacacctcttaggggatgcgcattaaacttcttttgccccccttcttgtcccctttgaggggcacttaagatggagaaatcagttgtggtttcagtgaatcatggtcacctgtatttattgctaggagaagcctgagggtggggggagatgatcatgtgtgctcggggttggctggaagccctgggtggggggttgggggaggactaatggggagtcggggaatatttgtgggtattttttttacttcctcttggttcccagctgtgacacgttttgatcaaaggagaaacaataaagggataaaccataaataaaaaaaaaaa

SEQ ID NO: 13781 - DNA, 561 bp, Homo sapiens
cggaccagaccagccacatccaggggtcctcatttctccggctctggctcttgtttggggttctctcaccctctttctctttccttccctcccccattctccagatctccctctgtctccttttctctgtctttcttggcccctgtctctctccatgttgggggtcctaactcccccaccccatatctacgtgtcctccgggcattgccctctccatggctctggtcaccctgaccctctgccctgcccaccgcaggtcccccggggtcccggaagccccttctggctgcacctgccatgtttacagagggcccctgggctgcgcggccccagcctgggcaccctgatttttaagccatagacctggggtcagggcaggaaggaacttcactctgctgcttccgagaacctcggccgtgacattccggggccgggcgggacccgccccacagactccaacttcccctccaaaccccgaagtgaaacccgccaccgggttacccccacaagggggccgctgcgagaagttcacccacccccgaaaaaataattaaactcgca

SEQ ID NO: 13782 - DNA, 369 bp, Homo sapiens
aaatagtaaagctaaaacattttgagaaatttcaggatacagcagaagcattagcagcattcacagctctgatggagggtaaaatcaataagcagctgaaaaaagttctgaagaaaatagtaaaagaagcccatgaaccgctggcagtagctgatgctaaactaggaggggtcataaaggaaaagctgaatctcagttgtatccatagtcctgttgttaatgaacttatgagaggaattcgttcacaaatggatggattaatccctggggtagaaccacgtgaaatggcagctatgtgtcttggattggctcacagcctgtctcgatatagattgaagtttagcgctgataaagtagacacaatgattg

SEQ ID NO: 13783 - DNA, 1516 bp, Homo sapiens
ccctcccccggtccggcaagggctttgcaggcaaggtctcgttaaacttgaccatcttcccaactttgtacctttacccatttgctttgttaggaaagcccattattttaaccaaaatataacatagagattctttcttagcactgaaaatgctatgctaaaagaaattttaaagaaagattatattcaaatagatgctatatatgaaattactttttttggctttttggtttcacctaacacacttcatcttcaacaacaacaaaaaagcttatttttgaactgacagctttcaacataatacatttcatttacaaaatagttcacaatatttatttaacaagcgttgcattgaaaacaactttatgcacagtgaagcaaccaacaataagcaaacagaaaggggtggtaaaaacagtacgttcacttttcatttccttccttggtttggattacacatattcttccatccttgcatttttggagctacattattagtccatccaataccaaagtgagcagatacttgatcccatttctggaaaggaaatgtccatcttggtgtaggagttcttgaggcagctggatttactgcaaattaagtaaacctttaaaaacggcattgtcacaggctatgtgttctctgacatgccaggctggacaggtgagaagagcctccaaaagacaaaacttcttcctggtttaaagaaacagcacactaggccagataaacacaaaaggaaacaaatcacaggcgctaatagggagtcgggagctgttcttttctctgacctatacacatggctctctctcaccagacattcaaatttttaggccgcacatccacaaagagagacatatatttcactgtgtgttcaactacatatgcacaagactatagtacacacaaaatagaaataaattatataagtcttaaagtaaatggctagaagttgtcttgagtacagcctgttctatatgaataggtgccaggtgctggcacttccaactaagctaccaaccctgaagtaagcaagaaaagaatataaatatttaagaaaataaatcaaagtgtatttcaaataaggctcttccaaacaaaaatctgtgttataaattaacagcaggttattgttatggcagagtcagagacctccagactctttaaaatagtagacgactcatttgtcaagagttagggtaagaaagcagatcaccagctgctcctgtgttcacaagtgctcccctagttttctttcagaaaactttgaaacaactaagcaggcggagctctggtttctgataggtgagtgccaggcttaatctgcaaactgaacaatgtttcctgggaagttgcaattaatttttcaaacccagggcttaagtgagggagactgagccaagatggtagtaggaggagttccttagaaaactgagtggcagtgcagcggctgttgcagctctgacagaattcacaaggaagctgctacagcaaacccatcaggtcctcgtgcca

SEQ ID NO: 13784 - DNA, 1529 bp, Homo sapiens
tttaatgtaaagtaagtttattaaattaaataagatcttgaaaatatgtatgatgggtcctgggcaggatgttctttttcatcaacgtaatctttctttaggagaggagtactcatttgcttgcaaaggccataatctgttctttgagtggagacactgcatttgtggcctgcaagccccacgtcctgagcaacacaagcggggaggcactggtagaatagagcctttttagtaagtctgtagcagccagaagagcagtgttgtgacgctgtctttctgtttcataacctgtgaggtggctcacggaacctaagtccttcccattgaaggctgccgtactgaggtgatgggccaagctggagatatccccaaagcccatgttgacaccctgtcctgcaagcggatggactctgtgggctgcatccccaatgagcgccacccgaggcctgacgtactcagcagcatgtcccaacccaagaggaaacagaactcggcttttggcatccacccctggctacgcttgggggcagctggcgagccgagaccttagtgggcttcagaaggctgacagcatactgcagcatgggcaccagctgtgtcgatgaagtccgtgtggtcagcatcactccaaaaggcagagttaacggcatccacaaatttttcctcatccatgctaactagctctgctgcatgttcatgggacgtggaccaaaccaaggaactcaaggtgtctgagagcgggagcagagcaataggcccagagggaagaaatctctgccaggctacgttgttttctgtggcctctgataaatgcagagtagccacaacagcagactggtcatagttccagctcacattctggattccaacagcctgccgtactccggagttgtgaccatctgcacctatcaacaatttggtctggaaggtgctgccatcacctagggtaatatgaacccaagggctggagtcggccataggaaatggacaaggccaggtatagcgaatggctttgctcctgtagagaaccgtcactcggtcagacacagcctccaactgcttagtgagagcatgcatgatgacatcattctccacgatatagcccatgtcatctaaattatccttatcaaacattatcagggcctctgagcaggcgtcccacacctgcattcgccgaaaggctctgtatctcatgttgcagatatggtcccaggcaccaaaactactgagaagcgttgcagagcccaggggaaatggagctgaccctgttgctgtaagtttctgacaatttctccagtactttctttggacctgcttcgagcaacaggattttcttgtcatgaaagtgaatatcatatcccaaggcacaggccatggcagcgcccaccaggcctccacccgacaccaccacgtcatacacggtgtctgttgaggcgccggaccacctgcgccaggacaccagcgggccgctgtggggagctgcacgcacagccccgcatcggctgacaagccgggccgccatggtgcag

SEQ ID NO: 13785 - DNA, 1237 bp, Homo sapiens
ttttttttttttttttcaaagctttgcttttcttcatttggcttgcgtcagaaacacaaggctcggcacagcgaaggcttgcacccgcctcccgggacccctcaggccgccacctctgctgccaggcagtccaggtcctcagcttcccggggcccttgttccgtgaactctgtgctcagctgccacaccttcactgtgccctgggcatcgcccgcagccaagagctgagtctgctggctgttgaactccagacagtagacagggctttcatcctgggtttgcttgatcaaaactgtgggtttctgggagcttttctggagatcaaacagctgcacgtcacctttcccagaggcagctgcaaaaaccaagggccgcactggggaccagcgcacagcaaacagatacttgagggagagctgcagcgaagtcaagggaggggcctgcagcatggagtacaggtggacatgcccgtcagtcccagcgctcaggaagagattcctgtggaagggggaacagctcacagagtagatgggaccgccgtggggggagaaggtaaactgtgctggggcccgcaggggcacggagctgggcatccgcgtgagggctgcctctccagctgccagggaacacttggagcgggaagccgccttccgtgcccagaatgaacagcctagggtcaaagctggagaaggccactgccgtggcgcccacctcggtctccccgcggggatgcttcttgagcttggtgctccgtggcagctgctgcatgaccagggcgaagccctctgtgagctgcagctggcctaccccgatgccctgccagagtagcaccttcccgtcggtggccacactcagcacctggaagcggtggctgtgcccaggctcgggcagccacaccacctgggacacagggtctgtgtgggtgtcatccgtcaggcctgtgcgccacagcagcgggtcctcaagacggctcaggtcccacaccaacacctcaccactgtacagccctcctgcgacgtgggagggctgcgtggggtggaaggccagacacaggacagcgctggggacctccaccacggccgacggttgctggggacgcaggtctcgccggtccaggttccaggcacacacgaaggacttaagcgtgctccagtccccatggtccagccggccgtaggcacaggccaccacagagccagtggagttccaggagatgctggtcacatgcagaccctgc

SEQ ID NO: 13786 - DNA, 1625 bp, Homo sapiens
gcgctgcggccccgcttcctggcggccgggtcccaggcagttcaattaacctccagaagatggctgaacctgcaggaataccagagcaagaaactgatgtctgacaacggagtgagagttcaaagattctttgtagcagacactgcaaatgaagctctcgaggctgctaagagactaaatgcaaaagaaattgttttaaaagcccagatcttagctggaggaagaggaaaaggtgtcttcaatagtggtttgaaaggaggtgttcatttaacaaaagaccctaatgttgtgggacagctggctaaacagatgattgggtacaatctagcgacaaaacaaactccaaaagaaggtgtgaaagttaacaaggtgatggttgctgaagccttggatatttccagagaaacctacctggcaattctgatggaccggtcctgcaatggcccccgtgctggtggggcagcccccaggggcgttcagacattgaagaggtggctgcttcaaacccggagctcatttttaaggagcaaattgacatttttgaaggaataaaggacagccaagctcagcggaatggcccgaaaatctaggcttcgttgggcctttgaaaagccaggctgcagattcaaattacgaagctgtataatctcttcctgaaaattgatgctactcaggtggaagtgaatccctttggtgaaactccagaaggacaagttgtctgttttgatgccaagataaactttgatgacaacgcagaattccgacaaaaagacatatttgctatggacgacaaatcagagaatgagcccattgaaaatgaagctgccaaatatgatctaaaatacataggactagatgggaacattgcctgctttgtgaatggtgctgggctcgccatggctacttgtgatatcattttccttaatggtgggaagccagccaacttcttggatcttggaggtggtgtaaaggaagctcaagtatatcaagcattcaaattgctcacagctgatcctaaggttgaagccatccttgtcaatatatttggtggtatcgtcaactgtgccatcattgccaatgggatcaccaaagcctgccggagctagaactcaaggtgcccctggtggtccggcttgaaggaaccaacgtccaagaggcccagaagatactcaacaacagcggactccccattacttcagccattgacctggaggatgcagccaagaaggctgtggccagtgtggccaagaagtgatgtctttgtcctgatccaatggagaaagaaagccatttttccataaaaagggatggttcatcattgtgaaagaaatggttatctcattggggaagaaaaggggagggggaaggcaagaatcactgaaaaatcttaaatctgtgttttctggaataagatatctagacagcctaaatctgattttagtctttataaaaataatatcttgtgttctcatacttttctgtcactgtaagcctgcccagtaggcagtgttttgcagactttggggagtggtctatgtggccaaatattgtgtgtatagacagaatttgaaatcaagtcctgcttcatttacaagaattttggtgggcatcgaatcctacataat

SEQ ID NO: 13787 - DNA, 874 bp, Homo sapiens
agcacttgaaaatcaacaaatccagaatttaaaaaaatgccacagacttttcaaagcccaactgtacttttttgagaatttgtcccgtacctactaatatgccttattcttcttcacctagtgttttaaaagtcctggggtagaaagagttttagaaatgtaatcagttgttcagcttcaataatatagagatctaacatagtcagtcctcaggccccctaaagaaacaagcaagaaagtgagggccatcactagggttggctttggggaggggaaaactaaggactgcttttgccaaatgatatttttgataatgtaaggaaacacagggaccacaaaacctttttttttttttaagtgtgaaagattagtgccttttggatacttttgattttagaggatatagtatcggcattgacaaatcacgtagaaacaaagaatgctatagatgacaacagtattaaatgttactcctgattctgcagaacagcttttgaagatactggggggtatcttcaagcctcagagcagcttgtttcagatagaaattctctatgggttgaaatgccaaaaacagaaaacatgatgttgactcatgtaatttagtccattttagcagagcctttagtgttaacaccagtggcgaggagcattgcatattctctgtcagcagcagcactcccacaccaggtggttctgggctctctgtaggctggtcctagtaggtgacacccagcaacacccctgttggacaggattgattgttcgcagtcttagaccaacacttcagtcagaaatgttactgggaggaggaaaggaaaatcactttttttcctccatgtggaaatgaggagagaggaaagtggattgcaac

SEQ ID NO: 13788 - DNA, 1077 bp, Homo sapiens
gagagggagtcaaggtgtgaccgtcgaccacagccagtgtcaggcctctgcctctgggcctttgctttgtggcctcactgcaacacaaagctccaccaggaggctggttcacgtcccctaccacggaagcgaggtcccagaaggccagcggtggttccaggagcaacagctcccaaaccctgagcaaggcaaccgatcgccaggaccaggaagcatcacccaggagatttgggcgcccacttccacctcttctctcagttttggacaagtgacaaaccattttgccccctcactcttcttttttaactgttaaaccaaaggaaagcacaaatgaaggaaatcctgtgtaaagcattgagaaggaaagaagcctggagcagcctctcctgtccacagccaggggttaggtctgcaggcccgtctgcggtccccatcgagcatcaaggggacgctgtgtgtgctgcaagtgaccccgaaaacaaccacagccgtcacatggtcctcctgaagttggggcaccctcctctcagcaccaaaatggcccccactccttcgtgtcctcccgctatctccaaatcggacgttctttctagctgagatttttatttttccacatctgtagtgccatgaagcgattctgtctttgacttccaatggcaaacctgggtgatcgggaacaagcacgttgtacccttggctggacatggccaagacacaaggcattccacggcggcaagctgaccgcacagcagtctggcttgattttcagccgtcatcattgggttctgttttgacagctctgctgtcccatagggactgcgactgggaccaggtcaaccacgccaggggggtgtcaccagccttttctttttttctttcttttttttttttcctccttaagctgctgtcaatccaaaccattggcatcatcgtttcttttgaattaaaaccaacatatcagcaatagtctgctctccccgggaatctctaacatgctctgtttacatcgataaatgcacttaaggaaaacaaacaaattaaagctcatcttaaagtccaaaaaaaaaaaaaaaaaaa

SEQ ID NO: 13789 - DNA, 264 bp, Homo sapiens
gttaggatggaggaacccagccacagcactgaacccagggacatcagttgaatacctcatcctaacccaccaccaccctgggagggagtcagccaggcatgcacctgcccctagatggctacgtaccggggagaagggggacacctggaggtcgcatgggagaaaacaggggattagatgcatacaagaggggtcccaccaacccagaaactcccttcttatcccagacccatccagactccaacttctaggtgcccaccccga

SEQ ID NO: 13790 - DNA, 1420 bp, Homo sapiens
  misc_feature (1)...(1420): n = a,t,c or g
gtggcagttgacttggtggctggcatgttcagcagtgcctggggccctgtttctgggcagcctttgaggattttctatgatattgaatgacagttttaagtggcaactcaggcccagctcatgcccttttttgcctggacatgtgctatttttattcacttatatatcaattacttgtaagggttaaactttcaaacaggaagtatattgggacaaaagggctcttggggattagatatccctttaatctgtgaccattgggcaaaaaattttcctgcagcaaaagtctgaggctgttgggaccatttttgcagctttaatccttagcctcttttgactgtatatttgtgtttaaaatgcagagctcaactgaatatttccttttttgttttgttttgttttgttttaagaagtaggttgttttcctgaaccgtaaacttgtatcattttaacttgcacaaaggaagtctgttcttggtattgctcttgcacttgggttttttgttattgttttgtgtggattttttaaagcttttctgtttcaccctcctgccagggaaaatcccagaaagcttaatgataccccaaaatgattacacccagggaggaaaaaaaggagcgctttctagggtcagaatcgtgggagagaatactcagaaatgaacctctttaaagccttgcaggaatgagtcactcttacttaatgaaatgttaaagccaattaaaaagcatgctgtgatgcccagcttccctttccacagggtgcatgcgtctcctgctggtgaatcacatgcggcaagaggcaactggctccacagcctgggatgctgccgtaccaagaggaaagaagcagcaaaatgcctttacgttgttctaaacccccgacgcataaagtgtagaggagggatggccaagggtgggtggtagaaagtgtgttcaggctgacactggcaatgagtacagataatttcactttcctcttccaggggcaaaggctgatggcctctacctttgtatccaggagaaactgcagagcagccctgtgactttacaaaatatgctacctcaaagtgctaccgataaacctttctaattgtaagtgcccttactaagggcacatgtcttaatcaaagttagttttttgttttctggtttgttttttttttttttgtatattgatgaatgagatcttacctattaaatatattattggattatggttcctgaaggtcattaaaggggacttgctttgnnnnnnnnnnnnnnnnnnnnnnnnnnnatgacttaaatatctttacgtgtgttttttagagcttggttctttaaagatttggagaagatatgtaaattaccaaggcacttggtttttctgttttatatactaataatcagggcctaagttaaataaaaatatgtgtgc

SEQ ID NO: 13791 - DNA, 1380 bp, Homo sapiens
ggacattgtcattattcttcctccatctatctgattccattccttccacacccagctaaagttagaggagatacatatagaatctattttagattattgttaactatttgcatcaaattaagatacacaaatggccatggatgttgccttagccttaaacattactaatagtttcacatcacctcactgcacgcatcgaaggatctgatttgaatttgtaaaggcaattcttttgagagcaggattctccaggctaaatcaaaggcagctaatcctgtccctgaaggagcagctaggggaacctgaggcttgttcttgaagtgggcaagctggccaaaatattggaacacacagaaccaaaccaggtgtgttctacacctgcatgagtgaaggatttccacgtagacacctaggaagagccccgcatgccctagactcactccagaggaaggattgatttgcaaccagaaagggagctgaaaaccacggagctccatggctcttcattcaaaagggaaaataatgattccacgttgctttttagagttcaaatcaacatctttctggataaatctattttttaacaatctttttattatttgtaaaagatataaaaacaactcccatcagtagcaatacaaggttatacattttaaccagattttctcaggccttttttggatacctttagtagttaactctcttttgtcaaaccctcttgtatataaccatcgcacaacatacagaaccctgggggaatacagccaagggcactgctcactgtggcccgtgtattcattcccacaggctgcactgaaataacctggtaaacaacaccctcctccattttgcgtctatttcttctattgtgcttctttggggataggaagagaaacataactactgttccaggtaacgtctgtatcatacagttagtgttgccagtgaaacgttcccagatacaaagaattgtgcttttaattccatttcacaatctgttttgttttttttttttgtcattgtctgaccaaaattccttctgcacatgaggccagtatagggcaacgtcacatttgtttgtttcaaatatgcagtgtggtattttgtttactttgcatttaccgtgagcaaagatacttcttggaatggctgcagtgaggccgtgtcattggctcacaaaagtgactcataggtaatttctgtgtttgcattccactgctctgctccctaaggtccttgactttctccccaggaattcacttaaaaagggactgagcattgtgtcaacctgttgcagtgtttttcatatatgtgttcactctaaaaatgcaaataaagactgcttccttagagggtgctcatacaaaaaaaaaaaaaaaa

SEQ ID NO: 13792 - DNA, 789 bp, Homo sapiens
  misc_feature (1)...(789): n = a,t,c or g
gctaaacccctgtgaatgttcttctaaccttcctgttccccaccccctctctcagatttgacctagaattcccagcccaaatccatcattgtcttagctctaatacgaattttcatgttggacaaaaacctagctacaaatgggtttctatggaacttctaattaatgtgcaaaatacatattttctccaggttaagaaattttaagtcagatcatgctgacacaataagaaaatttgtttgtgtaattcattgacctcttccttccaaaataacatcaagtagccacctcagtgtgacaatatccagtcaatagtagagaatttaatccttggtcctataaaagaataaaattcattgtcgtatttatagcacgtaagccttgagtaacaggtcttaatgttagtgttggtgttgtggtttctgcggaacgtttacaagtgaagttggattctcctgggctttaaatccaaaaagtcttaatgaccgcttcatgtagttcccctcttattcccctgtggtctcctcagagccaggcgtgtgctgggaaagagtattagtcatagcctggctttatagaatccaggaggtccttttagctgaaacaagtggcttcaaaagggaacatgaaacagtgaaaagatagccaaaggtcagtgaaaccacagcatttctttctaatctggctgagcccatgggggggaatgaggggaaatnatccttncggcccnagntcnccgagggggacctttggacttgtgcnncctncattantanggcacccnccccg

SEQ ID NO: 13793 - DNA, 1045 bp, Homo sapiens
catttagtaactgttgttgtttattctatgtatttttgcaggaggcctgaggtgggctgtgttctcctcctatggcagggcttcactctcctcctcctccgttggggcttcgctgtccctgggataagaataacaatgccaaggttttcattcttgaaaggagcaattaagcttctcaccccctcctcattttagatgggaactgtgagggccccatcatttacccagggtccctgttgaggatcttgtcctcattagatgacttcttgtgcagcttccatgcatgattatttattcttgtggcactgagaggtttgtacatatctttaaaccagagcggctgtccaaattgaggaaagtccatcctagaagatagaaagggaaatattaattttgcatgtcctctgctttccctggccacagcaatgaatcctccaatgtacctgactctcccttcgcgaagagcaatccccctccgtggcaagaaatctgaaaatgcccctggggagacacatgcacaagacagtgagtgatgcagccgtttcccacgtatctcacaatgtacttctctggtcttattaggactaaatgagtatctcagtccataatcacagggagaaccaccaccacagaccacatacccggggtcttgaaaataattccatgcatgtgggactttcagaagctctccatgtctgcccagaagggccccacaatatactggggggactttgtatgtggctcagcatggagcaggggcaggattttcagtcccactcactcccttggccaagtgcccttgtgcagtgaacaaactgcacaaccatgctgggcagaagcattttatatcagtcccccttcggacttagtctcacaggccatcatttgatgggggatgggagatgaaagtggttcctccgttttcctagatactttattcctataagttggatcacctcaagcaaatgccgtgagtgcagctagcccaagttctctatctcacagtcttcatatggctggctgtcgctgatgagtgagtgagctc

SEQ ID NO: 13794 - DNA, 510 bp, Homo sapiens
gagaaggcaccacgagtcaagaaactgcaggtctagctgtgacttctgccactgatgcttgctctgagacagttatctgggcactgacttttctcattcataataaaagtatgtggggaggatcacagagaggggagctttcaactacatgacctatacgatccctccagaatctgattctaaagacctgtgacaatgcaattcattgggaaatacgcatggtatcactacaggtttacctgttgctaatgcatgagtgagacaaggacaatgacaaagtcagtgaacagtccttctgtttagtggtctagtggtgttttctacagggaaagtcacatggggcctttcgtagggagcttctacctagtctattgagacaactccattgaagcaatgggcttcacccatgtaacccgaatttttcaaagctcaattcagcaaatgcttctaccttgatcaaagcctctgtgttcacaaggctgttattttacatcagggttccaaactcac

SEQ ID NO: 13795 - DNA, 450 bp, Homo sapiens
  misc_feature (1)...(450): n = a,t,c or g
tttgaaatccgtnnnnnnnnnnnnnnnnnnnnnnnnnnnnnnnnnnnnnnnnnnnnnnnnnnnnnnnnnnnnnnnnnggcacgagcagcaacttgaaagaatgcaactgttcgtctcttacctatgacctggaagccccctnnnnnnnnnnnnnnnnnnnnnnnnnnnnnnnnnnnnnnnnnnnnnnnnnnnnnnnnnnnnnctcatgtcttcctaaaatgcagaaaaccaagctgtacccccgccaccttggacacatgtagtcaggacttcctgaggctatgtcatgggcacccnnnnnnnnnnnnnnnnnnnnnnnnnnnnnnnnnnnnnnnnnnnnnnnnnnnnnntttggggttcacaaatcatacttgccagaatgtgttagagttgtgtgcttagtattctctgctaaattgtggtttcctaaaaggcaaatatgacattcat

SEQ ID NO: 13796 - DNA, 760 bp, Homo sapiens
ggtagcaggaaagggcaggtcctcccgggtcgtgagccacgtagcctcctggggtggcaaggtgtagagaggggggcgttgaaaggacacccgctacccggcctgctttctaggggtctctttggattgaggacatcagcagcagtggaagggattttactggagacctgtcactgtcagagccttaaaatatcaccgacggggccttaatgtcaccgaggtagagagaaaagggcagtagccctagagactattgcgacacagtgtgcccctcataagtttttccagggaggggttctgtactgagttgacgccccaggagctgagcaccaggctttgcatccttgggaactcagcaaacgtttgttcagccaattgcaggtagcatggcccagggcttgattgaggtggagcgaaagttccttccagggcctggcacagaggagcggctgcaggagttggggggcaccctggagtaccgggtcaccttccgagacacctactatgacacccctgagctgagcctcatgcaggctgaccactggctgcgacgacgagaggatagtggatgggagctcaaatgtcctggagcagcaggtgtcttagggaccccacacggagtattaaggaactcacagcggaacctacaattgtggcccaactctgtaaggtgctgcgggctgacggcctggggggcttggagatgtgggctgctgtgctgggcccactggggctgccaggaagtagctagttttgtgac

SEQ ID NO: 13797 - DNA, 636 bp, Homo sapiens
gaagcggaaaaacaattgccatggtaaccacattgagatgcaggccatggcagagatgtacaaccgtcctgtggaggtgtaccagtacagcacagaacccatcaacacattccatgggatacatcaaaacgaggacgaacccattcgtgttagctaccatcggaatatccactataattcagtggtgaatcctaacaaggccaccattggtgtggggctgggcctgccatcattcaaaccagggtttgcagagcagtctctgatgaagaatgccataaaaacatcggaggagtcatggattgaacagcagatgctagaagacaagaaacgggccacagactgggaggccacaaatgaagccatcgaggagcaggtggctcgggaatcctacctgcagtggttgcgggatcaggagaaacaggctcgccaggtccgaggccccagccagccccggaaagccagcgccacatgcagttcggccacagcagcagcctcccagtggcctgggaggagtggactagccggtccccgcggcagcagttttcagcctcgtcacctgagcaccctgagctgcatgctgaattgggcatgaagcccctttccccaggcactgttttagctcttgccaaaccttct

SEQ ID NO: 13798 - DNA, 547 bp, Homo sapiens
  misc_feature (1)...(547): n = a,t,c or g
gggaacttagaatgttgttgatttctctgagtggccacgtgtaccctagacaaagtcatctgcccaagaggcctgtggatgtgttcctctcacctgcactctcttgttcttcaagtctggccctgcctgccatatttttccatgaccccgttctagcctacaagggcaagaactctccaggccttggggtagaaaagggaatttccctggtcccccagttcctcctccccaaaggatgttctatgattcagagctcttctctggcatctctgaccctagctgctgctttcttctgcccccacagctgaccaggtgtatggagaccaggacatgcatgaggttgtgcgaaagcattgcatggactatctggtgagaaaatggaggcctttggggaaggggcagggtgggaagatttcttctccacacagaccttaaccttccaatctattctgcagatgaagaatgccgactacttctcaactatgcacagaggactttaccacctacattaacaggaagcggaaaacaattgcatngnaaccccttg

SEQ ID NO: 13799 - DNA, 1006 bp, Homo sapiens
  misc_feature (1)...(1006): n = a,t,c or g
tttttttttaagtataaggataagcaagcttttattccgtcaagagaacaaaggtcaggacttttatcctggtggggggatggggagtccagattccttctctgatgaggcaaaaaaagaatcaagactcctgttcaagtaaagggcagagggtgagagctagtactcttattctagaaaggaagtagatacttttctttgataaaggaatgaacggtagactcctagtttgcagaaaaggtgggaaagatgtgacttgtactttggtaaggagatagggaaggaattaaggctattactctgaagaaagttggggggccagggctcctatttttttgctgaggagatggaagatcagggcttgtattcaataagaatgggaggggccaggggatgcctggcaaaagccttgcactgtgaggtgcaggtagaggcttttattctggtgagaggacatggactctctctctcccctcaggtaactgtgccctgtaccagcggggaggctggtggtaccatgcctgtgcccactccaacctcaacggtgtgtggcaccacggcggccactaccgaagccgctaccaggatggtgtctactgggctgagtttcgtggtggggcatattctctcaggaaggccgccatgctcattcaggcccctgaagctgtgactctgtgttcctctgtcccctaggccctagaggacattggtcagcaggagcccaagttgttctggccacaccttctttgtggctcagtgccaatgtgtcccacagaacttcccactgtggatctgtgaccctgggcgctgaaaatgggacccaggaatcccccccgtcaatatcttggcctcagatggctccccaaggtcattcatatctcggtttgagctcatatcttataataacacaaagtagccacagaccgtgtctggtttgtatctgcacctgacagtggtcactccctggcccgccctcctcgtcctccacctcgcccacntgccgaat

SEQ ID NO: 13800 - DNA, 1403 bp, Homo sapiens
agtggttttgccacgtggatgatgacaattatgtgaacgcaaggagcctcctgcacctgctctccagcttctcacccagccaggacgtctacctggggcggcccagcctggaccaccccattgaggccaccgagagggtccagggtggcagaactgtgaccacggtcaagttctggtttgctactggtggggccgggttctgcctcagcagaggccttgccctcaagatgagcccatgggccagcctgggcagcttcatgagcacagctgagcaggtgcggctgccggatgactgcacagttggctacatcgtggaggggctcctgggcgcccgcctgctgcacagccccctcttccactctcacctggagaacctgcagaggctgccgcccgacaccctgctccagcaggttaccttgagccatgggggtcctgagaacccacagaacgtggtgaacgtggctggaggcttcagcctgcatcaagaccccacacggtttaagtctatccattgtcttctgtacccagacacggactggtgtcccagggcagaaacagggcgccccgacctctcggtgacaccaaccaccccgacccagggctgcctggctctgtcccaggcgcggggaaccagagccccctatgggctcagtggggctccctcaggtgccacggccgcaccagtgagatgcaggcacctggcagaccctctggctagcctgcagccccccctctcccagcccctggtgggctgcggtgatgggtgttttgggagaacgaagacagccaggctgatggccagggccgcagtgcccctccccccgacccagccccaaggttgatcccacgggaacaggcttccaccccagcacttgcgcacctgggagggagctgccatccgggctccattacctgttgctgaaggcgggtgctaggctggctgggtgtcaaggagcaggctccaggccaaggtcctggcccagccacggccattgcaagggctcagcctggcaggctttgtgggggacgccgccctctctgccgcaggctgggtgcacggccgggcaccacagtgggactcaggcccgggaaggtcatgttctcgaccagagctttgctcccagtccaggcgcctcattcggaggcctcttgactgggaccacagagatgttttctccgctctgacttgtggctcaggattactttctgggtcgtgctcctgccccactgtgcctgggcccataaacaacaggagccttttgttccgctgacctgcccatcccagcagacccacctccccgcctggtgccttccatggagggaaatgggacaggggccgtcatctcccctctgcctcctgctttgctgttgccgagcacgagtaaagcttttgttcttacttc

SEQ ID NO: 13801 - DNA, 1106 bp, Homo sapiens
caagcacagctggcgttttatgacataaagaactaaaggccgaaagaatctcttgctgctgcaaagaacagattttatatttcttcctctaatcttggcaaatgacctttaccttttggaaagatttcatattgcttcctcctccctggataggacctaatgtagcacagcgggactcaaagaggaggacattttctcttgccagtgcactgggcagtggggctgtccttcaactgctgctgccaaaattggttttctaaaattcttccagtagagactaaaagaagattcaattcctgtaacccaagactgagtcttagggctccagtctccacctgcttggtttcctatcctttgctgcctgcctggggtggcctggaagcctgttcagaaaggcacaatgtggagcctggggtgtctcccccaccccagggaccgtcaggtttaccagtgtgtggcaatcgccatgtattcagagggaagtacctttgttacctacaacttaggagctaggcctctgctacaagcacttgaaaatgatatttttatttttaacgtctcaacaatctgatatcggatgtcgtttaacctgggctcgtggtagggctccagcatttctccctccttcctggtttgcctgtaggggtagactcggaaggtgggtggggtgtgcatttcctgttaggagtgtatcagtgcttgtcttattataagcccctttcttttgtgaatttgaagtagcaccaacaagcctggattgtgaaggtattaagaatcggtctgtgggctactgagtgggtccttaggatactggcccagattttgccactgggtatggcagatcattttctaccatggcctgctgctcttgtagtggacttcctgagtccaatcccacctcctggtgtagaatttacactgctgcacctgaggtcgatgtttcaaagtaagatcaagccagtgttttgatctgggctctgagcacaagtcaggaaacaccaacatattcacactctcccagtaggttcctcagtccgatggtgaatggctattcgtaaatggctggtctggctctttggtgttggagcctttccaatagccccatg

SEQ ID NO: 13802 - DNA, 989 bp, Homo sapiens
cttccccgcccagcatcagatggcactcttgcgccatctccaggctgatgacgccccgagtggcgacgctctagtcgccatttgtctatggcaggcagggtggctgccttagctgccggaggttccgcactctctaaggccccgggtgaagccccacctctgctgcgcgcagcctgcggtgcgggtcatggcgcggctaccgaagctggcagtctttgatttgggtgagggacgggaaggggagaatttcgtaaggtgctctccttttccacatccctaacagcagctcccgaatccctgcatctcccgccccaggctgaaccttccctctccttcctctcgcagattacactctctggcctttctgggtcgacacgcacgtagaccctccgttccataagagcagtgatggaactgtacgagataggcggggccaagacgtccgactgtacccagaggtgcctgaggtcctaaaacgattgcagagccttggggtgcccggtgcggctgcttcaaggacaagtgagatagaaggggccaaccagctactggagctctttgacctcttcaggtactttgttcatcgggaaatctatccaggcagcaagatcacacactttgagaggttgcagcagaagactggaattcctttctcccagatgatcttctttgatgatgagaggcggaatattgtagacgtcagcaaactgggtactgagtgatgaggaacagcccatttggggtccctaggagggattaggtgttacctgcattcacatccagaatggaatgaatcttcaaactctaagtcaagggttagagacatttgcgagagccaaactgggcctttgaggtccagccttgaggagagcccatttgaggcctaaactgaaaggaaatcaagaaggcattttcaggtgcatttgtaatttattaaagttcatctgtgtgtgacagaagagattttaaaaaaaaaaaaaaaaaaaaaa

SEQ ID NO: 13803 - DNA, 2861 bp, Homo sapiens
cggtgagccggccgtattcccgctctcgcttagggggcacaggcgcaggcatcggcccggccactccaagccttcggtgcgcgggcgcgtctgggatacgggcccgggaggcgccgccctccgtccgcccggtgcctctcaggaacagcgaaccggagagagcgccggagagttgggctcagtgcggagctcggcgccggggcccatgcccgtgcgcccccgcaggccggcgccatggcctccgggagtgtggccgagtgcctgcagcaggagaccacctgccccgtgtgcctgcagtacttcgcagagcccatgatgctcgactgcggccataacatctgttgcgcgtgcctcgcccgctgctggggcacggcagagactaacgtgtcgtgcccgcagtgccgggaggaccttcccgcagaggcacatgcggcccaaccggcacctggccaacgtgacccaactggtaaagcagctgcgcaccgagcggccgtcggggcccggcggcgagatgggcgtgtgcgagaagcaccgcgagcccctgaagctgtactgcgaggaggaccagatgcccatctgcgtggtgtgcgaccgctcccgcgagcaccgcggccacagcgtgctgccgctcgaggaggcggtggagggcttcaaggagcaaatccagaaccagctcgaccatttaaaaagagtgaaagatttaaagaagagacgtcgggcccagggggaacaggcacgagctgaactcttgagcctaacccagatggagagggagaagattgtttgggagtttgagcagctgtatcactccttaaaggagcatgagtatcgcctcctggcccgccttgaggagctagacttggccatctacaatagcatcaatggtgccatcacccagttctcttgcaacatctcccacctcagcagcctgatcgctcagctagaagagaagcagcagcagcccaccagggagctcctgcaggacattggggacacattgagcagggctgaaagaatcaggattcctgaaccttggatcacacctccagatttgcaagagaaaatccacatttttgcccaaaaatgtctattcttgacggagagtctaaagcagttcacagaaaaaatgcagtcagatatggagaaaatccaagaattaagagaggctcagttatactcagtggacgtgactctggacccagacacggcctaccccagcctgatcctctctgataatctgcggcaagtgcggtacagttacctccaacaggacctgcctgacaaccccgagaggttcaatctgtttccctgtgtcttgggctctccatgcttcatcgccgggagaccattattgggaggtagaggtgggagataaagccaagtggaccataggtgtctgtgaagactcagtgtgcagaaaaggtggagtaacctcagccccccagaatggattctgggcagtgtctttgtggtatgggaaagaatattgggctcttacctccccaatgactgccctacccctgcggaccccgctccagcgggtggggattttcttggactatgatgctggtgaggtctccttctacaacgtgacagagaggtgtcacaccttcactttctctcatgctaccttttgtgggcctgtccggccctacttcagtctgagttactcgggagggaaaagtgcagctcctctgatcatctgccccatgagtgggatagatgggttttctggccatgttgggaatcatggtcattccatggagacctccccttgaggaggtgaattcaggccaaaagggctgttggctgtaatcctacgccaggcacaaggcatcttgttgccttgccacgtcctgtcacagctgggtatccttaccatgttccacgcccttgcagtgggagacaggatgtccatgttctctaccatccttttccttcccatgcagattgtgaaatgtaatgagatgtatcaagatatcctagaaataaaaaccagatgtccacctccagtgtttcatactttctggttttacacatcgctggagggataaagagtatggataatctttggatttggagagccgttcaagatacttccagcttcttggctcagcctggcttcctctggttcagccccacataatgattatggctatttgctgtcatttctgggctagggctcctttctaacaacctagactggaataaggccctgtcagcatggctcccttttatcccagttttccgtctgggaacagtacctctgcccctgattcccaatgtgccatagttttattaactccattaaagaagcctgtatgtgttttggttagttacagttattttacaataatggtgggtaatggccccacctctgttatgagataatgttctaatcaatgtctctgcctttgtatcttttctgagggctttgtctgttctcttcattctaatgaaaggtgtattctagtgctgggtgcatatcatccaggataatattctgcccaactccatcctctgttactagatcccttaccagtcacatttgtggactggtggccagtcgtataccatccctggaaggattctgggacaatattccagggattcattgacttcttggctccttttctccatttcctttgggggaagggggaattgaccatgcttaagtgcatcctatcaaggggcagctccgtccccatggccattggatcatgagacactctgaagtcagaaggctggggcagatcacttcaagcaagcccccatgatggttctcagtcctgcttctctgtgggtacgtgcccctctgtttaaaaataaactgaatatggatgtttaaaaaaaaaaaaaaa

SEQ ID NO: 13804 - DNA, 3760 bp, Homo sapiens
  misc_feature (1)...(3760): n = a,t,c or g
atgtgcttcagtttcataatgcctcctgctatggcagacatccttgacatctgggcggtggattcacagatagcatctgatggctccatacctgtggatttccttttgcccactgggatttatatccagttggaggtacctcgggaagctaccatttcttatattaagcagatgttatggaagcaagttcacaattacccaatgttcaacctccttatggatattgactcctatatgtttgcatgtgtgaatcagactgctgtatatgaggagcttgaagatgaaacacgaagactctgtgatgtcagaccttttcttccagttctcaaattagtgacaagaagttgtgacccaggggaaaaattagactcaaaaattggagtccttataggaaaaggtctgcatgaatttgattccttgaaggatcctgaagtaaatgaatttcgaagaaaaatgcgcaaattcagcgaggaaaaaatcctgtcacttgtgggattgtcttggatggactggctaaaacaaacatatccaccagagcatgaaccatccatccctgaaaacttagaagataaactttatgggggaaagctcatcgtagctgttcattttgaaaactgccaggacgtgtttagctttcaagtgtctcctaatatgaatcctatcaaagtaaatgaattggcaatccaaaaacgtttgactattcatgggaaggaagatgaagttagcccctatgattatgtgttgcaagtcagcgggagagtagaatatgtttttggtgatcatccactaattcagttccagtatatccggaactgtgtgatgaacagagccctgccccattttatacttgtggaatgctgcaagatcaagaaaatgtatgaacaagaaatgattgccatagaggctgccataaatcgaaattcatctaatcttcctcttccattaccaccaaagaaaacacgaattatttctcatgtttgggaaaataacaaccctttccaaattgtcttggttaagggaaataaacttaacacagaggaaactgtaaaagttcatgtcagggctggtctttttcatggtactgagctcctgtgtaaaaccatcgtaagctcagaggtatcagggaaaaatgatcatatttggaatgaaccactggaatttgatattaatatttgtgacttaccaagaatggctcgattatgttttgctgtttatgcagttttggataaagtaaaaacgaagaaatcaacgaaaactattaatccctctaaatatcagaccatcaggaaagctggaaaagtgcattatcctgtagcgtgggtaaatacgatggtttttgactttaaaggacaattgagaactggagacataatattacacagctggtcttcatttcctgatgaactcgaagaaatgttgaatccaatgggaactgttcaaacaaatccatatactgaaaatgcaacagctttgcatgttaaatttccagagaataaaaaacaaccttattattaccctcccttcgataagattattgaaaaggcagctgagattgcaagcagtgatagtgctaatgtgtcaagtcgaggtggaaaaaagtttcttcctgtattgaaagaaatcttggacagggatcccttgtctcaactgtgtgaaaatgaaatggatcttatttggactttgcgacaagactgccgagagattttcccacaatcactgccaaaattactgctgtcaatcaagtggaataaacttgaggatgttgctcagcttcaggcgctgcttcagatttggcctaaactgcccccccgggaggccctagagcttctggatttcaactatccagaccagtacgttcgagaatatgctgtaggctgcctgcgacagatgagtgatgaagaactttctcaatatcttttacaactggtgcaagtgttaaaatatgagccttttcttgattgtgccctctctagattcctattagaaagagcacttggtaatcggaggatagggcagtttctattttggcatcttaggtcagaagtgcacattcctgctgtctcagtacaatttggtgtcatccttgaagcatactgccggggaagtgtggggcacatgaaagtgctttctaagcaggttgaagcactcaataagttaaaaactttaaatagtttaatcaaactgaatgccgtgaagttaaacagagccaaagggaaggaggccatgcatacctgtttaaaacagagtgcttaccgggaagccctctctgacctgcagtcacccctgaacccatgtgttatcctctcagaactctatgttgaaaagtgcaaatacatggattccaaaatgaagcctttgtggctggtatacaataacaaggtatttggtgaggattcagttggagtgatttttaaaaatggtgatgatttacgacaggatatgttgacactccaaatgttgcgcttgatggatttactctggaaagaagctggtttggatcttcggatgttgccttatggctgtttagcaacaggagatcgctctggcctcattgaagttgcggagcacctctgaaacaattgctgacattcagctgaacagtagcaatgtgggctggntgcagcagccttcaacaaagatgcccttctgaactggcttaaagaatacaactctggggatgacctggaccgagccattgaggaatttacactgtcctgtgctggctactgtgtagcttcttatgtccttgggattggtgacagacatagtgacaacatcatggtcaaaaaaactggccagctcttccacattgactttggacatattcttggaaatttcaaatctaagtttggcattaaaagggagcgagtgccttttattcttacctatgatttcatccatgtcattcaacaaggaaaaacaggaaatacagaaaagtttggccggttccgccagtgttgtgaggatgcatatctgattttacgacggcatgggaatctcttcatcactctctttgcgctgatgttgactgcagggcttcctgaactcacatcagtcaaagatatacagtatcttaaggactctcttgcattagggaagagtgaagaagaagcactcaaacagtttaagcaaaaatttgatgaggcgctcagggaaagctggactactaaagtgaactggatggcccacacagttcggaaagactacagatcttaacgatcagccttcgctcctaatgtatttgttggtttcatttcattttcattttgcacttgcactaaattgaacatgaccctgttagagatgttataaagggaatgaaatcctggaactcagagttaaattaagaacaaggcatcccacagaacctaatctgaacaatccccgatgattccctctgctttttgaatgcttccaagacttatcatgaaaactgtcaatggataatcatttcctgctgactttgcacgccaaggaatgcctactagggattgtttccgtttttgtttgttttttcctaatatttggtacttcccagaatggtgtaaatacttcttttcaatgttgtgaccaagtattgtcactcagccaacaacttttccacacctgggggttggtggctgttcttactgtccaaatgaagctaaaaagaaaggcatctttcttcccttttaaaattgtgtaaactgcaaattataatataatttgaatttatgattattttccagaagaaatcttgtaaacctgtgaaaaaaaaaaa

SEQ ID NO: 13805 - DNA, 1956 bp, Homo sapiens
agcaagactccgtctccaaaaaaaagaaaaaaaaatttcttgaagtggaatgatgtacaccaaatacccactttatagataattacagggatggtgaaaaattagtaaatagcttcacaaaagaggcagcgtgatacctttagtgttttctagaatttttttctggatattatatgtaagaatttattgtttgagggaaatacgaggtttcattgtttaaaatcaagagtgtattgtttactgttttacagtattatttaatatccaactggtctccaatctccattacatagggactgtacagagcctgtgaagatgtatgaatggtatcttttataatccacaatacatttctggtaagatggaatcactacctctgatcacatatcaggctaacgatagagaaagcattaggtttaagttgagggctaagaactggtttgtttaaaggtttaaattgttggaaaagaggcatttgccttctttaatgaatgatggtctcacaattcagttgactttgacctaatatttaagaatataaatatattttatttgaaaggctgagtgttgccctcaaacacttgctaaaactgcctagggcaggattcattagggcttgcagacaatgtcacctaaattgctgaatgtactcattataatatgatatctgacaaaggtagtacagcgtttctgagtcatttgggaccaactgcagtggttgtttaaaatgctggttcctgcacacaattctctatctactgaagcacatctgttttctttgtttgttttgctttggctttttgtttttaaagtttcccccagtgattccagtgcacctgaaaagttgagaaccacaggcttagtggtacgttggggtttcccacgctaggctgcatagcattataacctgggaacgttaaaaaaaatacagacattcttgattcttagtgtagttatgatgtggatcctacgtattttttaaaaaactctccagataattttgatgtcacgagtcactagtatagactatctatctagtgagttgtattataagcgatgaaatactttaaaagctacccagtaactcttgggattaattttatgaaataaattctgagctgctgcttttgatatagtcagacttaagactgaaccccagtagacaggcaatagatatagaattctggttagctaattgaacttttgtgacctgtttaaaaacaaatcaaatttattgaacaaatgacaaggcacaaatactttcagaattgtatttcagttttgaagatttaaaaaaaatgtgaaaataaatatatattagtatcctttattttaaagtcaattgtaaaccagaagtactgttattttggtgattaaaatccaaaactttagctgtatttcagtaacaaaaacataccttactagacttgaggctcacaccgtaatcccagtgctttgggaggctgaggtggaagttcttgagcccggagttcaggctgcagtgaattcgatcgcaccacgaactccagccccgtatgacagagtgagaccctgtttctaaaaacaaaacaaacaaacaaacaaacaacgtatcttactgactaaactggaatggaaatcttataattagtgttgtatttttctgcaaaatagtgaattggtacttgggagacttctgttctttgttgaaaaaaattgcctttgttttgaaattatatcacctgtgttctgaactaaaatgatgggagttcattttgtatttactttgcagtaagtatcatgtaaatatgcaaatgttgaatgtaatatagattgtgtcctcattgagtttttgggtgatacagtttataaatataacaattatacaccctcatacattcgtctgattttgagcttgtaagatgagaactgctttttacacatttaataaaaaaaggtctctgaaaaaaaaaaaaa

SEQ ID NO: 13806 - DNA, 839 bp, Homo sapiens
cggacgcgtgggctaatattactggaattgattactctccttctgcaattcagctttctggaagtattatagaaaaagaaggtttatctaacattaagttaaaggtagaagactttttgaatctctccacacagctgtctggatttcatatttgtattgacaaagggacttttgatgccataagccttaatcctgacaatgcaattgagaagaggaagcaatatgtgaaatctctctccagggtgttgaaagtaaaaggcttttttctaataacgtcatgtaattggaccaaggaagagttgctaaatgaattcagtgaaggatttgaacttctcgaagagctaccaacacccaagttcagctttggaggcagatctggaaacagtgtagcagcattggttttccaaaaaatgtgagactttttcttggacgaattcaggtagctacacagaatctacacagcaaagttaacctgacacagaaaatccttgtgcaaataaatgcttagtaagtacacaggatgcacatgttgaatagagtatactggattggtgaaagaaaataataataatgagcatctaagtggttgggttttagagatcaatcaagaataattttaattttcttttgtatttgaaatgtaaatagttttcttttcgattaaaaaaatttcctataactgctaaacagttaaaaactttaaagtagtaaatgagtttatagaaagcatgtattcttgatttttgtgccttggtaaagttgataactatttatgaatatttgaccaaattattccagcatcagaataataagcaaaatactttgttagtgttttgtta

SEQ ID NO: 13807 - DNA, 979 bp, Homo sapiens
gagaaagagagacagcactgtgcgtcatgtaccagcgccggaagttggtctcgacacctggactagccgggttgtatttggaaacgcggagtgacgtttttccgtgctgtgtaggggctaacaatggacacccagaaggacgttcaacctccaaagcagcaaccaatgatatatatctgtggagagtgtcacacagaaaatgaaataaaatctagggatccaatcagatgcagagaatgtggatacagaataatgtacaagaaaaggactaaaagattggtcgtttttgatgctcgatgaatgctgggaattcagaggaatgtcttcacttatacttggatttgctctcttcccatttctgattgttgtatagctttcgattttgcttacagtagttcccccttatcttcgggagatacattccaaggcccccagtgaactcctgaaacctcaaacagtaccaaacctttatacactgttttttccatatatatatacctatgataaagtataatgtataaattaagcatagcaagagattaataataatggtaatagaacaatgataacatactataataaaagttatgtgaatgtggttggtctctcttgctttcaaaatatcttcttgtacagtactccacctattttagaatgtggttgactacaggtaaccaaaaccacagaaagggaaactttggatgaggggggcactactgtacttaggaatacaactatatacatatgattttatttttaagaccatattatatttgggtatctactaatattttgtataaagcaattttttgttccattacgtgactttttggttttattgtatatgtaatttaacacacaataaagggtaaagttgcttccccaaaccacacttttaatcaaaacctagaatcatctgcagtccttgttaaaaatgcagggttctagaaccctctgaagttctgattaaatagattta

SEQ ID NO: 13808 - DNA, 3092 bp, Homo sapiens
tccgaggtgcagaagttgtctgagtgggttggtcggcggcagtcgggccagacccaggactctgcgactttacatctttaaatggatgagatggctaccactcagatttccaaagatgagcttgatgaactcaaagaggcctttgcaaaagttgatctcaacagcaacggattcatttgtgactatgaacttcatgagctcttcaaggaagctaatatgccattaccaggatataaagtgagagaaattattcagaaactcatgctggatggtgacaggaataaagatgggaaaataagttttgacgaatttgtttatatttttcaagaggtaaaaagtagtgatattgccaagaccttccgcaaagcaatcaacaggaaagaaggtatttgtgctctgggtggaacttcagagttgtccagcgaaggaacacagcattcttactcagaggaagaaaaatatgcttttgttaactggataaacaaagctttggaaaatgatcctgattgtagacatgttataccaatgaaccctaacaccgatgacctgttcaaagctgttggtgatggaattgtgctttgtaaaatgattaacctttcagttcctgataccattgatgaaagagcaatcaacaagaagaaacttacacccttcatcattcaggaaaacttgaacttggcactgaactctgcttctgccattgggtgtcatgttgtgaacattggtgcagaagatttgagggctgggaaacctcatctggttttgggactgctttggcagatcattaagatcggtttgttcgctgacattgaattaagcaggaatgaagccttggctgctttactccgagatggtgagactttggaggaacttatgaaattgtctccagaagagcttctgcttagatgggcaaactttcatttggaaaactcgggctggcaaaaaattaacaactttagtgctgacatcaaggattccaaagcctatttccatcttctcaatcaaatcgcaccaaaaggacaaaaggaaggtgaaccacggatagatattaacatgtcaggtttcaatgaaacagatgatttgaagagagctgagagtatgcttcaacaagcagataaattaggttgcagacagtttgttacccctgctgatgttgtcagtggaaaccccaaactcaacttagctttcgtggctaacctgtttaataaatacccagcactaactaagccagagaaccaggatattgactggactctattagaaggagaaactcgtgaagaaagaaccttccgtaactggatgaactctcttggtgtcaatcctcacgtaaaccatctctatgctgacctgcaagatgccctggtaatcttacagttatatgaacgaattaaagttcctgttgactggagtaaggttaataaacctccatacccgaaactgggagccaacatgaaaaagctagaaaactgcaactatgctgttgaattagggaagcatccctgctaaattctccctggttggcattggagggcaagacctgaatgatgggaaccaaaccctgactttagctttagtctggcagctgatgagaagatataccctcaatgtcctggaagatcttggagatggtcagaaagccaatgacgacatcattgtgaactgggtgaacagaacgttgagtgaagctggaaaatcaacttccattcagagttttaaggacaagacgatcagctccagtttggcagttgtggatttaattgatgccatccagccaggctgtataaactatgaccttgtgaagagtggcaatctaacagaagatgacaagcacaataatgccaagtatgcagtgtcaatggctagaagaatcggagccagagtgtatgctctccctgaagaccttgtggaagtaaagcccaagatgggtcatgactgtgtttgcatgtttgatgggcaggggaatgaagagagtgtaaaataaccaatctgaataaaacagccatgctcccaggtgcatgattcgcaggtcagctatttccaggtgaagtgcttatggcttaaggaactcttggccattcaaaggacttttcattttgattaacaggactagcttatcatgagagccctcaggggaaagggtttaagaaaaacaactcctctttcccatagtcagagttgaatttgtcaggcacgcctgaaatgtgctcatagccaaaacattttactctctcctcctagaatgctgcccttgacatttcccattgctgtatgttatttcttgctctgttatcttttgccctcttagaatgtccctctcttgggacttgcttagatgatgggatatgaatattattagacagtaattttgctttccatccagtatgctagttcttattcgagaactatggtcagagcgtatttggatatgagtatcctttgcttatctttgtagtactgaaaatttgccgaagtaactgggctgtgcagaatgtaatagaagcttttcttattcttttattcttaagatcagtatctttttacagtattctttctacatgatccttttttgtacatttaagaatattttgattatattaaacaagactgctgattttgctactttttttaaggggtcttcaagtaagtaaaacatacatcgtagctagaagaaaaatgtaccttaaatttgcatcttccctctcatacccaagctgtaaacaattgaaatattttgtcttaaatcacttggttcaatacatgcttatttgttttaaaacctgtatcatcaaactctctctctaaatttaaaatgctgttgaatatgatacttttgaggagagagtgtgctcagaacttagacgggatttggtaggccaagtatgctaagtgtacaatatattttttaattttacacctgaaacaaagaaatgtggtcactaaaaataaaagtatatatgtaggaattaatgtactcttgctttgtcaagctgtttgctatagtttccaaggtattatgttactctaactctgaaaagtgatgtaatctggtagcaatgtagtagttcaaataaaggcatttacataataaaaaa

SEQ ID NO: 13809 - DNA, 431 bp, Homo sapiens
ggagatagaagcctgtgtccagggccgaagtaccatgactgtgtctgatgccattcttcgatatgctatgtcaaactgtggctgggcccaggaagagaggcagagctcttctcacctggctaaaggagaccagcctaagagttgctgctttcttccaagatcgggtaggaggagctctccctcaccgcctcccagtgaagaaaaggaccatttagaagtgtgggctccagttgttgactctgaggttccttccttggaaagtcccactctcccacccctctcctcaccattatgctgtgattttggaagacccaaagagggaacctccactcttcagtctgtgaggagggctgtgggaggagatcatgctgtgccttttggaccctgggtcagtttaggaaacagttttggaaaagttgagctctcggttc

SEQ ID NO: 13810 - DNA, 699 bp, Homo sapiens
  misc_feature (1)...(699): n = a,t,c or g
cttgcatgaaggaaatgatttcctatgattctgcttactgcttaaaaaaattaatcaagttttctgcctgacaagtggtttccaaaaggaaaagctttgggagatagaagtcctcgttttgacctctgccctccttgtacaccaggagccagaaaaacttcatctcttttacaagaaacattgagattcctgtaaaattaagaaatcacacaatttgatggtctacattatctaaagcaaatgagacttctatttggaacaaagactaccttgttgggaaatgagtctgcaagttaaagtgttttctgggatcactctaagctccagtgtcaaggggtcaagtccttcaggaattctctgcctccactccctgtggcagagctagagtggctgccatgcttctgagctcagccagcatccagagagagagtgagatacagcctcctcttcttgaagcacccacttctaaactctgtgacagttttctttgaactctgttatgtggatctggagatgacaatgtcacagcactcccctctaagcctaaattcccccacaccgatgaactattaggtgagtttccttcaaatgtcatgtcttcactttatataggatagttaggatgtggtgggcggtagtgatagtcagagtatcaattagattacccagaaagcatagaggggacctctggncagcttc

SEQ ID NO: 13811 - DNA, 2243 bp, Homo sapiens
gagcaaagttaagagactcatcagattctgagctgctgcgggatattttgcagaagactgtgaagcatcctgtgtgtgtgtgaagcacccgccgtcagtcaagaaagcccggtgctttctctcagaactcatcaaaaagacgtgctgtattgcccagaagccatcgtgtccctggtcgggatcctgcggaggctggctgcctgctgggagcaccagcgggctcctgaggtctacgtggcctttaccgtccacaacccagagacgtgccagctgttcaccaccgagctaggctgggctgggatcatatgggaagcggaagctcatcatgaccagaaactgtttccctatggagagcacttggagatggcaatgctgaacctcacactgtaggactcatacacgactccaacgggattgtgagaatcaagtcactctcgtgggaagaatttttatatgggaaagcggataaaactttcattggactggaatgtttggagaatgttaaattccaaatcaggaaccacaaactgccctctaataagacatcggctatctaagcgtgtgggtgccccctttctgccagcagttctggttcttaagaaaatcaccataaatcagacatgaaaattctggctccaaaaatagcattttctttgtgcaaataaaaacgtgtgtatcaagtatgatgttcccccaacgtggacacactcagttcctcacaaagccaagcccactgcagctgccacatccctgggcttacggtgcagcaggtgcttttttcaagacaggaatcaaaatgttaggaacacggcagaaaggggacacctggagaccaaacgcaggatgaggagttctgcagaggtcacagggaagtcacagaacagtaatacgctagcaggggcatggggcgtgaagaacagaagaagagaggaagcgtttccaagcctccagagaagaaatcaaggccaaccaaagcttcccgggtcacagaaccaattcttttaccaggcagtaccactgctgtcatttcagcttctggccactgggaggtgctgctcgaaagggtttgccctgagactccaagaagaagctgcgggaaggacagcaggggtcctggggttttagcctctggcccaggagttatgtgtccataaccaaagggagcacagtctgcacccagctctcatcccatcggagctgctgcgactcccgcaggttcttccggaactggtttagcttgcccgcaggatcaggaaagtttgagaaaagcatctgcagctgagctgccagttcctctgagtcctcaaagaccaggccattttcttcatgtttcaccagctcatgtaaacacttgaagttcacagcacacacaggcaaacagcacccgaacatgtccaccaccttcatgggcaggtccaggccactggaggacgtgtgcagacagacacccaggtccgccgaccctagaagcagggggtagtcctcggcctccagccagggggtgcagacctggatgtgctggaagtgcttctggtggatgaggcggctataatactccctcagaggccctttgcctgttatcacacagacgagagaaggaaggttgtgtccatcaagagtcagttgttcaaacttttctaaagctgccagcaggatggagaagtcttcgtcctctgtccagctcgtgctgctgaccagcagggctgggccgctcacggagacgcgtcaccagcccgctcccagcatcccgctccgtgaaggccgaccgctccgtgactgggtcctcaggttctgagcgggccctgaacggagagtgcatgctgcccagcttcatgaagagccggtgctgcaggtccagaggtgtctctttaaagaaagatgcgggcttgtcgtagacggtcacagccctgatgtgccagttatccgccaggtcttctcgcatagcattggtaacacacaggttcaggtgggacaggcgcccaaagaacttctcgtaccacttggccagcagaacgaggggatggttggggccatgcaccagacccatgatggagtagccatagttgtgccagtcaatgacgagcttgcttccacaaaggcagcccacgaaccagcagacagcaatgctaggcagacctggggggttctggagaaagatataggcacctggctccctccacatcaacttccacagcaagtacatagcctgaagtacaactttgactccgtactggaaaactcgc

SEQ ID NO: 13812 - DNA, 1499 bp, Homo sapiens
  misc_feature (1)...(1499): n = a,t,c or g
gtgaacatggtcatttttggccacattgctgtttcatactaggacttgggatgatgtagccagaataaaactcaagttgcaccctccggttggtggaagattgctgaccgtgccgtttctgggcaggagaagacatcatggtgtccagcaactcagcaaagccattcttaagagtcgtgaggtccttctgaatgtaaaactgggagcccaggagaagctgtcccaggagggctgttaactccctatagagccaggagacaggataggggtttctagggtccaacaccagcttaccttggagtatgaatctacccatgaaggatgagagatgttttgaaaaactagccaggacacacccacaggatcctactggctccttagcagctgattggtgttacataattaacttaattggagatgcattaggtcacttgaatgtataagcaagcacctatggtaggcgctacagacatttaaatctcttgggaattcgatgctcccatggaatttataccagttatatgaattgacttaagtatcttgaaaaagaaactttagagaaagcatcaggggtgtgtactcagtatttcaaatcagaacacaagattggaacttttggaaaaatgggttcaagctttcctattagccatggaaatgcaaagtttagcagaagcaagcaattaggcagagaacaaaaatgttaagcatggtgttgtctatcttattgaagtggttggaaatgaaagcttttaatttgatagatttatcagtataaaattagggaaaccacgtgtggggaatgaatcaatttagagcttcgggaattgtgaggtgacttttgtaacttttgttctgtgtgtgacctgtgaaccactaggatgtgatctgcccttgtgggcangtccagcatagttaggagttaggctttagcataaatttctagctgcatctgagtctcctgggatgggtgctctttggctggttttggctgcggatggtgagatcagagcagctcttcctgctgctggcccctgcaatcagttgttgggatgccagtgcagatcactaagtagtaagattttaatcaaacatgaccaggtccgaaatgcaggtcatgagtgtgaaattctcaaatttacataaaaaagtagaagtatagacagtttaacatttggtattaaaggagaggaaattgtagcagcttttcacgtttcccagtccccattagagggcttgagaccttgtacctgaacaacccattttnactcagtgctttctgatgccttaggagaattgttttgtttcacaaaagctgggaaggaagaagtccattctgcagctgttagatctgcctctcaggaaaaagtactaacttgttctttttgttcctggctttcatcagtttgtgagatttctctattttttttaaatataattttatttctttcaacaaatataaaataaaaaacaactttggaacaaaaaaaaaaaaaaaaaaa

SEQ ID NO: 13813 - DNA, 1107 bp, Homo sapiens
tttttttttttttaacctatgaaaattctttattgttaatttctttctccaacagatatatttttagttgaaatatggagccacagcaacactttgacttttcctcttcagaagatgagacaggccggggtcatcattgttacaaaagcaaggcctgtgatcgtgacaaggacaggctggggcagagaccacacgctcaaccaggtatccaccaggtgtgggccctttataggagctacaaagagggggcagccagcaatgtggcctcgacacctgactccaggcactccgacctggaggagggagatgaaagaactcacctttccccaggggctcagccagacctccaggcccctgagtggggagagtgcgtgtgtgtgcacatgtgtatgagtgtgcacacgggtgtgctcactcacacagcacatgcacacatgcgctgcccctcctgagatgctctcaggtccctgccagggtagggttgtagctgtgttccccacagctgactgtcagctaaccagggctaggggtgagtgcatggtggaggacacagggtcttagcctgatgctcgaatcctccttctggaacaggctgatgggtgccagagcacagcacgaaccacctacccaccatggggctctcccagggctcggtcatttggctcctgtgcacttcatgacactcaggagcccctacggcccgagccccaagccccgagaaaggggaaagatttggttctgagagggtcccactggccctgggcacctaggggcctcagcatctaccagcataggggagggtggcggcccccttcctgaggactgcatctttctccagccgctctccccagatcccacacctgccagtgagccagggagataggaggaccacctccctcccagggaagggggtggcaggtggaaggacttaggtttggtgcaggaacactagacctgcccctcaccccctgcctccaggactgccattctgaactgcaattctgggcctgagtttggcttaagggccagtctgaagggacttgcttggtgaaggcccagccagctgtcccagtggcatttcataaacaaacgatactgtcccttccg

SEQ ID NO: 13814 - DNA, 2305 bp, Homo sapiens
  misc_feature (1)...(2305): n = a,t,c or g
ttttttttttactgattaagagcttaaatgtttatttaaaacagaaatgccaaaccactccactctcaacctttcaagcaacctggctaacaataaactagttcttctgcaacaatgttagagcagaggagtaactcaggttatactgtaactcaaaagcaatactactagaaaacttaaaacacctagcactgcataaagaaaaaaagcaggacaaaatttaaagagaattagctacagaaaaccattcaaaggcatttctactgcctcatcttttactcccatccccctttgaactggtttctgtttgcatacttgtttggtgggaaaaaaaatcatatggctgtcccaggcacaatatgggaaagtgcaaactgtctctaaggcacagaacttagattctcagccagattaatagcaaatctagacttcccaagggaatatgctagagaaaatgaccacagcgttccactgctagggaaaggctcccctatgaacaagaccagggcactcacccacccccggcactcactttcaccccaccttctcagcaacctgcccatgtccatcagctccatggcagaagcaatcctcatgatgaacacccaaactgacccagcctctcaggcctgctgagatgatgagcatgaggatacagggacatgacaggtcaatcggtcctcaagaaaatcaaagttgcatttacatgctgaaccaaaacccactgttacagtttatgacaacccccgcaagtccccagaacttgcaactttaatcaaagtttggctgcttcccttatttcaagaaaaggtttcagtgattacattagtactaatgtactaggcttcccagaactgagaaaacaatgggaacatcaaaccaaagaagatcccattgaacagagttgcctgtcccgagcaatggggttcctccccaagcatcagcctttatgccaccagttttggagaaatggcaaaatttccattgcacaagacctcccacaatgttgataagattatcaaacattttggtctggggaagatgaaacaaaattaatttagctgtttataggaaggtgggatgtgagactcatcaaaggtaggatgtgtgacacaaaataccacaggaacattttacaaggctaggtggaaatacaaagctcacatccttaaggaaaccatcaaatacttgcctagaactttctatatgaagttttgttcttctatgacactatttctctttggtaaagctagcttgtttctatctacaaagacacagtgagtacaggattagaagtgagctctcagccaaattccttttgcaagttctacctgttctgttaggcttcagggactcccagggtttggtgctggctttgggccactcaggtaggaaaaatgatacagattcattcgttaccacatggcttcataaaacaccaaaaggggaaaaatactgactagacattcagaaagaaagtggttggggctgctgatatcaagatcagaaccctaagagccatgaaggcagaggctcaaagaagtcttttcatgggcagaagactgagagccctctaagccctctctaagataccaagtagaggcagctaaaggaggacctcttctccttcatgattttctcttaaggctattctgactgccccatggactcaattctctgagacacctcatccctcagagacacctcatcccctcatccacagttaggaaatcccaccctgcattggtcacagcctgaaacaccagctgtgtgatgatgagggtcctgccctttctctattcctcactgaagaaatttcaatcaaccctcagaggaaaagcaacctaagcctacctttcctcctaaagcatttagctgcacagagtaactgaactttttcgaaacaagccctagattgactccatcagacatattttcctggactcagggctcccaagagggccagactacttcaccactctgcagaggacactgggcgggccacacctgattccagcccactccaactttacacttctcccttctcccacccagaggggtaatgcctggtactgaattcccaaggcagcttccaatcaatggtgaaaatgatacatgggatataagctgctaccagcgcaattaaggtgagcactgtgtctcctcttcaaaggtgggatcaacagatgaggtacagagctgctgttgctatggcagtcactgatgacaaaagnccagccatgggggcccttccattctccaaaacaataaaatcactcctagatcctatctaaaagcaatgccc

SEQ ID NO: 13815 - DNA, 4889 bp, Homo sapiens
  misc_feature (1)...(4889): n = a,t,c or g
gttcggcacagcagaatggtagataattcctgttccactttctttgatgaaacaagtaaagaagaaacaacacaatcatattaatagaagagtcttcgttccagacgcagtccaggaatcatgctggagaagttctgcaactctactttttggaattcctcattcctgggacagtccggaggcagacctgccactttgttttgagcaaactgttctggtgtggattcccttgggcttcctatggctcctgggccccctggggagcttctccacgtgtattaaatccagggaccaagagatcctcttaccaccaaactctatctttgctaagcaggtatttcgttggttttccttcttattctagcagccatagagctggcccttgtactcacagaagactctggacaagccacagtccctgctgttcgatataccaatccaagcctctacctagggcacatggctcctggttttgctgatccaatacagcagacaatggtgtgtacagaaaaactcctggttcctgtccctattctggattctctcgatactctgtggcactttccaatttcagactctgatccggacactcttacagggtgacaattctaatctagcctactcctgcctgttcttcaatctctacggattcctacggattcccagatcctgatcctgatcttttcagcattttcagaaaataatgagtcatcaaataatccatcatccatagcttcattcctgagtagcattacctacagctggtatgacagcatcattctgaaaggctacaagcgtcctctgacactcgaggatgtctgggaagttgatgaagagatgaaaaccaagacattagtgagcaagtttgaaacgcacatgaagagagagctgcagaaagccaggcgggcactccagagacggcaggagaagagctcccagcagaactctggatccaggctgcctggcttgaacaagaatcagagtcaaagccaagatgcccttgtcctggaagatgttgaaaagaaaaaaaagaagtctgggaccaaaaaagatgttccaaaatcctggttgatgaaggctctgttcaaaactttctacatggtgctcctgaaatcattcctactgaagctagtgaatgacatcttcacgtttgtgagtcctcagctgctgaaattgctgatctcctttgcaagtgaccgtgacacatatttgtggattggatatctctgtgcaatcctcttattcactgcggctctcattcagtctttctgccttcagtgttatttccaactgtgcttcaagctgggtgtaaaagtacggacagctatcatggcttctgtatataagaaggcattgaccctatccaacttggccaggaaggagtacaccgttggagaaacagtgaacctgatgtctgtggatgcccagaagctcatggatgtgaccaacttcatgcacatgctgtggtcaagtgttctacagattgtcttatctatcttcttcctatggagagagttgggaccctcagtcttagcaggtgttggggtgatggtgcttgtaatcccaattaatgcgatactgtccaccaagagtaagaccattcaggtcaaaaatatgaagaataaagacaaacgtttaaagatcatgaatgagattcttagtggaatcaagatcctgaaatattttgcctgggaaccttcattcagagaccaagtacaaaacctccggaagaaagagctcaagaacctgctggcctttagtcaactacagtgtgtagtaatattcgtcttccagttaactccagtcctggtatctgtggtcacattttctgtttatgtcctggtggatagcaacaatattttggatgcacaaaaggccttcacctccattaccctcttcaatatcctgcgctttcccctgagcatgcttcccatgatgatctcctccatgctccaggccagtgtttccacagagcggctagagaagtacttgggaggggatgacttggacacatctgccattcgacatgactgcaattttgacaaagccatgcagttttctgaggcctcctttacctgggaacatgattcggaagccacagtccgagatgtgaacctggacattatggcaggccaacttgtggctgtgataggccctgtcggctctgggaaatcctccttgatatcagccatgctgggagaaatggaaaatgtccacgggcacatcaccatcaagggcaccactgcctatgtcccacagcagtcctggattcagaatggcaccataaaggacaacatcctttttggaacagagtttaatgaaaagaggtaccagcaagtactggaggcctgtgctctcctcccagacttggaaatgctgcctggaggagatttggctgagattggagagaagggtataaatcttagtgggggtcagaagcagcggatcagcctggccagagctacctaccaaaatttagacatctatcttctagatgaccccctgtctgcagtggatgctcatgtaggaaaacatatttttaataaggtcttgggccccaatggcctgttgaaaggcaagactcgactcttggttacacatagcatgcactttcttcctcaagtggatgagattgtagttctggggaatggaacaattgtagagaaaggatcctacagtgctctcctggccaaaaaaggagagtttgctaagaatctgaagacatttctaagacatacaggccctgaagaggaagccacagtccatgatggcagtgaagaagaagacgatgactatgggctgatatccagtgtggaagagatccccgaagatgcagcctccataaccatgagaagagagaacagctttcgtcgaacacttagccgcagttctaggtccaatggcaggcatctgaagtccctgagaaactccttgaaaactcggaatgtgaatagcctgaaggaagacgaagaactagtgaaaggacaaaaactaattaagaaggaattcatagaaactggaaaggtgaagttctccatctacctggagtacctacaagcaataggattgttttcgatattcttcatcatccttgcgtttgtgatgaattctgtggcttttattggatccaacctctggctcagtgcttggaccagtgactctaaaatcttcaatagcaccgactatccagcatctcagagggacatgagagttggagtctacggagctctgggattagcccaaggtatatttgtgttcatagcacatttctggagtgcctttggtttcgtccatgcatcaaatatcttgcacaagcaactgctgaacaatatccttcgagcacctatgagattttttgacacaacacccacaggccggattgtgaacaggtttgccggcgatatttccacagtggatgacaccctgcctcagtccttgcgcagctggattacatgcttcctggggataatcagcacccttgtcatgatctgcatggccactcctgtcttcaccatcatcgtcattcctcttggcattatttatgtatctgttcagatgttttatgtgtctacctcccgccagctgaggcgtctggactctgtcaccaggtccccaatctactctcacttcagcgagaccgtatcaggtttgccagttatccgtgcctttgagcaccagcagcgatttctgaaacacaatgaggagaggattgacaccaaccagaaatgtgtcttttcctggatcacctccaacaggtggcttgcaattcgcctggagctggttgggaacctgactgtcttcttttcagccttgatgatggttatttatagagataccctaagtggggacactgttggctttgttctgtccaatgcactcaatatcacacaaaccctgaactggctggtgaggatgacatcagaaatagagaccaacattgtggctgttgagcgaataactgagtacacaaaagtggaaaatgaggcaccctgggtgactgataagaggcctccgccagattggcccagcaaaggcaagatccagtttaacaactaccaagtgcggtaccgacctgagctggatctggtcctcagagggatcacttgtgacatcggtagcatggagaagattggtgtggtgggcaggacaggagctggaaagtcatccctcacaaactgcctcttcagaatcttagaggctgccggtggtcagattatcattgatggagtagatattgcttccattgggctccacgacctccgagagaagctgaccatcatcccccagggaccccatcctgttctctggaagcctgaggatgaatctcgaccctttcaacaactactcagatgaggagatttggaaggccttggagctggctcacctcaagtcttttgtggccagcctgcaacttgggttatcccacgaagttacagaggctggtggcaacctgagcataggccagaggcagctgctgtgcctgggcagggctctgcttcggaaatccaagatcctggtcctggatgaggccactgctgcggtggatctagagacagacaacctcattcagacgaccatccaaaacgagttcgcccactgcacagtgatcaccatcgcccacaggctgcacaccatcatggacagtgacaaggtaatggtcctagacaacgggaagattatagagtgcggcagccctgaagaactgctacaaatccctggacccttttactttatgggctaagggaagctgggcttgaggaatgtggaacagcacaaaattctnggcaggaaggcccctggggtttaggaaaagggcttttaaggattaatttcttattttanttttatttttttattnaaatacagggtttccattccaaaagtgttgt

SEQ ID NO: 13816 - DNA, 797 bp, Homo sapiens
ggggtgaactcggggtccaccgcccgctgaggagatggatgaggacgggcttcctctcatggggtcaggcatagacctgaccaaggtgccagctattcaacagaaaagaacggtggcttttctaaaccaatttgtggtgcacactgtacagttcctcaaccgcttttctacagtttgtgaggagaaactggcagacctttcacttcgtatccaacaaattgaaacaactctcaatattttagatgcaaagttgtcatctatcccaggcctagatgatgtcacagttgaagtatctcctttaaatgtcaccagtgtcacaaatggagcacatcctgaagccacttcagagcaaccacagcagaacagtacacaagactctggactacaggaaagtgaagtatcagcagaaaatatcttaactgtagccaaggatccaagatatgccagatatctcaaaatggttcaagtgggtgtaccagtgatggcaataagaaacaaaatgatatcagaaggactagacccagatcttcttgagaggccagatgctccagtgcctgatggcgaaagtgagaaaactgtagaagaaagttcagatagcgaatcttcttttagtgattaagcttaattttgataagaattacatatgcatgcataggggtacatttacattctgtaagagattgagcctgaactctcttagtcataaaaacatcaaatggccacatgtccactaccaagcttcttctatgttaaaaaaataataataaagcagttttaacctgccaaaaaaaaaaaaa

SEQ ID NO: 13817 - DNA, 582 bp, Homo sapiens
ggagcttctgctgctgaccccatgctgagtggccagtggggagcggcgcccggcaggctcttctggggtcgtctgtcctatccgtggattgtatatactcttctctgttaaggagtttttcccaagaagaaaagtatttaaaagaaataccagtgagtgccttaaagttggagaagtaactgcccatgcccagaaataaggatgccagtgcccagaagcagtgagattagtctgtgtccacaagcagaggccccctcgatgggagggagtggcaggcaggagaaggtggcgctgccaggtgcccgggtctattggaggcgccccatctcagacttcctaacacagcctgtgtggaaggcagaacaaagaatgcatgcccagtcagaaatctgttctattctgctccaggaaaatcggaaacctgtgagtcagagtcagagaaacttacccaagcaacgtaattcctgttttcatgggtcctgtagatgtttgagtcaggaaggtaaggcggggagtgactgaataaactctgccttttaaattgagcatcttggccgggcatggtggctcacgcctgtaccc

SEQ ID NO: 13818 - DNA, 547 bp, Homo sapiens
  misc_feature (1)...(547): n = a,t,c or g
ggcaaaagtctgacacccgtggcacagagcgccccagatatggagggtttcacaggctcatgtgtggcttcttcagtcctctcttcattcactcatgtattcatttattcaacgacatattactaaggaacctccttaagccgggatgctgaacgtggaaaaataggtgaaatataattttacccctgagaagctcataggctaaaaaaaatattgatttgggataaatgtatgttaagttgactcttgaacaatgtgggggcttggggcaccaaccccctgtgcagttgaaaatcgacatataactttgactcgccaaaaacttcactacaatagcctgctgccaacctgaagtcttaccaataacatcaacagtcaattaaacatattactaggctgaaaaggagaaggaagtgaaggggttggtcttgccgtctcacgagtggcagaggcaggagaaaatccaaatgacaggcagaaggatgccttcttccacgcaagcactgaaccaaaccacagtanaagaaacagaatcaaatgagagaga

SEQ ID NO: 13819 - DNA, 2178 bp, Homo sapiens
tttttttttttttttactgtttcaatgctttattaacagttggaaacaaaaccaacaaactggaggtgatgacatcccagaagcctatgaggcaagggaaataggtttgcattttgtccctcacacctctctctctctctctttttttttattaaatgcatcttagcaaaagtagattaaaaaagaaagggtcaaagccccagatgtcagcgagcagggaggaggtgacccaggggagcaacagacgccctgcatcagagtcctcccaggaatagtccaaaggagctgctcttgcccctttatacacaagcgccacaaccaaaaccctccctcctggcaataaggcctcactatagttgccctcatgcttccctaagctctctcttgctctaataactctaattctgggccaagccccaagagtgccattctttcttcctagctggggatggaaagctgagaggggcacaaggagggcaaaagtatcaccctaagccagagaattgcagcttcctgtggttggggccaccaaacagttcagtgtgcccacccactttctctttttagaagagagctggggtacagtgtatgaaggcactccctggtgcccagttccccagaatgtccagttagcatctgcacatttggcttgatacatttatacatttataaaaaactctgtggtcttagagttcctgctactcttaggcctggcccagctcaaccagagaaggggttcctcctgtgtcggattccctgggagagaggatctgccttggactcaagggtccagaaggtccaggggcacattcaggattgggcctgtgagaagaaatcccagaactctgtaacctgccaccaaagcttcttacattatggaggggaaagggggaaggaacagttttctttaaaaaaattttttttttcatacaaaaatagatccatttgcaaaacaatttctcagccaggaggctccacctcccatttccttgtagacagagggtgaggtgttgggatggtcacagtacaacccatagtccagatgagatgcaccaaagctcagggaaggcatgaggagggaaggtggctcagtagcctggggttggtgcagagctccagagaggcaagggcataagcctggcagaagctggggcaggtccacactgtcgctatgccctgcctgactgcccacaggctctggcctgggcccaccagcacagcagggaaactggtccagatcctttgctttggaggcctttcccaggaaggtggggtaaaggtgggatttgctccctgcgttgttaggagcagctcccagttgccacaccactaataatagattaccacagccggggtggggaagagcagagacaacggcattgaaggagggatctagcccaaaggtttacaagccccatgctattctcagggccagagaaaccacaaaagaaaagcacaaatccagcaagactgacctaggggggaaagccccattagaaagtcagggctgagaaaaagcaggctgggcccttgtctgaagatgaggccctctgagtaacagagaggagacagggttaaggcagcaaacatggaccctgctttggtaatacaacagccagggctggctaagtcgggctcaggcctcccctgcactgccctttccttctggcctccaggcagctgaagctgtatgtgatgttgagagagcagcaggccagagagaaagacagggtcagggtggtgggagtggccaccccagaggaatatccccttgagcctttaggcacatgctgcagggcaggacagtctgcggctccgctgaggagctgccgcggtcacaggacccacattagcttgcacggccaaccaactccttggcttcctcaaggattgtggggaatgtctcactgttcttggacaccttggcaggaacagcagccatggcatcatccttggtcagctccgaagctagcagagatgtgactgcacacccggccttcctgttggcttgacggggccctctcttccgtcggaatgctgcccctgactgcagggcttctagaagactgtccatcacacctgtctcatcgccctctgcattcatgtctatgagttgctctctcttctgctgcttctctagccgctccttctctgccttctccttggctagttttgctc

SEQ ID NO: 13820 - DNA, 5520 bp, Homo sapiens
agccggccgtggtggctccgtgcgtccgagcgtccgtccgcgccgtcggccatggccaagcgctccaggggccccgggcgccgctgcctgttggcgctcgtgctgttctgcgcctgggggacgctggccgtggtggcccagaagccgggcgcagggtgtccgagccgctgcctgtgcttccgcaccaccgtgcgctgcatgcatctgctgctggaggccgtgcccgccgtggcgccgcagacctccatcctagatcttcgctttaacagaatcagagagatccaacctggggcattcaggcggctgaggaacttgaacacattgcttctcaataataatcagatcaagaggatacctagtggagcatttgaagacttggaaaatttaaaatatctctatctgtacaagaatgagatccagtcaattgacaggcaagcatttaagggacttgcctctctagagcaactatacctgcactttaatcagatagaaactttggacccagattcgttccagcatctcccgaagctcgagaggctatttttgcataacaaccggattacacatttagttccagggacatttaatcacttggaatctatgaagagattgcgactggactcaaacacacttcactgcgactgtgaaatcctgtggttggcggatttgctgaaaacctacgcggagtcggggaacgcgcaggcagcggccatctgtgaatatcccagacgcatccagggacgctcagtggcaaccatcaccccggaagagctgaactgtgaaaggccccggatcacctccgagccccaggacgcagatgtgacctcggggaacaccgtgtacttcacctgcagagccgaaggcaaccccaagcctgagatcatctggctgcgaaacaataatgagctgagcatgaagacagattcccgcctaaacttgctggacgatgggaccctgatgatccagaacacacaggagacagaccagggtatctaccagtgcatggcaaagaacgtggccggagaggtgaagacgcaagaggtgaccctcaggtacttcgggtctccagctcgacccacttttgtaatccagccacagaatacagaggtgctggttggggagagcgtcacgctggagtgcagcgccacaggccaccccccgccgcggatctcctggacgagaggtgaccgcacacccttgccagttgacccgcgggtgaacatcacgccttctggcgggctttacatacagaacgtcgtacagggggacagcggagagtatgcgtgctctgcgaccaacaacattgacagcgtccatgccaccgctttcatcatcgtccaggctcttcctcagttcactgtgacgcctcaggacagagtcgttattgagggccagaccgtggatttccagtgtgaagccaagggcaacccgccgcccgtcatcgcctggaccaagggagggagccagctctccgtggaccggcggcacctggtcctgtcatcgggaacacttagaatctctggtgttgccctccacgaccagggccagtacgaatgccaggctgtcaacatcatcggctcccagaaggtcgtggcccacctgactgtgcagcccagagtcaccccagtgtttgccagcattcccagcgacacaacagtggaggtgggcgccaatgtgcagctcccgtgcagctcccagggcgagcccgagccagccatcacctggaacaaggatggggttcaggtgacagaaagtggaaaatttcacatcagccctgaaggattcttgaccatcaatgacgttggccctgcagacgcaggtcgctatgagtgtgtggcccggaacaccattgggtcggcctcggtgagcatggtgctcagtgtgaacgttcctgacgtcagtcgaaatggagatccgtttgtagctacctccatcgtggaagcgattgcgactgttgacagagctataaactcaacccgaacacatttgtttgacagccgtcctcgttctccaaatgatttgctggccttgttccggtatccgagggatccttacacagttgaacaggcacgggcgggagaaatctttgaacggacattgcagctcattcaggagcatgtacagcatggcttgatggtcgacctcaacggaacaagttaccactacaacgacctggtgtctccacagtacctgaacctcatcgcaaacctgtcgggctgtaccgcccaccggcgcgtgaacaactgctcggacatgtgcttccaccagaagtaccggacgcacgacggcacctgtaacaacctgcagcaccccatgtggggcgcctcgctgaccgccttcgagcgcctgctgaaatccgtgtacgagaatggcttcaacacccctcggggcatcaacccccaccgactgtacaacgggcacgcccttcccatgccgcgcctggtgtccaccaccctgatcgggacggagaccgtcacacccgacgagcagttcacccacatgctgatgcagtggggccagttcctggaccacgacctcgactccacggtggtggccctgagccaggcacgcttctccgacggacagcactgcagcaacgtgtgcagcaacgaccccccctgcttctctgtcatgatcccccccaatgactcccgggccaggagcggggcccgctgcatgttcttcgtgcgctccagccctgtgtgcggcagcggcatgacttcgctgctcatgaactccgtgtacccgcgggagcagatcaaccagctcacctcctacatcgacgcatccaacgtgtacgggagcacggagcatgaggcccgcagcatccgcgacctggccagccaccgcggcctgctgcggcagggcatcgtgcagcggtccgggaagccgctgctccccttcgccaccgggccgcccacggagtgcatgcgggacgagaacgagagccccatcccctgcttcctggccggggaccaccgcgccaacgagcagctgggcctgaccagcatgcacacgctgtggttccgcgagcacaaccgcattgccacggagctgctcaagctgaacccgcactgggacggcgacaccatctactatgagaccaggaagatcgtgggtgcggagatccagcacatcacctaccagcactggctcccgaagatcctgggggaggtgggcatgaggacgctgggagagtaccacggctacgaccccggcatcaatgctggcatcttcaacgccttcgccaccgcggccttcaggtttggccacacgcttgtcaacccactgctttaccggctggacgagaacttccagcccattgcacaagatcacctcccccttcacaaagctttcttctctcccttccggattgtgaatgagggcggcatcgatccgcttctcagggggctgttcggggtggcggggaaaatgcgtgtgccctcgcagctgctgaacacggagctcacggagcggctgttctccatggcacacacggtggctctggacctggcggccatcaacatccagcggggccgggaccacgggatcccaccctaccacgactacagggtctactgcaatctatcggcggcacacacgttcgaggacctgaaaaatgagattaaaaaccctgagatccgggagaaactgaaaaggttgtatggctcgacactcaacatcgacctgtttccggcgctcgtggtggaggacctggtgcctggcagccggctgggccccaccctgatgtgtcttctcagcacacagttcaagcgcctgcgagatggggacaggttgtggtatgagaaccctggggtgttctccccggcccagctgactcagatcaagcagacgtcgctggccaggatcctatgcgacaacgcggacaacatcacccgggtgcagagcgacgtgttcagggtggcggagttccctcacggctacggcagctgtgacgagatccccagggtggacctccgggtgtggcaggactgctgtgaagactgtaggaccagggggcagttcaatgccttttcctatcatttccgaggcagacggtctcttgagttcagctaccaggaggacaagccgaccaagaaaacaagaccacggaaaatacccagtgttgggagacagggggaacatctcagcaacagcacctcagccttcagcacacgctcagatgcatctgggacaaatgacttcagagagtttgttctggaaatgcagaagaccatcacagacctcagaacacagataaagaaacttgaatcacggctcagtaccacagagtgcgtggatgccggggcgaatctcacgccaacaacaccaagtggaaaaaggatgcatgcaccatttgtgaatgcaaagacgggcaggtcacctgcttcgtggaagcttgcccccctgccacctgtgctgtccccgtgaacatcccaggggcctgctgtccagtctgcttacagaagagggcggaggaaaagccctaggtcctggggaggctcctcagagtttgtctgctgtgccatcgtgagatcgggtggccgatggcagggagctgcggactgcagaccaggaaacacccagaactcgtgacatttcatgacaacgtccagctggtgctgttacagaaggcagtgcaggaggcttccaaccagagcatctgcggagaaggaggcacagcaggtgcctgaagggaagcaggcaggagtcctagcttcacgttagacttctcaggtttttatttaattcttttaaaatgaaaaattggtgctactattaaattgcacagttgaatcatttaggcgcctaaattggttttgcctcccaacaccatttctttttaaataaagcaggatacctctatatgtcagccttgccttgttcagatgccaggagccggcagacctgtcacccgcaggtggggtgagtctcggagctgccagaggggctcaccgaaatcggggttccatcacaagctatgtttaaaaagaaaattggtgtttggcaaacggaacagaacctttgatgagagcgttcacagggacactgtctgggggtgcagtgcaagcccccggcctcttccctgggaacctctgaactcctccttcctctgggctctctgtaacatttcaccacacgtcagcatctaatcccaagacaaacattcccgctgctcgaagcagctgtatagcctgtgactctccgtgtgtcagctccttccacacctgattagaacattcataagccacatttagaaacagatttgctttcagctgtcacttgcacacatactgcctagttgtgaaccaaatgtgaaaaaacctccttcatcccattgtgtatctgatacctgccgagggccaagggtgtgtgttgacaacgccgctcccagccggccctggttgcgtccacgtcctgaacaagagccgcttccggatggctcttcccaagggaggaggagctcaagtgtcgggaactgtctaacttcaggttgtgtgagtgcgttaaaaaaaaaaa

SEQ ID NO: 13821 - DNA, 856 bp, Homo sapiens
acacacacacacacacacacatttataacttaggtgctcttttgcgctatatactttaattcatgcaaaagtgatagaggactggacttgaggctctacagaggcctttctgagaaagctgtgtagctccttactctggcgaagaacaagggggtgtacatcttgtcaatctcaaaagcactgactgcagtctcaccagttgatttgtaagtaatgtgacaagaatgatgtatccagatgagtttgttgaacctctggtgaccactggaacatagctgtagccccacatgaaaactctgatctgcttcttgtacagggacacgacgaaaatatctgtatttatagtcaagtggtttttcttcttttttcttagttattacagcaaatactttggtctgattgtctgtgtcttgtgacaagcgatagtgacccagtagaattgcatcagtcctggtattcctagttcttaaacgtggaacaatggactgaggctcttcaggggttgtcaacatcatcacatggccatcaggaaagaatcttatgtacctgtaatattccacttggtgccaggctctatagaaaccatcaagagactgttccccttgacgaatatatgtggttttactgatatacacgccatcaaaccgaacacgaggccgttctaaaaacatctctctccaggacgtgtacggaacaagtttaatacagcttctgcccccaaactttcaagcaggccagacgccatatttcagggtctctggcacagatgtagaatcctctgcacaccagcgacaactgctccaatgatctgaggtccaagtcactagacaccacccatcggaagatgtacatcagg

SEQ ID NO: 13822 - DNA, 943 bp, Homo sapiens
  misc_feature (1)...(943): n = a,t,c or g
gctgagctccggctgttgggacggacgcactcggcctgcgatgctctgcggacgctggcagaggcccggcgcctctttcccgggcgcgtgtctgtggacttgatgctggggctgccggcacagcaggtggggccgtggcttgggcagctgcaggaactgctgcaccactgtgatgaccacctctccctctaccagctgtccctggagcggggcaccgcactcttcgcccaggtgcagcggggtgcccttccagcccctgacccggagctcgcagctgagatgtaccagaggggccgggctgtccttcgggaggctggcttccaccagtatgaggtctccaactttgcccggaatgtaagttctggggctgatggctggaggtggaggatgggcagactgcagtgtgaccagggcgttgtgaccttctgaagagaaggatcctggccgagatggtgggacattctaacctggggccccttacctgagtctaaaaatgaggcctgccctcttcactctgcactatttcctccctccccgcagggggcgctcagtacccacaattggacttactggcagtgtggtcagtaccttggcgttgggcctggtgagtcccgtgaactacagaaagggtgactcaggagaggaatgtcgtggctgtgtgaacttgggccacattaacctctccaagcctctattttctcatatgtaaaatgtgggcaaaaaataatgacctccctatagaacttgtttggagcatgaattataaggggcttaatgttgcaccttgcactagnnnnnnnnnnnnnnnnnnnnnnnnnnnnnnnnnnnnnnnnnnnnnnnnnnnnnnnnnnnnnnnnnnnnnnnnnnnnnattcccaattggacagggctagaggagagcccaagaatttatatgtcttggcattttgggatagatgattaaa

SEQ ID NO: 13823 - DNA, 2821 bp, Homo sapiens
gctcggtcgggcgctgtctccctcggctctgcgggtgtcagttcgtccggcttcctcacagcccctcactcccggcggctgacagcagcagcggcggcggcgggcggcgcctggcgtttcgaggctgagcggcaccggggttggggcgcggaggaggagcagcagcgggaggaggagccgtgtgccctggcactgagcggccgcggccatggcgtacgcctatctcttcaagtacatcataatcggcgacacaggtgttggtaaatcatgcttattgctacagtttacagacaagaggtttcagccagtgccatgaccttactattggtgtagagttcggtgctcgaatgataactattgatgggaaacagataaaacttcagatatgggataccggcagggcaagaatcctttcgttccatcacaaggtcgtattacagaggtgcaggcaggagctttactagtttacgatattacacggagagatacattcaaccacttgacaacctggttagaagatgccccgccaggcattccaattccaacatggtcattatgcttattggaaataaaagtgatttagaatctagaagagaagtaaaaaaagaagaaggtgaaggcttttgccacgagaacatggactcatcttcatggaaacgtctgctaagactgcttccaatgtagaagaggcatttattaatacagcaaaagaaatttatgaaaaaattcaagaaggagtctttgacattaataatgaggcaaatggcattaaaattggccctcagcatgctgctaccaatgcaacacatgcaggcaatcagggaggacagcaggctgggggcggctgctgttgagtctgtttttactgtctagctgcccaacggggcctactcacttattctttcaccccctctcctcctgctcagctgagacatgaaactatttgaaatggctttatgtcacagaagactttaatccgtcaaattcttgtataactttgaataaatggttaatgttcacttaaaagacagattttggagattgtattcatatctatttgcatttgatttctaggtcaattgatgtgattatttttgttaaatgttgtcttgtgcccttaactacggaactgaattgtattaaacactacaaagtcatcttgagtattttaaatcggtttgtgtagttaggtttcccaacatctgtggttacctaatgtttaatattatagaactgtcctcagaaactttgtcaattttcacggctataaggaaacagaaggactcttttaattctgtatttatcatttactttctgtatatatagtttaataacctgcttgggtgtaatttgccaagcttgaattctttaatgcatttgcataaattctatactgtttagagcttaaagctacagaagcattgttaggaattgcttggacactgaattttaaactttttgacattgttaacaagcatgttcatcttttcttgtcactagtccaagaaaaatatgcttaatgtatattacaaaggctttgtatatgttaacctgttttaatgccaaaagtttgctttgtccacaatttccttaagacctcttcagaaagggatttgtttgccttaatgaatactgttgggaaaaaacacagtataatgagtgaaaagggcagaagcaagaaatttctacatcttagcgactccaagaagaatgagtatccacatttagatggcacattatgaggactttaatctttccttaaacacaataatgttttcttttttcttttattcacatgatttctaagtatatttttcatgcaggacagtttttcaaccttgatgtacagtgactgtgtaaaatttttctttcagtggcaacctctataatctttaaaatatggtgagcatcttgtctgttttgaaggggatatgacaataaatctatcagatggaaaatcctgttacaaagtagaaaagctttagtaatttactcagtgtggtggttttatcctttttttctttttctcccttggtccataatgaaattgttaccagcagtgccaaaataaaaccccatgtataaaagtgttccttttttttattatgaccccaccctcttttttaatgtatttttagtcccacttacagcttttacatgggtttaagcatgttttttaaaagggtcagaatggttaacactcaaccctttttaaaaattttgctaaaatgcgacaaatctcaccatactgaaattatttttgttgatggtgtaagcagtgtaagcaagtgttttctcctgaactagcacaaaagcacttatgcctgaaagaaagcataaagaagttctaactctgaaactaactactttcatttcgctcatggccttcaactttctacaggtcttccctgaagattcagcagtactctctcaaaggtttgacagtactcttgtgggaaatcaccaaatgctgtcatagttttgttttaactgtctccttgagggcagagggaagggtgagagaaaatctgttttcatgggtatttgtagtacagcctttttttctttcaagtggctgtatcaaattcactggtcttactaatcactgtctttaccagtgagtacaaaaagttaaggcaactaggacaggtactgctctataccaagaagagaatgattctttggaaattgttatttttaagcttctgttaatttttccagaagtttagtgcgtttcttttcccatactttctcccctaattcttttatttgaagaagagaacttaatggcaaataaacaacaaaccaggacatgcatttt

SEQ ID NO: 13824 - DNA, 439 bp, Homo sapiens
gattggtgtgggcttcgttttgcctttagagtcacatctttcagtaaattcacagagatcaagagggacgtgcaacatacagcttaaaggctgttatgcttcagggttgctgaagaagatgaaacatcagcctgccatcgtctagaagagacattggcagttaaaaattagcacctccagtgtagtcgcctggcactgcccatcatgctgagggagcagattcttcccaaggcagcttcagctaggagtttgtaagcaaggactttgtgacacatttgtcccctggaactgagcctttttaactgtccctgtgaatgaacaattttgagtgacctacggtttgtgttaattagtgttctttccagattccaggtaccgtagagagtatgttctttgtggtggttgtgccttttaaagaacatttgtgggccgggcacag

SEQ ID NO: 13825 - DNA, 295 bp, Homo sapiens
gagcttctcaatccggtggactggaacttcgcacagccagaagccaagagcaggccagaaggcaacgggcagctgctgcggaagaagaggccatagctgctccagccggggctccggggcggcagcagagctggcacaccgattctgggaagccccgcgaatgatggcttttgaattaatgaggcagtgaatgttttgtgtttacttctaagggaaatactaactttctttcgcattagtattaattttgaagtagctacaaagtatttttaagaaattataattttatgactgt

SEQ ID NO: 13826 - DNA, 1595 bp, Homo sapiens
acatattaaaatttattttaaaaatacaccacatcagaaagcatattttacagtggtaaagcagcagtttttatttattacaaattctaaaaaagaatccaactttataagtaaaaaggaacactgatgatcacttaaaacatttaaatttaaaattactactaaaaaaaccctgtacattcacacaagtccaatgcctttgttggtttttacagacatagaatttctgtagggttttgggccctatcaacaatttttattaagtactgcaataacaaaatacagcaataaaacaactggacactcctaggggacaccaaagataaagggcccattaatcaggtgtaggccagagaaacccaacctgttggcaatatgacgctctttcccaactgggtcttggtgagacacgtggcacagcaaggctgtcagtgcatgtgcataaattgtagaccaggtcccactatgctacttcaggattcagccagcccttctatgagtcacagaggtcccttggtccttattcatcttgatatactcatgggatgtttggaattaaggagcccaaactaccttacttgcatttgaagtctttcacttcatatcctaccccatcagtctaagagcccacccaacaagggtagctacacatagatgctcacactctataggctgcctgatccctggaacccagcctggggccctgattatgatctccacggggctgtcagtggctagggaaagctctttaagacccagcgatcatgggcagtggcatcaaccatggtgaatcaaagttaagtataatgctcccagcaaacagtgttaccagttgggttgagcaataacaaaatgcatttgaaatcagtaagactaaaccgtgtatatacaaacaataatgaatattacaaacaccaacaaccacaacaataacagatcaggcttctcaaaatccagaaaccggaaggctattttaaagtgtttaatataatcatgtaaggaaaaaaaatctccccaaaacaataaagtcaagcaatttcatatctatatgaacttattttcatatctatatgactaaaaaatgaaaatgacctttgctggcattattgctacgcgaatatccatactttcccccttgatatttaaggacatgtgggagaactttataaacaagtaaagtgtgcagagaaggcactgttttggcactagcaaaaaggacagttaatttcacatgaatcacgtgaactttaataacgcatgatatacatgctaaactcaatcctttaaagccctgcggaaactgtattttttgtggtaacagttgcttgaagcgtattaggagaaatcatgagcagtatcaccggaaagggagagtcagaatcttggcatgatttcatcacgccaaggtgtgatgttctgtaatctcggaacacaccctgatttaagaggagggaaggcaaggctcaagtgctccctctgtcatcatgggtattggaggccgatggcttttccttatgcttcctgctaagcatttaaataaatttagaaaataggtaaaaatagattctaattaaagtgttttatttttattttta

SEQ ID NO: 13827 - DNA, 949 bp, Homo sapiens
  misc_feature (1)...(949): n = a,t,c or g
actgctttgtcttgaagacagaacgatgccaaagaaagcaaagcctacagggagtgggaaggaagaggggccggctccctgtaagcagatgaagttagaagcagctggggggccttcagctttaaactttgacagtcccagtagtctctttgaaagtttaatctcgcccatcaagacagagacttttttcaaggaattctgggagcagaagccccttctcattcagagagatgaccctgcactggccacatactatggggtccctgttcaagctaacagatctgaagagtctgtgcagccgggggatgtactatggaagagatgtgaatgtctgccggtgtgtcaatgggaagaagaaggttttaaataaagatgggcaaagcacactttcttcagctgagaaaagattttgatcagaaaagggcaacgattcagtttcaccaacctcagagatttaaggatgagctttggaggatccaggagaagctggaatgttactttggctccttggttggctcgaatgtgtacataactcccgcaggattctcagggcctgccgccccattatgatgatgtcgaggttttcatcctgcagctggagggagagaaacactgggcgcctctaccaccccacttttgcccctggcggatggagtacagcgtgggaggccgagggaaaggattcggcaggccggtgcatgagtttatgctgaagccgggtgatttgttgtactttcccagaggaaccattcatcaagcggacactcctgcggggctggcccactcgactcacgtgaccatcagcacctaccagaacaattcatggggagatttcccttttggataccatctcggggcttgtatttgatactgcaaaggaagacgtggagttacggaccggcataccccngcagctgctcctgcaggtggaatccacaactgttgctac

SEQ ID NO: 13828 - DNA, 438 bp, Homo sapiens
  misc_feature (1)...(438): n = a,t,c or g
ggggccatctgaggcacactgcacagaaaatggaacctggagccacccagtccctctctgcaaaccaaatccatgccctgttccttttgtgattcccgagaatgctctgctgtctgaaaaggagttttatgttgatcagaatgtgtccatcaaatgtagggaaggttttcngcatcattncctgcaaccccgacganacgtggncacacnacaancgccaaatgcgaaaaaatctcatgggggccaccanctcacgtnnaaaatgcaantgctcnangcgtcnttaactatacnggnnacntganncctactcatgttnccntttgacctgttgtnccattctgggnatattcnccngganttnnntgttgcngtataantacncatgccacggtatttatgngggcttttnnnatgggnngnctttnaaccncccaa

SEQ ID NO: 13829 - DNA, 474 bp, Homo sapiens
ttttatgtctagaaacttttaaacagacttgtaaataactcaagttaaaggggtagcaggaccagaaagaacctagacttccaaataaccagtgtagttcatgatctagtccttttgttcatataaagctatttgttttaaaatagttgctgaattacatgaaagggtgagaaagtgggagagacagaaaggcagagacaaaacaaggtgggctgggaaagggattcactggagcaacgagttcagtgtatggaagaattgaagggtcagatagttattaccagccaggttcagcaaagcctagaaggatctgctggtctcagtgacctgggcaggcaaacaccacccagcggaggccaggggaagacaccagcaagcaggccagatcctttgagcttggatcgtagggtagattctatttgcttctaatcctttagtgcagatgagctcctgtgtgcagaggagagaggtggc

SEQ ID NO: 13830 - DNA, 2804 bp, Homo sapiens
attttttcttgtcggctcctgtgtgtaggagggatttcggcctgagagcgggccgaggagattggcgacggtgtcgcccgtgttttcgttggcgggtgcctgggctggtgggaacagccgcccgaaggaagcaccatgatttcggccgcgcagttgttggatgagttaatgggccgggaccgaaacctagccccggacgagaagcgcacgaaccgtgcggtgggaccacgagagcgtttgtaaatattatctctgtggtttttgtcctgcggaattgttcacaaatacacgttctgatcttggtccgtgtgaaaaaattcatgatgaaaatctacgaaaacagtatgagaagagctctcgtttcatgaaagttggctatgagagagattttttgcgatacttacagagcttacttgcagaagtagaacgtaggatcagacgaggccatgctcgtttggcattatctcaaaaccagcagtcttctggggccgctggcccaacaggcaaaaatgaagaaaaaattcaggttctaacagacaaaattgatgtacttctgcaacagattgaagaattagggtctgaaggaaaagtagaagaagcccaggggatgatgaaattagttgagcaattaaaagaagagagagaactgctaaggtccacaacgtcgacaattgaaagctttgctgcacaagaaaaacaaatggaagtttgtgaagtatgtggagcctttttaatagtaggagatgcccagtcccgggtagatgaccatttgatgggaaaacaacacatgggctatgccaaaattaaagctactgtagaagaattaaaagaaaagttaaggaaaagaaccgaagaacctgatcgtgatgagcgtctaaaaaaggagaagcaagaaagagaagaaagagaaaaagaacgggagagagaaagggaagaaagagaaaggaaaagacgaagggaagaggaagaaagagaaaaagaaagggctcgtgacagagaaagaagaaagagaagtcgttcacgaagtaggacactcaagccgaacatcagacagaagatgcagcaggtctcgggaccacaaaaggtcacgaagtagagaaagaaggcggagcagaagtagagatcgacgaagaagcagaagccatgatcgatcagaaagaaaacacagatctcgaagtcgggatcgaagaagatcaaaaagccgggatcgaaagtcatataagcacaggagcaaaagtcgggacagagaacaagatagaaaatccaaggagaaagtgcagcgtaagtatgcacagatgaagatggaactaagccgagtaagaagacatacaaaagcctcttctgaaggaaaagacagtgtagtcctgcaaaacattttgagcgttggtgttgtgagcggcccatgaaaagccaaattaaaaatcaaggattcagtcaaactaagcaggtactcatgccaggtactcctttctctacccacatccatgtttgaatgctattgcctgtgatctttacgcttaactgttgtgtatcttttttgttctttacaagaagtgcagaggggttttttgtgtattgcgtgaaaacttataaaacaaatgttaacagaatggaattttttttcaactgtatgtagggctgcagtggtggccagaattagatatctttaaagaattttaaatacaataaacacttcatattattcgccttgttacactcaatgcaattctcaagtctataagaggtatgtgcttaatatttcctactgtgtagggaggaatttgcagtcagccatagggtatgtagggaatagtcactcactggctgatacatttcaagcagcagtgtgaatagcaaggacagacaccttcaatttgtgaaatcaaagaactgatgcactatatagaacgaatttgggtttttaaagaaatattaaaagttaggtactgtaagtgttcttaaaacctgtaaacttcattctgtgggctagtggtgtgggacaaaatattcctaatgaaaggaagtaccaattagttgatttgttggtggcattccccttttgggaaagcaatgtaaggttatgtctgtgtatgtcattcacacttaggcaagcatacacaggcacatggctttaagaaccacactgatgccttgataattaaaaagaatacaagcattccatgtacacatgttaattagcagttagtgactgggccaacactttctcataaaaattggccttttacatgttgtctaattatcatttttccccaaattttgcgttgtaggactactgttccgaagatttttggaagaatactgagaacggcataaagtgaagatcgacatttaaaaaatgaggtgaaagaaagctatagtggcatagaaaaagtataaagctcagttagtttttttattattattattattaaaagttaattcaggactgatgtgacctaccagatttcagaacatgtgttaatagtatatatgccactgaaaacttaggtcctgtatcatacttttttctttaagactttttaagaaatattacttaaacatgtggcttgctcagtgtttaattgcaagttttcaatcttggactttgaaaacaggattaaacgttagtattcgtgtgaatcagactaagtgggatttcatttttacaactctgctctacttagcctttggatttagaagtaaaaataaagtatctctgactttctgttacaaagttgattgtctctgtcattgaaaagttttagtattaatctttttctaataaagttattgactctgaaaaa

SEQ ID NO: 13831 - DNA, 856 bp, Homo sapiens
gtaagatatctataattttaaatgtttataaattgtttaatttattagcatcttaatgtaccccatttttatatactgaatgtggccttttgagtgaaataggaagcttcatggtgttggagccacctttgtacagttgtttaaagtttcccattgtcacggaaaacattggctgcaaagcccctcaaagccctcaagtgccttctgtgagtttaaatgtgctggtgccctccagaaaagcctcggcctcagctccgtttccgcctgttccctcccccagggataatgaatggttactgcactgtaaagaccgtggtctcttttcactaaataggagattcgagtttcccagtttacatggaatgaagtctgaatttaagacggtgatgaaactgaggttcagtactctcgggactcgaggaaattattcctgagacatggagtaattcttacaaatttaaactattgtacagatccacatacatgttgttaagtacctaatgttttgctgaacttttaaaagttaatttccaaaatgtatagggattcatgataattaaacctttttattgctcatttttttagtaggaagaatatcacttatttttagacttgtaaaatgtatgaactggtgagcggacatctgttaagagagtcactagtcagaatgttaaaggagtgcatgcaggatgccccaaatgtcgtgaactcttgttactcctgtatgtagtagtgtaagcatgtgacttttaacaccatttggtttgaaactaatgtagagatgcctgattccaaacaggtgtggagaatattgaacggctcagaagccgcgtcccttacttaacacaattccgaa

SEQ ID NO: 13832 - DNA, 618 bp, Homo sapiens
gccagagaggaattggccccgggagccccgggaggactccactggcacagtcgtgtgtaagtccagggctcttatgcaatgcggttgtcattattgtggttgtggtggtggttgttcgcactcccagagaggatttactaagccaagcttgctctgtcgtctcttcacatgagagctttcaaaatggggtgggaactagtatcaccctacttgacagatgagaaaactgagacccagagagtgacttgcccaatatcacacagctgttaactgacaggactgggatttgaactcagctcatgctcttaaccaccacaagtccccaggctggaaactgaaaaagttggggggtcaggttgctgcgagtacctaatgggaaggagtcacagagagacatgagtgaagacttggggacagcagtcctgggaaagtcaatgagggctgaaaatttggagttgccccagggagagagggcagaaaaggggataaccatcccccagcactcccttgcccccacagcccagacttgaccaactcccagctgggcctgggacttccagatatggggccccacccttgcaggccttggggacgctgaagatattgactatctgcgtg

SEQ ID NO: 13833 - DNA, 983 bp, Homo sapiens
gagggctggaaggtgtacgcgggcaccagcaacctgcaccagttgcctgaggagcctccattgccgagatcatcatcaacagcaattacaccgatgaggaggacgactatgacatcgccctcatgcggctgtccaagcccctgaccctgtccggtgagggaatctgcactccccgctctcctgccccccagccccagcaccctctgcagccctcgcacttgtcagcatctgtcaactcatatccgggccccaaagcttctgcagggcagaagtcaaagactcttaaagatccttacatggaacacttctgttttataattagggaaactgaagcccaagggttataaataagtttgctccaaatgacacatctcacattacaaattgatgacggagtcagggcttgggtactgatcttaatcaatagattgaattctttcactggtattaactgagcacctaggggccaaacgctatggtaggcatttcacacatatgatttcatttactcttcacaaccaaccctgtggagcaggcactattattaacttcatttgacatatgaggaaatggagctttacagagagataattacctgaggccacaagtaataggtggtagctctgggattggaaccaggtcgatctgattcccaagcaatgtctccccacctggctctagactggcaaattgcttaccctgcagtcgagaacttaagctgagtacacattcaaacaactaattgctacaacgttgttgctaaggaccaaaggaggctacacaaaggaaatgctgcagaggttctcagaagatcactgtggacaggggacgtcaaagaagacttcattcattcattcattcattcattcactcatcattcatccattcactcatttgttcacttatcaaatactatatggccagccctatagtacagttgcaaatagaaataaaatacaccaagacgaccaaaaaaaaaaaaa

SEQ ID NO: 13834 - DNA, 1703 bp, Homo sapiens
  misc_feature (1)...(1703): n = a,t,c or g
catttacattattttgtaattttctattactatttttaaggggttaaagagaacatacattctcacattagtgtactttctggtagaaagttgctgcaaaaacatttgaaatgtatattaacctaatgtatgtcatatatatgtctttgtgtaagttcaagactattgatctgtgaagttattttgtaaggacatacatttggtaagtaagtttgtgtcccaggaaatgtatgtgtttttaaaccctttctaaatatgcaggccattaataaataagattgtttcttccctactgaatagataagtgtttttcttttttaaaattggaagcttcataaaagttatcttgttaaaaaacgatgatgatgttaacctatctttataattggaaattatttaaactgtttgttgttacagaagaaacaaaatggtaattacagaattagctgtggggaagattggctcccatggtactannnnnnnnnnnnnnnnnnnnnnnnnnnnnnnnncctgaagtgttttggattttggttttttgtggggtttttaaattattatnttggaatatttgncattatatttaccaatttagcatcccnaatccaaaaatctttcattagaaattggaaatgcttcaatgagcatttcccttatgtgtcatatctgcgctcaaatgttttgaattttggaacatttcttgtttctgacttttagattagggatactcaccccgtaccaatatttgggagtccttagacattagattatatgaaaatgattgattgataggtaagaaagtttaaagagaaatgactttttaggaactagacttgaacgtataattaatatgtggaactagtttgcttttataattcattgtatcaagaaggagtcatgttttaaatccaaggcattgagactatctagaagcaaaaaagttggttttaaaaattctttttattagaagtgtgtttaaaaacatgtctttttttcccttgagcgacannnnnnnnnnnnnnnnnnnnnnnnnnnnnnnnnnnnnnnnnnnnnnnnnnnnnnnnnnnnnnnnnntcctaagtagcagggattacaggcatgcacccacatgccaatttttattgcttaaaatggcgagttctatggatattatctagccccaagcccatatctgtacacttttgttcattttataataccagaaagaatgttctatcagtaaaagaaggttttaagtatgaatctccatttttgtggagtttttctaccctgtaaaaattaactttgtggttcccagtaattacagtaaggagtttttctatattttcacagttggatttatctaaggatatttctcagcatattaaggaatccttttctacatttgagcaaatactgaggttcatgttgtaccaaataataataaattgcttttgtgtttaatatgtaacacgtaagaacaattgaaattttcttctaagatttaatactagtcttttagtataaaggaatgtaactggagaaaaaaattaatgctacagcccatttatcctgtgttatgtgttatataatctgaaatttgtcacaatgttacaatcaggaagttttttttctggtttcttcttccaaaggaaaataatagcctacttgtattttgaagtaactgaaataaaactctctccaagcctttttgcacaaaaaaaaaa

SEQ ID NO: 13835 - DNA, 932 bp, Homo sapiens
ttcggcagaggccccggctcacatcagagtgagaggcgctggcaatggactaggaagctcggctgccgctgctactgctcccccctgggctccggcgagagcctttccctgtcaagcaagaggggtgaggatcatatttttattttggaaactaaaaagtgctcccagggtcggtgattattaaggggaaatccctgaatatactctccagccaagaaggcagggctgccggggctgtacaagaagaggcagcagcctcctacagcaccactacaggcactgcgaggacataacaccagagagctgctcctctgccctccgaaacgacaactttcctaccatcttggaggcagagcaaaggggggccagggggaaaagtgcacccgctcccgataaagtacaaatttttacttctcatctctggaaaaaagtccacaccggccgtctacacccgcgcctgggggagaaagcagggaagaaacggggggtgcatgagaaacgttttcatttgctccagggggaaaaatgtttctgcatcttctgatggaaagaaatctttacaagacacaggttttccggtggttattgttttttattttctgtttttaatttttttcatgttagtgacagtgatattttaatatttttttaagccagtaataatttttctccattacagggctaagttctgtggctggtggtcagtttgtaaatttatacttaaagagacttaatagtaacttcatttatttgtctggttatgttattgtatatataaatatttatgttttcatatattgcatataaaaatttgtgttacatgttactctcagaacagattgctgtaagacaattgtaaaaaaacatgtctttcgtctgtttctcaaagcaatgtaaataaaacctatggactgtccaaaaaaaaaaaaaaa

SEQ ID NO: 13836 - DNA, 1564 bp, Homo sapiens
tgctacaaattttggagcaatggccatgcagctctgtgaggagaggagtttaactgatcaacactgtgtgcacaaatttcactcattacctaaatcaggagaaaaaccagaggctgatagaaatccgcctgtgctatatcacaatagccgagctcgatctactggtgcttgcaactgtggaaggaaacaagcacctcgagatgatccctttgatatcaaagcagccaattatgacttctatcagcttctgggaagaaaagtgttgtgggaaaattgggatcatatcaatttcccagtatttgaaccaagtactccagatcctggctcctgcttaaaaatggaatcctctcctgctcctccagattcggatgctgataaacttaaagaaaaagaacctcaaacccaaggagagagcacgagcctgagtttagctttgagtttgggccaatccacagatagcttaggtacctatccagctgatccacaagcaggaggagataatccagaagttcatggtcaagtagaagtgaaaactgagaagaggccaaacttcgttgatcgacaggcatccacagttgagtatctcccaggcatgctacattcaaattgccctaaaggtctcctacccaaattctccagctggtctttggttaaactaggccctgctaagtcttataactttcatacaggtttggaccaacagggctttattccaggaacaaattatcttatgccttgggacattgtcatcaggactagagctgaagatgaaggagacttagacacaaactcttggcctgctccaaataaagctattcctggaaagagaagtgcggttgtaatgggaagaggaagacggcgagatgacatagctcgagcttttgtgggctttgaatatgaagactctcgaggtcggagattcatgtgctctgggcctgacaaagtaatgaaagtaatgggaagtgggccaaaggaatcagctttaaaagccctaaatagtgacatgcccttatatattctgtcatcctctcaaggtagagggctgaaacctcattatgctcaacttatgaggctttttgttgtggttcctgatgctcctttgcagataatactaatgcctcaggttcagccaggcccaccaccatgtccgggtattctaccccagaaaaaccaagaaatcacccttccacctgatggcctttgggttttgagatttccttatgcatatgtgactgagagaggaccttgtttcccccctaaggaaaatgtgcagttaatgagctacaaggtgctccgtggggttcttaaggcagtaacacaataagtgttttccagccagttcaatcctatacttgagctggtttttgtttttggtatttgtggctgtgtttttggtatgtgtttactgtgttttcccaaatccaaaatgtgttttggttacaggagttcagtatttggaaactaatttgttctactttttcattatattgttgatatttattgtaaacgtgactacaactttctaataaagattggttgttctagaaaagaataaaaaaaaaaa

SEQ ID NO: 13837 - DNA, 423 bp, Homo sapiens
ggtcgaccggagctttcgcagctggagaaggctcatccacctgcagacatggggcgcagaaagtcaaaacgaaagccgcctcccaagaagaagatgacaggcaccctcgagacccagttcacctgccccttctgcaaccacgagaaatcctgtgatgtgaaaatggaccgtgcccgcaacaccggagtcatctcttgtaccgtgtgcctagaggaattccagacgcccataacgtatctgtcagaacccgtggatgtgtacagtgattggatagacgcctgcgaggcggccaatcagtagcgacacagaggacccgccccctgagcagccccgcgtactgtggatccagctgttcggttctggtccagagacattccaggggtccagggtgtgggtcctgggctgtcacagccgtgtgtgtgt

SEQ ID NO: 13838 - DNA, 1441 bp, Homo sapiens
aagttcgggtccgtagtgggctaagggggagggtttcaaagggagcgcacttccgctgccctttctttcgccagccttacgggcccgaaccctcgtgtgaagggtgcagtacctaagccggagcggggtagaggcgggccggcacccccttctgacctccagtgccgccggcctcaagatcagacatggcccagaacttgaaggacttggcgggacggctgcccgccgggccccggggcatgggcacggccctgaagctgttgctgggggccggcgccgtggcctacggtgtgcgcgaatctgtgttcaccgtggaaggcgggcacagagccatcttcttcaatcggatcggtggagtgcagcaggacactatcctgggccgagggccttcacttcaggatcccttggttccagtaccccattatctatgacattcgggccagacctcgaaaaatctcctcccctacaggctccaaagacctacagatggtgaatatctccctgcgagtgttgtctcgacccaatgctcaggagcttcctagcatgtaccagcgcctagggctggacctacggaggaacgagtgttgccgtccattgtcaacgaggtgctcaagagtgtggtggccaagttcaatgcctcacagctgatcacccagcgggccccaggtatccctgttgatccgccgggagctgacagagagggccaaggacttcagcctcatcctggatgatgtggccatcacagagctgagctttagccgagagtacacagctgctgtagaagccaaacaagtggcccagcaggaggcccagcgggcccaattcttggtagaaaaagcaaagcaggaacagcggcagaaaattgtgcaggccgagggtgaggccgaggctgccaagatgcttggagaagcactgagcaagaaccctggctacatcaaacttcgcaagattcgagcagcccagaatatctccaagacgatcgccacatcacagaatcgtatctatctcacagctgacaaccttgtgctgaacctacaggatgaaagttttcaccaggggaagtgacagcctcatcaagggtaagaaatgagccttagtcaccaagaactccacccccagaggaagtggatctgcttctccagttttttgagggagccagccagggggtcccagcacagccctaccccgccccagtatcatgcgatggtcccccacaccggttccctgaacccctcttggattaaggaagactgaagactagccccttttctggggaattactttcctcctccctgtgttaactggggctgttggggacagtgcgtgatttctcagtgatttcctacagtgttgttccctccctcaaggctgggaggagataaacaccaacccaggaattctcaataaatttttattacttaacctgaaaaaaaaaaaaaaa

SEQ ID NO: 13839 - DNA, 4793 bp, Homo sapiens
ggaccacccagtaccgatcccttcacgaccgtcaccatggaagtgtcaccattgcagcctgtaaatgaaaatatgcaagtcaacaaaataaagaaaaatgaagatgctaagaaaagactgtctgttgaaagaatctatcaaaagaaaacacaattggaacatattttgctccgcccagacacctacattggttctgtggaattagtgacccagcaaatgtgggtttacgatgaagatgttggcattaactatagggaagtcacttttgttcctggtttgtacaaaatctttgatgagattctagttaatgctgcggacaacaaacaaagggacccaaaaatgtcttgtattagagtcacaattgatccggaaaacaatttaattagtatatggaataatggaaaaggtattcctgttgttgaacacaaagttgaaaagatgtatgtcccagctctcatatttggacagctcctaacttctagtaactatgatgatgatgaaaagaaagtgacaggtggtcgaaatggctatggagccaaattgtgtaacatattcagtaccaaatttactgtggaaacagccagtagagaatacaagaaaatgttcaaacagacatggatggataatatgggaagagctggtgagatggaactcaagcccttcaatggagaagattatacatgtatcacctttcagcctgatttgtctaagtttaaaatgcaaagcctggacaaagatattgttgcactaatggtcagaagagcatatgatattgctggatccaccaaagatgtcaaagtctttcttaatggaaataaactgccagtaaaaggatttcgtagttatgtggacatgtatttgaaggacaagttggatgaaactggtaactccttgaaagtaatacatgaacaagtaaaccacaggtgggaagtgtgtttaactatgagtgaaaaaggctttcagcaaattagctttgtcaacagcattgctacatccaagggtggcagacatgttgattatgtagctgatcagattgtgactaaacttgttgatgttgtgaagaagaagaacaagggtggtgttgcagtaaaagcacatcaggtgaaaaatcacatgtggatttttgtaaatgccttaattgaaaacccaacctttgactctcagacaaaagaaaacatgactttacaacccaagagctttggatcaacatgccaattgagtgaaaaatttatcaaagctgccattggctgtggtattgtagaaagcatactaaactgggtgaagtttaaggcccaagtccagttaaacaagaagtgttcagctgtaaaacataatagaatcaagggaattcccaaactcgatgatgccaatgatgcagggggccgaaactccactgagtgtacgcttatcctgactgagggagattcagccaaaactttggctgtttcaggccttggtgtggttgggagagacaaatatggggttttccctcttagaggaaaaatactcaatgttcgagaagcttctcataagcagatcatggaaaatgctgagattaacaatatcatcaagattgtgggtcttcagtacaagaaaaactatgaagatgaagattcattgaagacgcttcgttatgggaagataatgattatgacagatcaggaccaagatggttcccacatcaaaggcttgctgattaattttatccatcacaactggccctctcttctgcgacatcgttttctggaggaatttatcactcccattgtaaaggtatctaaaaacaagcaagaaatggcattttacagccttcctgaatttgaagagtggaagagttctactccaaatcataaaaaatggaaagtcaaatattacaaaggtttgggcaccagcacatcaaaggaagctaaagaatactttgcagatatgaaaagacatcgtatccagttcaaatattctggtcctgaagatgatgctgctatcagcctggcctttagcaaaaaacagatagatgatcgaaaggaatggttaactaatttcatggaggatagaagacaacgaaagttacttgggcttcctgaggattacttgtatggacaaactaccacatatctgacatataatgacttcatcaacaaggaacttatcttgttctcaaattctgataacgagagatctatcccttctatggtggatggtttgaaaccaggtcagagaaaggttttgtttacttgcttcaaacggaatgacaagcgagaagtaaaggttgcccaattagctggatcagtggctgaaatgtcttcttatcatcatggtgagatgtcactaatgatgaccattatcaatttggctcagaattttgtgggtagcaataatctaaacctcttgcagcccattggtcagtttggtaccaggctacatggtggcaaggattctgctagtccacgatacatctttacaatgctcagctctttggctcgattgttatttccaccaaaagatgatcacacgttgaagtttttatatgatgacaaccagcgtgttgagcctgaatggtacattcctattattcccatggtgctgataaatggtgctgaaggaatcggtactgggtggtcctgcaaaatccccaactttgatgtgcgtgaaattgtaaataacatcaggcgtttgatggatggagaagaacctttgccaatgcttccaagttacaagaacttcaagggtactattgaagaactggctccaaatcaatatgtgattagtggtgaagtagctattcttaattctacaaccattgaaatctcagagcttcccgtcagaacatggacccagacatacaaagaacaagttctagaacccatgttgaatggcaccgagaagacacctcctctcataacagactatagggaataccatacagataccactgtgaaatttgttgtgaagatgactgaagaaaaactggcagaggcagagagagttggactacacaaagtcttcaaactccaaactagtctcacatgcaactctatggtgctttttgaccacgtaggctgtttaaagaaatatgacacggtgttggatattctaagagacttttttgaactcagacttaaatattatggattaagaaaagaatggctcctaggaatgcttggtgctgaatctgctaaactgaataatcaggctcgctttatcttagagaaaatagatggcaaaataatcattgaaaataagcctaagaaagaattaattaaagttctgattcagaggggatatgattcggatcctgtgaaggcctggaaagaagcccagcaaaaggttccagatgaagaagaaaatgaagagagtgacaacgaaaaggaaactgaaaagagtgactccgtaacagattctggaccaaccttcaactatcttcttgatatgcccctttggtatttaaccaaggaaaagaaagatgaactctgcaggctaagaaatgaaaaagaacaagagctggacacattaaaaagaaagagtccatcagatttgtggaaagaagacttggctacatttattgaagaattggaggctgttgaagccaaggaaaaacaagatgaacaagtcggacttcctgggaaaggggggaaggccaaggggaaaaaaacacaaatggctgaagttttgccttctccgcgtggtcaaagagtcattccacgaataaccatagaaatgaaagcagaggcagaaaagaaaaataaaaagaaaattaagaatgaaaatactgaaggaagccctcaagaagatggtgtggaactagaaggcctaaaacaaagattagaaaagaaacagaaaagagaaccaggtacaaagacaaagaaacaaactacattggcatttaagccaatcaaaaaaggaaagaagagaaatccctggtctgattcagaatcagataggagcagtgacgaaagtaattttgatgtccctccacgagaaacagagccacggagagcagcaacaaaaacaaaattcacaatggatttggattcagatgaagatttctcagattttgatgaaaaaactgatgatgaagattttgtcccatcagatgctagtccacctaagaccaaaacttccccaaaacttagtaacaaagaactgaaaccacagaaaagtgtcgtgtcagaccttgaagctgatgatgttaagggcagtgtaccactgtcttcaagccctcctgctacacatttcccagatgaaactgaaattacaaacccagttcctaaaaagaatgtgacagtgaagaagacagcagcaaaaagtcagtcttccacctccactaccggtgccaaaaaaagggctgccccaaaaggaactaaaagggatccagctttgaattctggtgtctctcaaaagcctgatcctgccaaaaccaagaatcgccgcaaaaggaagccatccacttctgatgattctgactctaattttgagaaaattgtttcgaaagcagtcacaagcaagaaatccaagggggagagtgatgacttccatatggactttgactcagctgtggctcctcgggcaaaatctgtacgggcaaagaaacctataaagtacctggaaggagtcagatgaagatgatctgttttaaaatgtgaggcgattattttaagtaattatcttaccaagcccaagactggttttaaagttacctgaagctcttaacttcctcccctctgaatttagtttggggaaggtgtttttagtacaagacatcaaagtgaagtaaagcccaagtgttctttagcttt

SEQ ID NO: 13840 - DNA, 951 bp, Homo sapiens
tttttttttttttttttgatctgcaaaattttattaagcaatagctggacaactcttacaacttcaaatcatcaagaaaaaaataaggagattaatccgtctcagtaataaagacagaaaataacttggacaaaccacatcgttttgaatgcaaaccattaatgccttctagaatatctcctgcacaatctaatacacaaaatacgtaagaagaaaggcaaataaggatgagctcattaaaacgcatttgggagtcgcaacaagatcttgcttggaaagtaaaaccagcaggatgctgaattaaaaaacaaacaaaccaacactggaggaactgaggtgcacaagcagtgcacgccactgccgaggtctggacatgaacatgctggtggtctagtttggtctggggcctatgcacctgcatcgtgcacttacggttaaaaaaaaaaaaaaagggaaaaagaaaatgccagtagtaataaactcagaaattatgtccaaatttacagtaccaaaataatgcatttataaacaaatgcaaaaacaatacccctttggtaaataatacagtgtctttttcagtcaaacgcataacccatgcttttctacaacacgaaaaaatttttatctacaataaacaacaagatcttagaaccctacccctccccttaaaaagaactgtaaacagaaaatataggtacaagtaaagttacacaaaaattgcacaaagccaaagaaaatggaaacaaagtaagccacaacccattagagttttatcagccagaggtaaggaatcacacaaatgctgaagagttctgagttgtgtgctattacagaaatcccaggaactcaaacgacattttggacacatttttgtctccactaactttgcttacaaccattgacttggccaaatgatacaggcacacagcgacaccatggactccttctccc

SEQ ID NO: 13841 - DNA, 1810 bp, Homo sapiens
ttttgccaagatccaaagaaaaaattttatttacaatagagaattttatttgaaacatgcatttcttgtttttttaaaaacaaatcagcaaatgcagatcaagtttacactccttaaggcaagagtccctatgcacgctgtacatgttcatattaaatccaaaagctgctcaccctggggaacttgtgtacaaaggggcaaggcccaaggtcagcaatgtgtcttttattagagaatcagacaatctccctgatacaggaactctgaggtcaacttgctatgaattatactaggaaaatgcaaaccaatagcaagaaattctgatagtctccttagtactgcatacaatcaaatcaattttatttagaaaggaaatacagtagtgcatacgaaaaagtgaaaacagaacctgtccatggaactggaggaacagcagtgtgccgacggtcatattgcactcaacagttaagtccaaaacattcggttcagagttagcttttccccattttggcaatcagttcgtcacaaatcttggtgagttcttctatttctttattcttctgctccagcgtcctttccagggcgtccactcgcagctgctccttccgcaggctggcctggtgggcggcttgctcctgctgggccttgcctcgaacctgagcaatctcagcattggccctgtccagtttctcctccgcgtgcaccttcagggcctggtacctctgctcctccttcttcacccgggacaggtactcctgcgcacatctcttcaacacctcttcattcttgcggaagccttctaggacctccttcatcttctcatatcttctgaagaggtcggccagagacttctccacggagttcaggtcggccagggcttgctccttctccagaaccagctgctgcaccgtctggtggggagactgacttctctctctgttcgtcctctatcatctgagcgatggtcttctcatactcggccactattttcctcatttccatcacttcccgcctgctttcttcatatttatctttccattctgagacctctctctccttggttatgatctctgctctggcgatctggagggcagagtccaggtcgggctgctggaacagaaggcctgcaggtttctccacctcagcggtcccgatgcgggagtacaaggctgttttggagatggagacgtctgttgggtgagcagcctctctctggagtttctgagcgaatagtggggggttcttttctgctaagtcgggctccagatagtcaagtgcaccacagagagagacggggtgagctagcctgctgaggagggcgtcagcagaggcaaaggagccctcgggagctgtaatttcaatcgcttctgaaggggtgccccaaacccatggcctccagctccttctgggaggatttctctggcacctgccaagtgtgaactcttggttaggggccagtcctcgtgggaacaggatgctggtttttcgcagcagtgttcacaagggcttcagtctcttcaaaacttgaccctgaacacggcgtcggggactctgacatgcggacgggagatgacttgacagggctctcctgagaagtgtcaaacataaggtacaaggcctgcttcttcggggcatcgtcgtcctgaggtaaggaggagccaattttctccatatattcaatttcataggagtttctgtaatccaactcctcagtgggtgaactgaatttggtctcgtttacaaaggtggacaggtccgagggctgcgggtagtcctgtttgtcagcctctaggtccactgtcatgcacgt

SEQ ID NO: 13842 - DNA, 1636 bp, Homo sapiens
  misc_feature (1)...(1636): n = a,t,c or g
ggatttctttagcggacctaaaggaaggaccccacacacacctaaaacctccagattatagtgtggcagtgcagaggtcaaagatgatgcataacagcctctctagactgccaccagcttctctcagtagcaacctcgtggcctgtgttccatcgaagattgtaactcagcctcagaggcataatttgcagccattccatcctaaactaggagatgtgactgatgcagatagcgaagcagatgaaaatgaacaagtttcagcagtctagcctttggatgacctatttgaaaaccactgaaagtcgtggaggaatgggcaagaaccacctcatgattctgcaggccattgctaacgaacagctcattgctacaaccagtccagaggttttattccctctactccgagcaatgaaatagacctgagttatgcttcctttcatttaatttctgcagataaatagtttcctgagcaatggatgctatgcctggataccagtctccactttgcacgccggaactgccttgggaccacagttacagaaaaaatgtaaactcagagtgatccttgtgtatattgctatagatttttctttaacaagctattttaaagataatggcattattatttccaagccatagcttgggctgaaggacaaattgaaattgtctgccaataccaaggatattcttgtatatttgaaaaataacttattatttgaattgttgtggttttgtttgtatttgagagctcttgttagctgatattcatgtttgaggtcataaaattgtctctggtctgaccaaacagaagtcatctttacagaggtgatatgcttgatctacacagagatgtgacttggatcctgtaggcaccaatgccaatgtaggtctcagtttgagagaaataggaagccctttgcagttgaggtgttaggaacctgctggtcatggtgtggaaggccaaatgaagctgccacagggtttcttgtcagtcctttgggaaatgggagggagtagtttggggaggaggngnaaccctaatttccacagaatgaaattttgatgttaaatgacatgtatacaaattcttccttaagtgaaagttatgctgcatcgaattgtaactgaaagtatagatccaacaaatagagactgggttctagagagttctggtctatagaaacccaaaactaaaatctctcataactcaagtatggaatactttttttaaagaaattcttatcatgggtgttgtaataatgaagacgaatttgactttatgcagtgttctgcagcatgcctcccccacatctcatagcaccaggttgtgtctgacctgacataccctgcagctctcagctggctgcagtaacattttgtgggagaaagaggagctggagttacagaaatgattgtctcttggttctcagtttttagcccttgagaggacatacttttccagcctcatgggtatggcactcttaattaaaatttcagtgactgtttactggatgaggcagatttttcacatttttgcaaattaaatatattttatatatattaagtttaattttttcagtttttttaatgtaaaagcaagtgaaattttaataaacttctgtaattaccaaaaaaa

SEQ ID NO: 13843 - DNA, 504 bp, Homo sapiens
cggcacgagattttgcaaaaagaggaactttagctccgcactttggagatgccagtgtctttgagatgttaaggactttttgttttgtttttgttttttaattctttaactatgttacaggtttagcaatgcctccgattcaggaatttgtttaaaaccccccagtggcttagagctgcacatagaataaaatctaaactgtttctcatggtctacatggtcagccattgtttacctgacttaactaacctctccgacttcccctgacacggctgcctccctggcttgtacgctcctgtgcttattcttgtccccgtacaaagcacatccattctcgctgtgaggccttagcagcacctgctcctactgcctcagaaggtcttccctgatccttacatggttatagcctgccctgacccttctgtccccacaccatcactgtctacacatcactctgtgttattccctaatggtagtaagagttgacaactcctacaccctaca

SEQ ID NO: 13844 - DNA, 898 bp, Homo sapiens
  misc_feature (1)...(898): n = a,t,c or g
gggatgagatcatgttaatcatggccatgacatggataaagaagaacagagaccatgctcaaaacaggaagaaggagaagaggaagagataagtaaatttttgagataggaaatacaggtgaaattgagaaaaagaagaaaaactattcatctcaaaggaagggagctggagcatgaattataatcaccccagccacaccaaatccttcacattctctggtattctgactcatgttgtctgccatatgaatgttggcacgtgccattccagtagctcagatgcccttcccggtcctgcctgcccatctccctacggcagagcattatcctttcatcttcagcgtaactcttgtcttattctacaagttcccttttcccctgaggccaaggtaggagcccttcttttctgatgtctgcgtatgtacgtatttgttaattcagcaaatgatcaaatgatcaaatgatggtaagaaaagaaaatagatttccatttcttccttcgagttagttgggtattgggaacttgaaaaataatcttaaagtaggcctgttaaacaatgatgctatttgggtgcaagctgagccctctctggagccagggtggctgggactacattgaaagccagcctttctggagacaggctccaccgtgagtaacaaaacattgaaaaaatataggccgaagattccataaattaggtctcatgttggtcaacctacagttcattgttcttgacacttggggcagagaccccaccttggaatatcccagcannnnnnnnnnnnnnnnnnnnnnnnnnnnnnnnnnnnnnnnnnnnnnnnnnnnnnnnnnnnnnnnnnnnnnnnnnnnnnnnnnnnnnnnnnnnnnnnnnnnnnnnnnnnnnnnnnnnngtcgagc

SEQ ID NO: 13845 - DNA, 515 bp, Homo sapiens
ttcagaactggtttattagtaggattggttacattcaaaggctgttgcttggacttctctaaagagatgaagcccccacatactgaggaggcaaggcagtcatcaaggccccaaggtgaggcaaatccctggaaggcttgaaccctgcagttcagtctcccggggtaatcactccccacatagcagtgagaatgggcatcgttaagctgccgtgcaacatccaggatgtttttggctcctttgctcagcaacaagttggccaggctgatgcccaagttctgggcagccaactggggccctcgtggaatgttacgagcagtgatgcctaccaactgtgggtcatcctcagggccatcttcatgctgtatgagggaaggaggtgggatttggtgagaacaagagattatatgcactcttgtttattaccccctcgccctccagctttggtacctgggcagggacatggatggtagcctgcatggtctcttgtatgctatctgagccgtctagactcc

SEQ ID NO: 13846 - DNA, 1137 bp, Homo sapiens
ggacctgaaagagaccttggagtttgcagaccaggagaatcaggttgctcacctggagctgggtcaggttgagtgtcaattgaaaaccacactggaagtgctccgggagcgcagcttgcagtgtgagaacctcaaggacactgtagagaacctaacggctaaactggccagcaccatagcagataaccaggagcaagatctggagaaaacacggcagtactctcaaaagctagggctgctgactgagcaactacagagcctgactctctttctacagacaaaactaaaggagaagactgaacaagagacccttctgctgagtacagcctgtcctcccacccaggaacaccctctgcctaatgacaggaccttcctgggaagcatcttgacagcagtggcagatgaagagccagaatcaactcctgtgcccttgcttggaagtgacaagagtgctttcacccgagtagcatcaatggtttcccttcagccccgcagagaccccaggcatggaggagagcctggcagaaatgagtattatgactactgagcttcagagtctttgttccctgctacaagagtctaaagaagaagccatcaggactctgcagcgaaaaatttgtgagctgcaagctaggctgcaggcccagggaagaacagcatcaggaagtccagaaggcaaaagaagcagacatagagaagctgaaccaggccttgtgcttgcgctacaagaatgaaaaggagctccaggaagtgatacagcagcagaatgagaagatcctagaacagatagacaagagtggcgagctcataagccttagagaggaggtgacccaccttacccgctcacttcggcgtgcggagacagagaccaaagtgctccaggaggcccctggccaggcccagctggactccaactgcccagcctatggccaccaattggatccaggagaaagtgtggctctctcaggaggtggacaaactgagagtgatgttcctggagatgaaaaatgagaaggaaaaactcatgatcaagttccagagccatagaaatatcctagaggagaaccttcggcgctctgacaaggagttagaaaaactagatgacattgttcagcatatttataagaccctgctctc

SEQ ID NO: 13847 - DNA, 1278 bp, Homo sapiens
tcacgggggcctcacttcattctcttccacgtcatttggtggtagtggcatgggcaacttcaaatcgatatcaacttcaactaaaatggttaatggcagaaaaatcactacaaagagaattgtcgagaacggtcaagaaagagtagaagttgaagaagatggccagttaaagtccttaacaataaatggtgtggccgacgacgatgccctcgctgaggagcgcatggcaggaggccagaacgccctgccagcccagcctgccggcctccgcccgccgaagccgccccggcctgcctcgctgctgagacacgcgcctcactgtctctctgaggaggagggcgagcaggaccgacctcgggcacccgggccctgggaccccctcgcgtccgcagcaggattgaaagaaggtggcaagaggaagaagcagaagcagagagaggagtcgaagaagaagaagtcgaccaaaggcaatcactagaccggacttgaggcacgcggtgcacccccagacgctggcgctccaccgtgctcggcatgcggtcgtgcacacgcgctaggtagcagcgtcggtcaggactgtctcgaggccacactcgctcggcaggattatgcgatcacggatcagtcagagcagggtcaggagacggggctgacggcacgggtggcggggacagacgtttgggacttggccgcgactctctgcttctctccagctctcaatctgctgcattttcctctagtgcttccggatcctcttcattcttttcggctactcaaccactccgcatgctgctggaatatttctggctttagaagtacaggagggcgcagatggctaactgagtaacattcatgaaatgaggctttctgtggcggcgtagtgtttggaattagaaggtaattcagtagagtgtaacttagagaatattgcaagtgacacattgaatcctgcccgtcagggcaccttttcctcagagcaatccggccacacgaatagaaggctgtcgtgaatcacatcagatgtaaaatcattccttctgtttactcttttaattttcatcctttgcaggtagtgcaaattcaacttcaaatatggtgtaggttttgctagattccatatttttttcttggatttttgctaattatttttagcaaaaaatttttgctcagtggcaccctccctagtgtccatgggttagggccatgctggggaaaacgggccggtatttacacacgtgcaaaacacccagagacggcacaaggaggttgaactcaatg

SEQ ID NO: 13848 - DNA, 1113 bp, Homo sapiens
gacagagtgagattctgtctcaaaataaatacatacatacatacaataaaaccgaatgagctggttctttccatcctcttgtggtacccgtagtgcccagcatccagacctttgtgcccctgtgcacattttggaagctaaaatgtacatcgttgtctgaaaaaacccaaccccaaaaccttcatctgattggtgagctgaagtctgtccttgcaccatgttatcatctgtttctcgtgtccgcctggttgaggaggacccacgagtgctgccgaggtgtggagggctggtattgagttgtggacatcactgttgaccctacctcacgtgccgagactctcatgtcacaggcgtgccttgctgcccccctgcagcactgtgcaggacgtggaccagctggagctgctgcccagcacagaggagagtcgccgcagatgacctagctgcggtgtgagagagcatggcccagacaagcagctgggttggcttcctgagaacaggacttaccctgggcttcaggaacatctgatggctgaggttagtgtgcttggaggctgcaggacgaactgtcgatgtttcttagcagagatggtcacagagggcagcagggacaggactggaagggacctgcagcctgcagaccccgcctggcccccgctggcttctggctggtccagtgatgggcaagtgacagaccttccccaggctctgcttccagaactctaatgggaaactgggcctgtctacctttagaagtcttcgattctcagagagcatttgtctaatacaataaaaactggcattaatacaaacctcaaaaacgtgagcgtatcttccaggcttcatggattcttgacatgtaattgttttgttcagaaaagtttatagaattcacataattctgtataaactatggagatccacagtacttttttgtttttgagatttaaagttctaagggattgtcaatagatatcaaaatattaatcattggacaaaggcttttccaaaaattgtgggtttttttcttctgttgtatccatttgagtcctgcatgctgtgaaatgctgagaacagaagcattaaattggtttttctcgggaaaaaaaaaaa

SEQ ID NO: 13849 - DNA, 622 bp, Homo sapiens
gccggcgcggagcaactgaggcccgagccttctcgggacccgggggacgcctaaccccgcgagaaccctgcaaattttcttcctcataattgggagaagactcactggccgaatggcagcagtagatgacttgcaatttgaagaatttggcaatgcagccacttctctgacagcaaacccagatgccaccacagtaaacattgaggatcctggtgaaaccccaaaacatcagccaggatccccaagaggctcaggaagagaagaagatgatgagttactgggaaatgatgactctgacaaaactgagttacttgctggacagaagaaaagctcccccttctggacatttgaatactaccaaacattctttgatgtggacacctaccaggtctttgacagaattaaaggatctcttttgccaatacccgggaaaaactttgtgaggttatatatccgcagcaatccagatctctatggccccttttggatatgtgccacgttggtctttgccatagcaattagtgggaatctttccaacttcttgatccatctgggagagaagacgtaccattatgtgcccgaattccgaaaagtgtccatagcagctaccatcatctatgcc

SEQ ID NO: 13850 - DNA, 954 bp, Homo sapiens
  misc_feature (1)...(954): n = a,t,c or g
accctgaaaagtaagaaccccaggaaaactcccctagcaccctatgaaaaggggccatataacataccctttttcaatcagatgtcctttgtatgcaacttcttttttgaattcagcaatttagggaggcatctcatgcagaatccttttgttgctgttccggtgcgggtgggggcattcttctacctattactgctgcagaagtggcaaaggtggggcagggaggcagcagcactttcttccagtgccctgtgtggcagtggagtgtcagcagcttcttccttagtccaattctaaggcatggttttacaaattgctgctggaagcttaccctcctggttcacctgccttctgataattccgtgagccaaacaaaattctttcaaaaaacttctcctgcttaatcagtctgtttctattgtttcaagcaagactacaaactacagcctgtggaataaatgagacctattattaaatagctaaaaacaaaactcaagtattttgtattcttgacatgggaaaattttatgaaattcaaattttagtgtccataaataaagttttattggaacacagaatatgtaatatattcattggtttatgtatttgtctgtatgcctacatctgatatgcaaaactatgaaatattcatacatataaaaggcaggtcaaaaatacaactataaaaaatttataagtaatttacttttagccctttggagaatttatttaacaattaacacatgggctaccactacaattttttttatttttttgagtcaagagttactttattgcccaggctgggagtgcagtgattgggtgtgattgtgggctcactggtaacctcaaactccgggggctcaagggatccctcctgcctcnggcctcaccaggtaggctgnggcctttggggcatgtggccccccatncccccgctanggtttaaatttt

SEQ ID NO: 13851 - DNA, 645 bp, Homo sapiens
cctctataccttccgcatgatcatggccaagacggctgctgaccgcaggaatgtcaagcagaaccaggccttccagtacgagtttggagccatgtatgcatggatgctgtgtgtcttcactgtcatcgtggcctacagcatcacttgtcccatcatcgcgccatttggcctcatctacatcctgctcaagcacatggtggaccggcacaacctctacttcgtctacctcccagccaagctggagaaggggatccactttgccgctgtgaaccagggccttggcaggcccccatcctgtgcctcttctggctctacttcttttccttcctgcgcctgggtatgaaggcccccgccactctgttcaccttcctggtgctgctgctcaccatcctggtctgcctggctcacacctgctttggatgcttcaagcacctcagccctctgaactacaaaacaagaagagcctgcaagtgacaaaggaagtgaggcagaggcccacatgcccccaccgttcacaccctacgtgcctcggattctgaacggcttggcctcggagaggacagcactgtctccgcagcagcagcagcagcaggacctatggtgccatccacaacatcagcgggactatccctggacaatgcttgg

SEQ ID NO: 13852 - DNA, 670 bp, Homo sapiens
  misc_feature (1)...(670): n = a,t,c or g
tcgaggagaaacaataggacggaaacgccgaggaacccggctgaggcggcagagcatcctggccagaacaagccaaggagccaagacgagagggacacacggacaaacaacagacagaagacgtactggccgctggactccgctgcctcccccatctccccgccatctgcgcccggaggatgagcccagccttcagggccatggatgtggagccccgcgccaaaggcgtccttctggagccctttgtccaccaggtcggggggcactcatgcgtgctccgcttcaatgagacaaccctgtgcaagcccctggtcccaagggaacatcagttctacgagaccctccctgctgagatgcgcaaattcactccccagtacaaaggggacatcagcagccaccagcatggtgggggtctttgttggggagtgggggagtcttttgtaaatcaagacaaagccaaaggcccttgttagctggccatccctgccccattttttcccctggtcctttcccctgtggccacagggaagtgtggcctgaataccccaccccggctcctctgcacccagagctgggggccacctcagaagtgtcatctctctctgagcangcatttccctgcagcagtcgangactnagcagattgagtgattctggggaaaaangcctt

SEQ ID NO: 13853 - DNA, 832 bp, Homo sapiens
  misc_feature (1)...(832): n = a,t,c or g
ggcagcagtggtacctctgctgtgacacacagatggagctccgggagtggttcgctacctttctgtttgtgcagcatgacggcctggtgtggccctcagagccctcacgcgtgtcccgggcagtgcctgaggtccggctgggtagtgtgtcactgatcccccttcgaggtagtgaaaatgaaatgcgccggagtgtggctgccttcaccgcggaccctctgtctcttctgcgcaacgtctgagcacaggagcccatccttggctctaggattccgccgctggaagccttctgttcagacaccccttatgctccaaggcctgatgtgagccagcggggggtgcatgggaaactgcaccccacaacccacatcctccatcctgactgcagcatggggttccccggcaggggtgggaggcagcaggggtcagcctgggcaggaacctctcccaactctgtccaggtgttcagacctcttggcccaacctgctcaccccaccgggttcactgtccttgtggggctggagagatgggcataagtcaggaacttgggaggaccaccaccctttcagaggcgtgaggccctggggcctcgcccggaagggagccccctgctcctcccaacaaactccagaacagcagaaagcgggtgctgtagaaggagcactcagctcacggggagggagctcttggctgagcttctacagggctgagantgcgctttggggacttcagccttccttccagtctgggctgagtggggggtccagactacctgatgccccttccccaatttggggactttttgataatataaatatatctgtatatttt

SEQ ID NO: 13854 - DNA, 1872 bp, Homo sapiens
  misc_feature (1)...(1872): n = a,t,c or g
tgtgacagagcagtaagactaacgaaacaagggtcaaatacatctggatctgatacactcagcttcccattgctgagagctcctgctgttgattgtggaaaaggacacctcttctgctgggagtgccttggtgaagcacatgagccttgtgactgccaaacatggaagaattggctgcaaaaaataaccgaaatgaaaccagaagaacttgtgggagttagtgaagcctacgaggatgccgccaattgtctctggttattaactaactccaagccttgtgccaactgtaagtctccaatacagaagaatgaaggctgcaatcacatgcagtgtgctaagtgcaagtatgacttttgctggatttgccttgaagagtgggaaaaaacatagtttcgtccactgggaggttatttacagatgtactcgctatgaagtcattcaacacgtggaggagcaatccaaggaaatgactgtggaggctgagaaaaaacacaaacgatttcaggaacttgacagatttatgcactattatacaagatttaaaaaccatgagcatagttatcagctagaacaacgccttcttaaaacagccaaagaaaagatggagcaattgagcagagctctcaaagaaactgaaggaggctgtccagataccactttcattgaagatgcagttcatgtgctcttaaaaactcggcgcattctcaagtgttcttatccatatggatttttcttggaacctaaaagcacaaagaaagaaatttttgaactaatgcaaacagacctagaaatggtcactgaagaccttgcccagaaagtcaataggccttaccttcgcacaccccgccacaagatcatcaaagcagcatgccttgtacagcagaagaggcaagaattcctggcatctgtggctcggggagtagctcctgcagactcaccagaagctccaaggcgcagctttgctgggtggaacatgggattgggaatatttaggatttgcatcaccagaggaatatgctgaatttcagtatcggaggaggcacagacaacgtcgtcgaggagatgtttcacagtctactcagtaatcctccagaccctgatgagccaagtgaaagcactttagatattccagaaggcggcatgcagcagccgcaggcctggcacatccgtggtaagttctgcatctatgagtgtgctgcacagctcttccctgcgtgactacacccctgccagtcgctctgaaaaccaggactctcttcaggctctgagttccttggatgaagacgatcccaatatacttcttgcaatacagttatcactgcaagagtctgggctggccctcgatgaagaaactagagacttcctcagtaatgaagcatccttaggtgcgataggcacttctttaccttccaggctggactctgtccccagaaatacagattagccctcgggctgcattgagcagctctgagcttttggaacttggtgacagcctcatgagactaggagcagagaatgacccattttcaactgacaccctgagctcacaccctctcagtgaggcaagaagtgatttctgtccctcatctagtgatcctgactcagctggccaggaccccaacatcaatgacaatcttctcggcaacatcatggcttggtttcatgacatgaaccctcagagtattgccctgattcctccagcaactacagaaatcagtgcagattccagctcccctgtatcaaagatgggtcagaaggtgtgaaggatgtggaaatggtgtgcagaagatncaatgtttgaagatgcagtgncagtgaaggtagaggaaccagatagaagaaaacctttggaagaaaatatnctggcggggg

SEQ ID NO: 13855 - DNA, 1026 bp, Homo sapiens
aattcggcacgaggagatgttggggtatttgggattctaattgttaaccccagaagaaggtaatttagcttgtatttatttaaaacccatttagccttttacttatatctggtagaattccagtgatcatcctaataaggtatatttcagaataatttttttttccttcagaataacttagaatcagatgctataagggctcctaggagcagtgtgaaatttccgtaaagataaatttgaatgttgtaaccaagtttatattaaaccaagaggccatttccaatatgattttttgtttctttttaacttgttaagtccctaagagattacatgctagggcttgagtcatttctattgtagataatgatggcccacacagtcaccttcaactatccacataagctaggctttccgcttttgccacggacagtgtgaccaagatatttccagagtaaataacccaccacaaccttggtaattcctcttttcttcttaagctccaggaagcgaaagcagaaggactcttttcagactgccctctgtagcctacattgcagctttccaaaacaggcagctagcactgggaaagcccatgtggtgaccccatatttttctgaggttcttcttttccatggtgttactttattatcagaaagtaaattcagaaaacaggtcttgcccttagcagacaagaaccacaccagtttcttgtaaaggtaacggatacattgggattcaggagtgacacagaggtccagccccagaacttgtaaggattttgtttgaacactgagcagatgcctcctccctgccacccatcacactagttagggctggccatgaattctatgccagagtcactcctgcagtctgctagggatgggccttcttatcccactctcgcacacatcccagtctagtctttgccttcacagagtcctccttgacacccctgacttaatgatagttgctgttttggagtagaattgatcaggtttaagtcatcctgctcaggttgggcatagt

SEQ ID NO: 13856 - DNA, 1508 bp, Homo sapiens
tatttttggagttattgttggcaataaatacaacaaattatttgttggcaagtgatacaatttactgtataacaacttaatagtacaaagcatgaagatgtgaaaatatcatcttaaccagtttcattctatgaacataatattctggcagctttttctataactgagaatggtatatctttttatacactgcctaaatcagtactactgccagtcacctgaggtcaggtctgcacaacactaaattgggcaataacatagaacatctaggcagtcttgacagtcaaccagtgtaatcactaggggaagaaaaagtagggcctacccttttacttattaacttaagtaataaaaattgtataaaaatatgaatgttcgctgcagaggagcctttacatgcagataatttgaagcagtctttgaaaataacacaaattattccatttaatgaagggtttgttttgtttagcttttctcttttattcagaaaacatacctgtgcttttgaaagggcttaatcccaaacaggtaatatgtgtggatcaatcatctctcctcccatgaaattaatcattcatggtaatatattaaggctggaacgtagctcttagtgacttaaaacatgacagtaagcatttacactgttggaaggtaatttcattgctatgttattaaaatgatgggaatcctatttatacatttatttatttatttatttacagaagattggttccttccagttcaatttaacagcttcagtgaagttagtataatgataagaaaaattgactgtagctattattccaagtgaaaatcatgcagctgagtcctgctgcatcctgggagcaaagcattaattcaaatgaggagtagtcagtcctagcactgtagacgccgactttaccaaccaagatattgtatgtgtgtgacattcagctaacattgatctaggcacttagtttgctaccacattgttcccttcattgattgaaactgtaaataacataacactttaaggcagctaagcaaatattttaataagccatgaaaggcaagatgccagagaaaatctgtatattcagctatttggagaactcgtgttttccacaaattaaactggagatgtcatttgaaattttcttcccttaaacatgctgtcacaacatggattccttctcatggatgtctttctaggcttataaatatatggtgtgattgctataattttgtgaaattttattcagcaattaatagtgatttcagcaatatgtactaagattccaaggcagaaataaatgtataaaggatttgagcctgtatgtgtaagaagaaactctctcttcagtcatatttcctaaattcagtgtaagtacctcgctgatttagcactggagttattccttgaatgtgtaaataatgatgttctattctgacctaatgaattcctgtaatgtgaatatttaaaataaaagaattcaatttaaatgtaaaaaaaaaaaaaaaactcg

SEQ ID NO: 13857 - DNA, 1134 bp, Homo sapiens
gcggcacgagaaaatcaagggccagtatcaagcacgatatatatagctatgcagttatcacatgggaagtgttatccagaaaacagccttttgaagatgtcaccaatcctttgcagataatgtatagtgtgtcacaaggacatcgacctgttattaatgaagaaagtttgccatatgatatacctcaccgagcacgtatgatctctctaatagaaagtggatgggcacaaaatccagatgaaagaccatctttcttaaaatgtttaatagaacttgaaccagttttgagaacatttgaagagataacttttcttgaagctgttattcagctaaagaaaacaaagttacagagtgtttcaagtgccattcacctatgtgacaagaagaaaatggaattatctctgaacatacctgtaaatcatggtccacaagaggaatcatgtggatcctctcagctccatgaaaatagtggttctcctgaaacttcaaggtgccctgccagctcctcaagacaatgattttttatctagaaaagctcaagactgttattttatgaagctgcatcactgtcctggaaatcacagttgggatagcaccatttctggatctcaaagggctgcattctgtgatcacaagaccactccatgctcttcagcaataataaatccactctcaactgcaggaaactcagaacgtctgcagcctggtatagcccagcagtggatccagagcaaaagggaagacattgtgaaccaaatgacagaagcctgccttaaccagtcgctagatgcccttctgtccagggacttgatcatgaaagaggactatgaacttgttagtaccaagcctacaaggacctcaaaagtcagacaattactagacactactgacatccaaggagaagaatttgccaaagttatagtacaaaaattgaaagataacaaacaaatgggtcttcagccttacccggaaatacttgtggtttctagatcaccatctttaaatttacttcaaaataaaagcatgtaagtgactgtttttcaagaagaaatgtgtttcataaaaggatatttatatctctgttgctttgactttttttatataaaatccgtgagtattaaagcttaaaaaaaa

SEQ ID NO: 13858 - DNA, 1638 bp, Homo sapiens
cgcgggtgaggcttaacgcgcaggaggtctcacgagagtggaagcaactctcgcgaattttaaaatttatctttttgcctagcgactgacaacaggctggttgcttggcgtggaatcctaaagtggcctggctttgagactggagtgagaccccagccctaggctggggttctttccattatagaggagacggattcagaagggctacagaccaaggttgttgaaaaccagacatatgatgagcgtctagagattaacgactccgaagaggttgcaagtatttatactccaaccccaagacaccaaggacttcctcgttctgcccatcttcctaacaaggctatggctgataacagcagtgatgagtgtgaagaggaaaataacaaggagaagaagaagacctcacagttgacacctcaacggggctttagtgaaaatgaggatgacgatgatgatgatgatgattcatctgaaactgattctgattctgatgatgatgatgaagagcatggagcccctctggaagggcctatgaccctgcagactatgagcatttgccagtttctgctgaaattaaggaactcttccagtacatcagtaggtacacacctcagttgattgacctgggaccacaaactgaagcctttgcattcctgattttatcccagctgtcggggatattgatgcattcttaaaggtcccacgtcctgatggaaagcctgacaaccttggcctattggtattggatgaaccttctacaaagcagtcagaccctacggtgctctcactctggttaacagagaattctaagcagcacaacatcacacaacatatgaaagtaaaaagcctagaagatgcagaaaagaatcccaaagccattgacacgtggattgagagcatctctgaattacaccgttctaagccccctgcgactgtgcactacaccaggcccatgcccgacattgacacgctgatgcaggaatggtccccggagtttgaagagcttttgggcaaggtaagcctgcccacggataggattgattgcagcctggcagagtacattgacatgatctgtgccattctagacatccctgtctacaagagtcggatccagtccctccatctgctcttttccctctactcagaattcaagaactcacagcattttaaagctctcgctgaaggcaagaaagcattcactccttcatccaattccacctcccaagctggagacatggagacattaaccttcagctgagacacttcccaagctgctgtttcaaggctgagctggcccctctgccccagctgagatggacagatcgttgtcagctacttgatgtccttgcccatgcccacagcttggcctcaggggcagtgcatgtcctgctgccctctctgccagagggcacagaacatgtttgtttaatgaacctgccctgcctcagattgctgtccccggggagttaatgcatctacaccactgtggggatttgagttataagaattggaatttctgagatcccatggaggttagattgggaggaaagcttaaaagatgtcctttttgtgagagggatggaattgttttctttcattcgtaaagttagtgagtaaagattttataaatcaaaaaaa

SEQ ID NO: 13859 - DNA, 876 bp, Homo sapiens
ggattctgtgtcactcatggtcacggtttcccaggctctgccagtgactggttctctgttttattcatcgtcgcttgccctgaggttgaaccacgactgagaagcctcccacatgagtgttttctcccccagcggctgtggcttcactatgtgttccccttgcacagaggggcgttgcccgagagtggacttggtgccatccgcccacgtagacctcacagttctattcagtgacactgaagtacagtttggcacctctcgggaggcagtttgcatggagacatgcgtatgacttgtccattcatcgtgcttccaggtcagttcaaagatcctagaactcgcccggaagcagaggatgaacacggacatccggagaaacatattctgccaataatgacaagtgaaaaatttttggatgcttttgaaaagcttctgaaagtagttgaaattcagtgaattggacaaacccagagtccgtttttttacgaaaagtattaagtatcctattaatggaaacagaagttgaagacctcagtttaattttcacaagagtatctgacaacccaaagctgggggtgttacgtgagggtttgaagcttttcatcagccacttcttgctaaagaacgcacaggcccacagaagcgccgacgaagccaacgtgctgagagagaaagctgaccttgcaacgaagtgtctgcaaggaaaagcttccctgagaatgtagtcagggaaggaaggagggcaggtggccctttgactgtaaaatgtcctttgtaaacccaaaggcttattctgttgcctgcgtgtgaatgtttggtagagctatatcattgtctgttaatgtattatattttgagattttttttgaaaaaaaa

SEQ ID NO: 13860 - DNA, 1329 bp, Homo sapiens
tttcttttttcttgctgtatggcaaatctcaaactacagagttctttttccaattcaagtatttcatgctttaactgcgattttatttcttctttttcagatattctcttttgtagtacactagccttatttttcagttttcgaatttttactctaagttgctcacagtggttatctttaagttttattaatcttttccataaacaaaatgtatttttaattttcaataggtgaacacaatctttacacttcatttcatgttgatcaatgagtaatatgacattcttacaattacagcaaagcgagtcaccgtcctctgagactgtttgagatgactgaattatgtcatcaaggtcatccctagaatgtatttggtttttcacctgtggctggttattttcatattcttcaagcctcttttgctctccctctgatgccatttctaagtcttgttctgctggtgtggatgtttgtacatccttcattttggtggctgtattcagaacagaatctttattttcaactgtagccttcatggtgggcagattctcaggatactctgttccagatttctgaccacccattattcttgtggcaatattcaaaagagaaactttctttttaaatataaccttcaaggctggtggtttctgagaagacactgtcccagatttttctccatcctttttttctctggttatattcgaaaaagaatccttctcatcacttgtagccttcaaggctggttgtctctgagaagacactctcttagttttttctccatacttttttcctctggctatattcaaaacagaatctttctcatcacttgaagccttcaagcctggtggtttctgagaagacactgtcccagatttttctccatcctttatttctgtggctatattcaaaacagaatcttcctcgtcacttgtacccttcaaggctggttgtttctgagaagacactgtcccagatatttgttcatcctttatttctgtggctatattcgaaacagaatctttctcgtcacttgtagccttcaaggctggttgtttctgagaagacactgttcctggaggtggtgaatccttccttcttatggctacttttgaactgggatctgcttctttcagggtaacgttcgctgaagttagtgaatccatacttcctaagaatctagttgaaatgtgatctctgtctttcaccggatgctttcctccttgtctctctcattggtgtcatgatacgtgagcagaaggtactccagtttctccagattaccatagaagacagctctgtggatccttcgcacagactctcagcccc

SEQ ID NO: 13861 - DNA, 958 bp, Homo sapiens
ggtcctcttgagcaatgaagaggatcgaaaagtgggaaaactttttgaagacaccaagtataccactctgattgcaaaactaaagtcagatggaattcccatgtataaacgcaatgttatgatattgacgaatccagttgctgccaagaagaatgtctccatcaatacagttacctatgagtgggctcctcctgtccagaatcaagcattggccaggcagtacatgcagatgctacccaaggaaaagcagccagtagcaggctcagagggggcacagtaccggaagaagcagctggcaaagcagctccctgcacatgaccaggacccttcaaagtgccatgagttgtctcccagagaggtgaaggagatggagcagtttgtgaagaaatataagagcgaagctctgggagtaggagatgtcaaacttccctgtgagatggatgcccaaggccccaaacaaatgaacattcctggaggggatagaagcaccccagcagcagtgggggccatggaggacaaatctgctgagcacaaaagaactcaatattcctgctattgctgcaaactgagtatgaaagaaggtgacccagccatctatgccgaaagggctggctatgataaactgtggcacccagcttgttttgtctgcagcacctgccatgaactcctggttgacatgatttatttttggaagaatgagaagctatactgtggcagacattactgtgacagcgagaaaccccgatgtgctggctgtgacgagctgatattcagcaatgagtatacccaggcagaaaaccagaattggcacctgaaacacttctgctgctttgactgtgatagcattctagctggggagatatacgtgatggtcaatgacaagcccgtgtgcaagccctgctatgtgaagaatcacgctgtggtgtgtcaaggatgccacaatgccatcgacccagaa
